United States Patent Application Publication US 2017/0114356 A1 - sequence listing, part 13

SEQ ID NO: 16286 - DNA, 5690 bp, Zea Mays
tttttttttttttgatgtgattagtccttggtgagctggtccggatggaccttttggtaagtgagggaccatgcatcccatcacaatgggttatgatgattagcctttagatgtgtgtatatatatgaggggtgagaggggggaggggcctggggagcaacacaagcactccacactgctgtgcagaacgagagcgtaaccatcagtactcaatagttagagcgaccaatagatgagttcctccccgtcctttggtctcctggccttagcagcagtactcctagcactgaacttagcacaacatggctccctcgccgcaaccgtcggccccagggtcatcgtcgtcggcgccggcatgtctgggatctcggcggcgaagaggctgtcggaggccgggataaccgacctgctgattctggaagcgacggaccacatcggcgggcggatgcacaagacgaacttcgccggcatcaacgtcgagttaggcgccaactgggtggagggcgtgaacggcggcaagatgaaccccatctggcccatcgtcaactccaccctcaagctccgcaacttccgctccgacttcgactacctcgctcagaacgtctacaaggaggagtacgtagcggtggcgtctacgatgaagattacgtccagaagagaattgaactggcggacagcgtggaagagatgggggagaagctctctgccactttgcacgccagtggcagagacgacatgtctatccttgccatgcagcgcctcaacgaacaccagccgaacgggccggcgacgccggtggacatggtggtggactactacaagttcgactacgagttcgcggagccgccgcgcgtgaccagcctgcagaacaccgtgcctctcgcgaccttcagcgacttcggcgacgacgtctacttcgtcgccgaccagcggggctacgaggccgtcgtctactacctcgccggccagtacctcaagaccgacgataagtctggaaagatcgtcgacccgcgcctgcagctcaacaaggtggtgcgagagatcaagtattccccgggtggcgtcaccgtcaagacagaggacaactcggtgtacagcgcagactacgtcatggtttctgcgagcctgggtgtcctgcaatccgatctcattcagttcaagcccaagctacctacatggaaggttagggcgatctaccaattcgacatggccgtgtacaccaagatcttcctcaagttccccaggaagttctggcctgaagggaaaggaagggagttcttcctctacgccagcagcaggagaggttactacggagtgtggcaggagttcgagaagcagtaccctgacgccaatgtcctcctggtcaccgtgaccgacgaggagtcgaggcgcatcgagcagcagtcggacgagcagaccaaggcggagatcatgcaggtgctgcggaagatgttccccggcaaggacgtcccggacgccaccgacatccttgtcccgaggtggtggtccgacaggttctacaagggcaccttctccaactggccagttggcgtcaaccgctacgaatacgaccagcttagggcaccggttgggagggtatacttcaccggcgagcacaccagcgagcactacaatggctatgtccatggagcctatctttcaggtatcgactccgctgaaattctcatcaactgcgcccagaaaaagatgtgcaagtaccatgtccagggaaagtatgactaggaagctacagcaaattgatttaaagctccagcaaattgagcagtgtggatgttgcatttctcagttcattttttccctgttttcaacaaagtatagatgacagccatgttccctcgcggcatatgccttttcattattccaataaagctagcggctggttcgatgagcacgatttgtgatcgagtatcctgtttaataagtacggtgtttgctttttttttcatgatgaggggtgcatggcttatgatattctatctatttgctaatcaaaactttgtaccatgggaatcactagtacacacaacattattactcgtgatttcagatctacttttaggtcttgtttaggaggaagaagacagtagagaattggtagggctagaagcatcttactatacaattttaaatagtgagttgattttagctccttcaatctcctccgatatactcgtgtttctagtttccgccgatgtgaaagaccagaaaatcacacattttacaggcgtcttcttgagatccacaggcgttctcttaggctagtgtaaatcacgaactttatagacgttcgtttaagaagccaatattgaggataatttagatccttagcgtaatgctgagcttcaacaatttgcttatgtgtcagttgttttttcgaagcatgtcgaatgatgaattcaagatctctggtcgacaccgctttgggtatcgacagtgaaattttctctgacaggctctcgtttatttgctctgttgaccttatttccgaaggtccagccttagtgcaatcaggagcaacacttacgtcgatagctttttccaactctccaggtttgtctttggaaatccttgtaggaaaaggagtagccattttcgaaggcctcaaaacaacgcctagaatgctggccatccttctccctttcttgggtgtctctactaaagcagatgttattcttgacagcccttgccccaccggagaactctacggcttcggctgcttctcggccttggaactttctgtttttaatttctccatttgaatagtgggaacttcggctgctgcagggggtgttttgatcatctactcaaaaaattccaaaagcagcattagactaaatattcttcggtttaaaacaaggaaaaagaaaaagtatttacctacgaagctgagggggtatcttcggcagcttcaacagcctctgtctttgaaacccctgcagcaggcagtatagcagccctttctaaaaatatgacttcggccagtgagttataacttttgttctcttcggcttcggcgcgacataagaggtcgtcaatgcaattttccttttcgttccttattttcgtgccggaaagtagtaatcaagataaaaaaaaccaataacattaaatactctattcagccttttcttcccacgggcaccaaaggcggtgtggcagaacctcccaagttattgggcccacatgcacctgcccttgtctcaaagacctcagatggctatgcatgtgcaccagataacttaacaggatctatccgagtgtcccaaggacctcggataaaccacttacaaccaggaccataagattaagtaacacaaatcacacaccaacatttttgcagcggaaatcttattaccaaattttacaagttacatattttttacattatatttatcagagtgattacaaaagtataagtttgaaatatatgctagctcaagtgaccatcctcaatgagaagtataaaagagttacttagacttataagaaggtcgagcccaccgacacttaacaccatcatcagcagcacaaaactataacctgaaaaacaacagggaataaaactctgagtatggaattactcagcaagacttacccgactaaagaaaagactctcaagggtatgctggctagagggattcaaggtatggcttatcaagaatcaaagactctgttttgcagaaaagcttactatgagtggatctttaaaatccatttttatttgtcaggttaagtaaagttacctgcatctagagttctttctaccctagttcaagcacttgacatatacaagcgaatttcttattaacccttcttattcactagaatgctacgtgtagggcagtgaccaagtcttcatgtccacgaagttacggcgatccgaatcaattatactcagctgaggatctacaatcacacgacatatgtaacacttaacccttgcatatgtcaactcgccaccggggttcttaagaccagattaggttcacgccaaccgagagcacaaatacaccaccgtccagcctcttgccacggagggtacacgctactctcgccatctctccactcacattgggtgttatcttattctggtattagtctgcccgaggcaaagcttatccatgatgaggcatgtgaccagttaaagggtcctcgatcagcaagcctacatcgacaagatccttaatcgactcagacggagacactacaccgagactcccttctcgtgcaagtcaaccgcctggtctcagctttattattttcaacccaaagtctggtacctggcagaggtacatcttttccgatgttaaacccatcaaggcctttgacggatccaccatcaagttttatttttgaaaacattcccacccactgaagcatcacttttgttttaaaacaaaacatttttgtttgctaaagcaaggctaagcatcataaaattcttttcaaaaagggtatcaaggaagggtaatcaattttcaagaaaggaaatgcaacaacggtttagcacacaactcctatcacctaatgcatcaaacaaggtgataaagattttaaaacatcaaagaggtggcaaatgcaccggggcttgcctgaataacactaggttagtgttgttagacgatgaacactcgacgatcatccttgtcttaacacttgatcaggcaggttcgtccatcagcatcaccatgcggagtagtccacacttggggtcgacttggctcgtcttccgcatcgcgcgatcaattaacgtacctcatgggatgcacgatgcacatgtatgagcacgagtataaatagaacaagatagataatctacactaaaaaggatgaaacacttataaccaagcatattttatacaatataccaattacaactttagaactaaaagacttaaagtgtttatacgcattacttatcagacagaccctagattttggttgaaacagatatatcgatgttacttgatcctaaatatccaaagtagcaatcaacatccattcaaatcatgaaatcgaccaacacatagaatattatacctagtttagagagcacactaaacgacttataacttgaacttcaaaattcttggacacctaacacttataaaatttgatagaagaactttcattaactttctaaactaatttaccggttaacctgtgtatcatatatattaataaaactttccatttttagcacctacagtcccgcaaacactcagacctctttcaacctacgacatcgaccaaattaccaaagcgactcaggcaatctaataaatattatacctagtcaaaccatccaccaatccactaacacgaataacaaatttacttgccctcactaattcgacgcgtttgtcgcaagcacgacgacggtttccggttgacgtcattgatcgcacacgtctggcgagcgaggcataccgtttccattcttgaccaaatacctgtgggattcctttttggtcgagctggtgacgcgtggccaagaccagagtgtcttcacagcttgggggcttggcgtagacgaggatgacgatcaacggcttgttcgagcttttgtcgagcacttggtgaatatcacgctactagcttcgtcttcacctgattcttgggatttcttgatgacgcatggaacgacgacgagatagtgtctagagcga

SEQ ID NO: 16287 - DNA, 1272 bp, Zea Mays
tttttctattttataatatgtttgaattatttgcattctaatgtgtgcaactttcgtacttaactgttgattgctaaacattatatctatttatcaaactttttatcaaatctactataaaactgtatatacagttgcatataaaaaatttattacggtacatcctgtataaaaaacctagatccgccactgtggagaggcggtgaacgccaaggctgtgatggcatatcatatcgtatctatcactaacctagctaagtagcatattacattacattacgttatgttatatgatatctatcattaacccagccaagtagcatgtaaagctgactcttattctccgcgcaccgcgctttatcaactatggttcaaagattttcccttgagatcaaaccaaacccagcatgcatcagcctgcgatcaaatcaccgcccgtcgtcgatgactccagtcatcgccggcgacggggtgagaggcgcagtcgtctccctctgcacgctgaactccccggtcgtgtcgccagagtagccgctggtaacatagctgctgttcccacccctgcgctgccactcagtgatgtagcttggcttggtcaccacctcaggcacctcgatgtctccggtgagcatcttcactacacgcgacatcggtggccgctggtgaggcgaaccctgcgtgcagaggagcgcaacattgatgactctgatgactgcctcttcaccgtcggattcttcgatccttgcgtccaggatgccaagtgcttggtccctctcgtacagctcccaggcctgcaaaccatagagcgcttcagtaggtttacaagaatgaactgatgcctcttcttgggcttgagaatattttgatcagcttacgtacgtacccactcaaagagatagatcctgtgttcctccaaggaattgtcagtgtttggtcgacctgcgacagtctccattgccaataccccgaaggcgaagacgtcggccttttcagtcagatggcctctcattgcatactcaggcgccaggtagccaaacgtgcctgcgattttagtgctgacatgagtcttcttctcatcaaagagcttggcaagcccgaaatcggaaatcttgggcgtgaggtcggtgtcaagtagaacattgctggccttgatgtccctatgcacgatgcgcacgctggactcctcatgaagataggttaggcctcttgcaatacctaaaatgatctcgaagcgagttggccagtcaaggatcgtaccactgtcaccaaaga

SEQ ID NO: 16288 - DNA, 636 bp, Zea Mays
atgcggctgcatggcgtagggactcggtcactcgacggtgcagcgcaggtgagcgtggccgacaacgaaggggagagatgcagttcatctggttgtgagagatgctggagttcatttgaacaagtccacacaaagagacacaacaagctccttcatgacagaatgaaggatcttgtgtttgtcaaattcaactcaagactaaagcaaaagaaagatgacatggataaagatcccattgagaaacgtgtccattatgttgttttagaagatgaagataacaagtggatcactggcattgagccaacaaaaggagatgaagagcaagaagaagaaactgaaacatcatcacaaggagttgcagctgcatctcaaagagaaatagaagagagaactaaaagagttaactggcagaaattaagaagcaggaagagaaataggttgatccctagtttccctacatttgaggaagaggagtcatctccatcttctgatgaagaagatgaaaatgatattgatatgctatctcgttctgattctgaggctgaaccatagaagtcattgctctaatgctcttggattgtgaacctatggttgtttggtgtttgcttatgtacttgatcttgatgccttcacggc

SEQ ID NO: 16289 - DNA, 1496 bp, Zea Mays
agacgaggaagcaaagaaaacccaacgcaaaagcaacaaacaactcccaaggtccaaagcccacccgtactcatccgagatccccaaccatggccgtcggcgacgtggagacggcggcgccgctgctgcccccgccggcgtctgccctggcggacgagccctccgcgggcccgcccccagacgaccggctcggcatcggctacctcatcttcttcaccctgggcgccggcttcctgctcccctggaacgcgttcatcaccgccgtcgactacttcgacttcctctacccgggggcccccgtcgaccgcgtgttctccatatcctacatggtctccgccttactgcccctgctcgtcatcgtgctcttcttccccaagtccagcgcccccatccgcatcaacacggggctcacgctcttcacgctcacgctcgtgctcgtgcccgcaatggacctcatctacgtcaaggggagggccgggctgtacggagcgttcgatgtgactgtcgccgccacggctctgtgcggggtcgccgacgcgctcgtgcagggaggcgtcatcggcttcgcgggggagctgcccgaacggtacatgcaggccgtcgtcgccggaaccgccgcctcaggagtgcttgtctcggcactgagagtcttcaccaaggcactgtacccacaggacgcgaacgggctaaggcaaagcgcgatcctctacttcgtggccggcatagtcctcatggtcatctgcatcgtgtgctacaacgtggcggacaggctcccggtcgtgatatactacaagaacatgaagaagagggcgcagaaagcggaggtcggcggcggcatgacgggccccgcgtggaggtcgacgctgtggagcatcgtcgggaccgtgaagtggtacgggatcggagtggcgctcatctacgccgtcacgctctccatcttcccagggtacatcacggaggacgtgcactccgaggcgctcggggactggtaccccatcatcctcatcaccgcctacaacgtgttcgacctcgtcggcaaggccctgcccgctgtctacctcctccagaatggcagcgccgccatcgcggggtcctttgcgaggctcctgttctacccgctcttctacggctgcctgcacgggccgagctttttccgcaccgagatccccgtcaccgtgctgacgtgcctcctggggctcactaacgggtacctgacctccgtcctcatgatcctcgcgcccaaggctgttcccatccaccactcggagactgccgggatcgtcatcgtgctgttcctcgttgttggccttgtcattggttccattgtggcttggttctgggtcatctgataccggggtgaaaagatttccgaaatgtgtaatttgcaactcttggaattggatttgaaggtgacctaatgtcaatgtgaagaatctcggctccttatcaaactcttcccatttcctctttactgcaacatcgtacctgttgctcaa

SEQ ID NO: 16290 - DNA, 2135 bp, Zea Mays
gtttgcacatcagaaaatcagtgacacaaacattcggttctgattcagttcacaatcatgtaaaatatgtaatgtagtcattttccttgaaaatgaaacacatctgattgtgaagcatgatgaaatgttaatgaaaacctttacaaggctcaaggtaaacaccaaaacaggtggattttgtcatcacggttctcttatcagtatgacgcaagagcacaatacataacataaacaaatttgtaactcctcgtacctagatactgctcaaactgggtatctccatgaaactaaaaatgaaataatgtgccattttgacactcacttctcttacttatccaagcttgtgttagaccttcgccacaggatttgtagcctaattaacatgaacactactaaattaaggtggagattagcagcaatgatcatcccctaaggctaaatggtttgccagcaatgaactctttaactccacccccaccccctgccctctggctcaaatcttggaagagttatggacattggccaattctcattctctttacatggctagacatcatcttccaactttctcccctttgattgaaaggctcatgtcgtaagttcatactctgcacagggatccgtacaatgccttgtttaagcaggaaaaatgatgtcgccaccaaaggtataatagatcatcattagctaataaataaactacagtagtgtttctctcatgctagggacatagattatgtatttgatctaaaacaaacattaactaataacaacaggagagtagactgcttagggcttcatcaacattttaaattcgccctattgccagcatcggcatagtaaataaataaacagtcccccatgaagaattagtaatctgcagagttgatcatccaagtatatgaacataaagggattcattaattaaaattgagtcataattatccttctttggaaactagtttcaagctattacagtctgcatatggctatcttctctacaaaaaaagacattttgatgccttattaggaccatactcactcttaaccttttggattttttattatgcggcctctcattggagctgggatacttcagtcagtagatttaaacaacagacttccctgactcctacatttgtataaagaaaaattgtgtcaaataagtgtgagaggagcttcatagagttcttaggctcctaaaaataattagctttgaccgatatggtccctttatttgtgacatgagtggaaatttactactatgaccctcctatactataatggacatttacaccaacggcacaattagtggtgctagactgctagtccaccttaattttgtactccctttgtcctaaattaacgtcttggcttttctacaaacatagttttactatgtatcttagacatagtgtatatctaggtgcataaatctatgtacctagaaaaaacaaaatgacttacagtttaaaacggggagagtagtgttcatgttaattaggctagagactctatggccaaagtcttttgtttctaacatgctaaggctggtagcttattcatgcaatgtcaaatcccttttcaacattggccctggcccctgggcatagcctcctataaaaacaatgtaatctacacactccagtaaaaaactagctcacacaaggaaaacttcgccaagaatgatttgaagcacgaagtgtatggcagaactaacaatctaaaagcagaggacgatgtagcttaaatttagaaacaacgttacatcaatagctcacccgtacaaatatgcaaaccggagaaagtagcacaaacaagtgaatagtgatagcaaagagctgatggtggtgacttatttacttgctaacaaaaaatattggatcacaaagtgagtgtaatcaatatccacacgactataatcttgatccaaggaataatcataatcaaaggatccaacaaggggatattctgaagggtaagtttctaaacatttcattattctaaagaaaataagtgccaaactgcaaattattagtataacttaactcctgagtactgacattgtccccctttcctgaattcaaccagggaattaagagaaaccaccaaacaagatatctactaaaagaagc

SEQ ID NO: 16291 - DNA, 2634 bp, Zea Mays
tcttttttgttacgtgttttctttcttttttattctttttcatttcatgtttttattctgtcttgtgtataagcacaaaggaactaaaaaatagactggacttttagctcgtacatacatgtataacatgttagttaatcgtatatcactactgtttctatatatatgatatatattttctttataccacacaaatcaacatgaccttgattagaggcgattgagaccatggttcaaattctgacaattgattttttatattatattttactgacgtattatattagcgcattatagtagtagagatgactctaaatattttgccataaaatcttggtcttcacaaggtggtttgacctttttgcccctaagcagaagcacctggctcaaatattctctggaacggccggccgcgccgaccaccgaactgcactgcagactgcagagcacctctcctgtctcctcatctcacgctgacaagatccaatcacgacgctaatcagtcgtcctaattaatcggcggccccgtgatcggatcgtacccgccgcagatcaccactgtccaagtgcccagtcgtagatcccgtgatcttttttttctcggtggggttgctgctgcggcttgaaagatgacggagatggtggtggcggctcggacgccggcccccgcggcggggaggtggggcgcggcgccgccgcaggagctgctggagaggctcaaggactacggccaggagggtgccttcgccttctgggacgagctcgcgcccgaggagcgcgaccgcctcatccgggacattgagagcctagatcttcctagaattgatcggattgtccgatgctcgcttagatcacaaggtgctcctataccaacctttgagcctgttcctgagtcaagtgtctcgacagtggatgacagaactcctgaggacaaagaaaggtggtggaggaggggcttgagagccatttcagaggggaagttggctgttgttttattggctggtggccaggggactaggcttggcagttctgaccccaagggatgtttcagtatcgggctcccatctaggaagtcacttttccaactacaagctgaacggattttatgtattcagaagctggctgcacagtgcactgatgccccaggtagcacagtgcaaattcactggtatataatgacgagtccttttaccgatgaagtgacccgaaagttctttgaaacccacagatattttggtttggagcctaatcaagtgacatttttccaacagggtactattccatgtgtatctcatgatggaagatttattatggagacaccatataaggtagcaaaggctcccgatggcaatggcggagtatatgctgctctaaaatctaaaaggttgctcgatgatatggctgcaaaaggtgttaagtatgtagattgctatggagttgataatgtattggtccgtgttgcagatccaacattcctaggatacttcattgacagaggtgtatctgctgctgctaaggttgtcaggaaggcatatccacaagagaaagttggagtatttgttcagcgtggaaagggtggacccctctctgtagttgaatacagtgaaatggatgcagctatgacaactgaaatcaatcaaactactggccgccttcgttattgctggagcaatatctgcttgcatatgtttactttggattttctgaaccaagtgacaaacagtcttgaaaaggatagcatttaccatctagccgagaagagaattccttcagtccatgggtacacatcaggattaaagcttgaacaatttatatttgatgtattcaactattctccttcaacagctctttttgaggttttgcgtgaggaggaatttgcgccagtgaagaatgctaatggtgcaacttatgacactcctgacagtgccagattaatgctgcttcggctacatagccgctgggtggttgctgcaggtggcttcttgactcattctgtgcccttgtatatgacaggagttgaagtttctccgctttgctcttatgctggagagaatctagaagctatatgcagtggaagaacattccatgcaccaagtgagatttcattctaggcatagtagttgttgcaagcaatctgaatacaggaagatgagatcaggccaattttgattacaacatgactactcttgcaaatagaatgttgatattagtaaactattgtatgttatgcaaggatcaaatattgtaacgcaacacctgaagttgcctcctttctcccctagcattaatgtgtatctgcctttcgaatgtagattatgacatgcttttgtgtaataattttttttgaaaacagcaaatgtaccaaatatttattatctttgaacaattgtaattcttgattctatgaactatgatgtaagaaaaatcaaacaatgagatgttctattttctctgtttcaagtctgtctttacctagaattgcttcaagcagatattagtgagtcacagtatggttttaaccattgatctccatcgatgaaagatgtgtttaggtaaggtaacacttgcacatcactaagcttctgagcataaggcactctatctgccagataagaatcaaaattaacattggag

SEQ ID NO: 16292 - DNA, 2172 bp, Zea Mays
cctgattctatctgccctatttttcttcacatttgttatgtagttgctcattatacattgaaggcagaaagtcattctccaatctgaaggcgaaacaaggtgtgcacatatatgttctagaggataaagttcactgagctgctgttgggcattggagagcccagttgtggttctatgcctgaaaggaattctttgtaattttctcctgtatctggttctgttatcatcattattttcctggtgtggggcaatcatgtcagagagcgagttagcagtaataaaaccagaggcattgaaaacttatatctggcttcagtgctttgatggctccatacaacaagtggaggaagaagttgccatgttctgccctatgatatgtcgggaaataatgaaaaatgggacagggtcatctaagaatcatgctatagttctaccggaaagagttaatccggcaagtttgagtttgattcttgattattgtcggtttcatcaggtccctgggcgctcaaacaaggagcggaagtcattcgatgaaaagtttgtcaggatagacacagaaaaactgtgtaagttggcttctgcagcccttggtctgcagttaaggccactagttgatcttacttgtggagcacttgctcgaatcattggaggaaaaacacctgatgaagttagagatattttccatttaccagatgacttaacagaggaagagaaactggagccactaaaaaatttaaatgatgatcctacaattcgtttattgaaccgattgtatgcaaagaagcggaaagaactgcaggaacgccagaaactaaaggatgttcaaacacaagaagaacaaaaagacgagagatctttggatgagttactttgttttataaatggagatggagattccagaggtgggaaagcttctaagagtaagaaaaagaataaaagaaggaaagatcaagctaagaatcccacaaaagcgaactccgaacctgtaaataaggagggagcttcctgtgtggttccgtgcaaagcagataatggtaacatttctaggcatccttgccaaagtcaaaatttgcaagataccgagtaccccttcgacaatgctgaccttgacgatggacttgatcctgcaatgagggaggagattgatagagaagtggccgacttcgagatgaagttgaagctagcttggaccgaaagaatgagtttggagcaggaccaacaaatggagtcacatgttgatacgcggtgaaaaccttaggcaggaaggagttttggtcgagaggtacaggatgacattgcgaggtgctattgtcatatgctgtgatttgtatgtaccctgctcttcaagaaagtagtgcccaaccatgttactgttaccccccaaagaaaggtgggtgactttgttagtgtaaaaaccagaagttttgaatctatgtatgttcattaattttgacaggaactcttatcattatgaaatgaataaaagggaaaatgatgtgttgttggaagttggcggaaacaataggtcgcttagctctataccgttggttcaatagtgctccagttttttctatccacgtttgggactggcttgttgagttgtttttaccgtgtaaactcggtcaaaatgtttgcaattatggtatttgtggactgctggataattctcagtcaaaaagtttgtgaaaatgtattatttgtggactatttgatacttctcagtcaaaaagtttcaccaaatatggtatttgggcattattgatatccttggattgatggagaccacgtgcaagccctctatcaaacgccacgaatagaaatttgcagcttccttgccagtgttatggtcaagttctcaagtttttcatgaaactacgaaaaactcgccaatgcccttttttttttaagtttgccttgtcgagacctgcaaatctacccaagaaaggcagaaatttgcatgaaattattttgaatacgggctgctttctaagtcttcccagacctctagctttccatttcgaacgattgcaagaacaaagctgctttctaagtaaaaaaaatgaaacaaagataaaagcgggagggtacaagcagggccagggtcacctctttttgaactcttcggccctgtagtttagtcttcccagtttttgcaatggagccgtagccgcc

SEQ ID NO: 16293 - DNA, 2175 bp, Zea Mays
cgcaggttatcaaatacggtgaaccttgtgttcctgtgaaattttgcagctcattatacattgaaggcagaaagtcattctccaatctgaaggcgaaacaaggtgtgcacatatatgttctagaggataaagttcactgagctgctgttgggcattggagagcccagttgtggttctatgcctgaaaggaattctttgtaattttctcctgtatctggttctgttatcatcattattttcctggtgtggggcaatcatgtcagagagcgagttagcagtaataaaaccagaggcattgaaaacttatatctggcttcagtgctttgatggctccatacaacaagtggaggaagaagttgccatgttctgccctatgatatgtcgggaaataatgaaaaatgggacagggtcatctaagaatcatgctatagttctaccggaaagagttaatccggcaagtttgagtttgattcttgattattgtcggtttcatcaggtccctgggcgctcaaacaaggagcggaagtcattcgatgaaaagtttgtcaggatagacacagaaaaactgtgtaagttggcttctgcagcccttggtctgcagttaaggccactagttgatcttacttgtggagcacttgctcgaatcattggaggaaaaacacctgatgaagttagagatattttccatttaccagatgacttaacagaggaagagaaactggagccactaaaaaatttaaatgatgatcctacaattcgtttattgaaccgattgtatgcaaagaagcggaaagaactgcaggaacgccagaaactaaaggatgttcaaacacaagaagaacaaaaagacgagagatctttggatgagttactttgttttataaatggagatggagattccagaggtgggaaagcttctaagagtaagaaaaagaataaaagaaggaaagatcaagctaagaatcccacaaaagcgaactccgaacctgtaaataaggagggagcttcctgtgtggttccgtgcaaagcagataatggtaacatttctaggcatccttgccaaagtcaaaatttgcaagataccgagtaccccttcgacaatgctgaccttgacgatggacttgatcctgcaatgagggaggagattgatagagaagtggccgacttcgagatgaagttgaagctagcttggaccgaaagaatgagtttggagcaggaccaacaaatggagtcacatgttgatacgcggtgaaaaccttaggcaggaaggagttttggtcgagaggtacaggatgacattgcgaggtgctattgtcatatgctgtgatttgtatgtaccctgctcttcaagaaagtagtgcccaaccatgttactgttaccccccaaagaaaggtgggtgactttgttagtgtaaaaaccagaagttttgaatctatgtatgttcattaattttgacaggaactcttatcattatgaaatgaataaaagggaaaatgatgtgttgttggaagttggcggaaacaataggtcgcttagctctataccgttggttcaatagtgctccagttttttctatccacgtttgggactggcttgttgagttgtttttaccgtgtaaactcggtcaaaatgtttgcaattatggtatttgtggactgctggataattctcagtcaaaaagtttgtgaaaatgtattatttgtggactatttgatacttctcagtcaaaaagtttcaccaaatatggtatttgggcattattgatatccttggattgatggagaccacgtgcaagccctctatcaaacgccacgaatagaaatttgcagcttccttgccagtgttatggtcaagttctcaagtttttcatgaaactacgaaaaactcgccaatgcccttttttttttaagtttgccttgtcgagacctgcaaatctacccaagaaaggcagaaatttgcatgaaattattttgaatacgggctgctttctaagtcttcccagacctctagctttccatttcgaacgattgcaagaacaaagctgctttctaagtaaaaaaaatgaaacaaagataaaagcgggagggtacaagcagggccagggtcacctctttttgaactcttcggccctgtagtttagtcttcccagtttttgcaatggagccgtagccgcc

SEQ ID NO: 16294 - DNA, 2512 bp, Zea Mays
cttcctcccaacccgcaggttatcaaatacggtgaaccttgtgttcctgtgaaattttgcagctcattatacattgaaggcagaaagtcattctccaatctgaaggcgaaacaaggtgtgcacatatatgttctagaggataaagttcactgagctgctgttgggcattggagagcccagttgtggttctatgcctgaaaggaattctttgtaattttctcctgtatctggttctgttatcatcattattttcctggtgtggggcaatcatgtcagagagcgagttagcagtaataaaaccagaggcattgaaaacttatatctggcttcagtgctttgatggctccatacaacaagtggaggaagaagttgccatgttctgccctatgatatgtcgggaaataatgaaaaatgggacagggtcatctaagaatcatgctatagttctaccggaaagagttaatccggcaagtttgagtttgattcttgattattgtcggtttcatcaggtccctgggcgctcaaacaaggagcggaagtcattcgatgaaaagtttgtcaggatagacacagaaaaactgtgtaagttggcttctgcagcccttggtctgcagttaaggccactagttgatcttacttgtggagcacttgctcgaatcattggaggaaaaacacctgatgaagttagagatattttccatttaccagatgacttaacagaggaagagaaactggagccactaaaaaatttaaatgatgatcctacaattcgtttattgaaccgattgtatgcaaagaagcggaaagaactgcaggaacgccagaaactaaaggatgttcaaacacaagaagaacaaaaagacgagagatctttggatgagttactttgttttataaatggagatggagaggtgggaaagcttctaagagtaagaaaaagaataaaagaaggaaagatcaagctaagaatcccacaaaagcgaactccgaacctgtaaataaggagggagcttcctgtgtggttccgtgcaaagcagataatggtaacatttctaggcatccttgccaaagtcaaaatttgcaagataccgagtaccccttcgacaatgctgaccttgacgatggacttgatcctgcaatgagggaggagattgataggtgagggcataagatatcttatgggttgatgcacgcagctctttgttgtgctactggcctgtttctcaatcgaaaaagcctgtttttgtacatgaaacagcaaggttattgatgcttatatactgtcattttgataagtataagctgatttctggactttgaatcgataaattctgttaaatgcttccactcatctttttctgcagttctgcttgaactttgtggttggtgcttgtgcctgtcgcttgatccacccatttactgttgacatgcatgaaacactgccgtgttttgatataacaagcgattgttcttgacaattgacatacagagaagtggccgacttcgagatgaagttgaagctagcttggaccgaaagaatgagtttggagcaggaccaacaaatggagtcacatgttgatacgcggtgaaaaccttaggcaggaaggagttttggtcgagaggtacaggatgacattgcgaggtgctattgtcatatgctgtgatttgtatgtaccctgctcttcaagaaagtagtgcccaaccatgttactgttaccccccaaagaaaggtgggtgactttgttagtgtaaaaaccagaagttttgaatctatgtatgttcattaattttgacaggaactcttatcattatgaaatgaataaaagggaaaatgatgtgttgttggaagttggcggaaacaataggtcgcttagctctataccgttggttcaatagtgctccagttttttctatccacgtttgggactggcttgttgagttgtttttaccgtgtaaactcggtcaaaatgtttgcaattatggtatttgtggactgctggataattctcagtcaaaaagtttgtgaaaatgtattatttgtggactatttgatacttctcagtcaaaaagtttcaccaaatatggtatttgggcattattgatatccttggattgatggagaccacgtgcaagccctctatcaaacgccacgaatagaaatttgcagcttccttgccagtgttatggtcaagttctcaagtttttcatgaaactacgaaaaactcgccaatgcccttttttttttaagtttgccttgtcgagacctgcaaatctacccaagaaaggcagaaatttgcatgaaattattttgaatacgggctgctttctaagtcttcccagacctctagctttccatttcgaacgattgcaagaacaaagctgctttctaagtaaaaaaaatgaaacaaagataaaagcgggagggtacaagcagggccagggtcacctctttttgaactcttcggccctgtagtttagtcttcccagtttttgcaatggagccgtagccgcc

SEQ ID NO: 16295 - DNA, 2187 bp, Zea Mays
caatcgcttcctcccaacccgcaggttatcaaatacggtgaaccttgtgttcctgtgaaattttgcagctcattatacattgaaggcagaaagtcattctccaatctgaaggcgaaacaaggtgtgcacatatatgttctagaggataaagttcactgagctgctgttgggcattggagagcccagttgtggttctatgcctgaaaggaattctttgtaattttctcctgtatctggttctgttatcatcattattttcctggtgtggggcaatcatgtcagagagcgagttagcagtaataaaaccagaggcattgaaaacttatatctggcttcagtgctttgatggctccatacaacaagtggaggaagaagttgccatgttctgccctatgatatgtcgggaaataatgaaaaatgggacagggtcatctaagaatcatgctatagttctaccggaaagagttaatccggcaagtttgagtttgattcttgattattgtcggtttcatcaggtccctgggcgctcaaacaaggagcggaagtcattcgatgaaaagtttgtcaggatagacacagaaaaactgtgtaagttggcttctgcagcccttggtctgcagttaaggccactagttgatcttacttgtggagcacttgctcgaatcattggaggaaaaacacctgatgaagttagagatattttccatttaccagatgacttaacagaggaagagaaactggagccactaaaaaatttaaatgatgatcctacaattcgtttattgaaccgattgtatgcaaagaagcggaaagaactgcaggaacgccagaaactaaaggatgttcaaacacaagaagaacaaaaagacgagagatctttggatgagttactttgttttataaatggagatggagaggtgggaaagcttctaagagtaagaaaaagaataaaagaaggaaagatcaagctaagaatcccacaaaagcgaactccgaacctgtaaataaggagggagcttcctgtgtggttccgtgcaaagcagataatggtaacatttctaggcatccttgccaaagtcaaaatttgcaagataccgagtaccccttcgacaatgctgaccttgacgatggacttgatcctgcaatgagggaggagattgatagagaagtggccgacttcgagatgaagttgaagctagcttggaccgaaagaatgagtttggagcaggaccaacaaatggagtcacatgttgatacgcggtgaaaaccttaggcaggaaggagttttggtcgagaggtacaggatgacattgcgaggtgctattgtcatatgctgtgatttgtatgtaccctgctcttcaagaaagtagtgcccaaccatgttactgttaccccccaaagaaaggtgggtgactttgttagtgtaaaaaccagaagttttgaatctatgtatgttcattaattttgacaggaactcttatcattatgaaatgaataaaagggaaaatgatgtgttgttggaagttggcggaaacaataggtcgcttagctctataccgttggttcaatagtgctccagttttttctatccacgtttgggactggcttgttgagttgtttttaccgtgtaaactcggtcaaaatgtttgcaattatggtatttgtggactgctggataattctcagtcaaaaagtttgtgaaaatgtattatttgtggactatttgatacttctcagtcaaaaagtttcaccaaatatggtatttgggcattattgatatccttggattgatggagaccacgtgcaagccctctatcaaacgccacgaatagaaatttgcagcttccttgccagtgttatggtcaagttctcaagtttttcatgaaactacgaaaaactcgccaatgcccttttttttttaagtttgccttgtcgagacctgcaaatctacccaagaaaggcagaaatttgcatgaaattattttgaatacgggctgctttctaagtcttcccagacctctagctttccatttcgaacgattgcaagaacaaagctgctttctaagtaaaaaaaatgaaacaaagataaaagcgggagggtacaagcagggccagggtcacctctttttgaactcttcggccctgtagtttagtcttcccagtttttgcaatggagccgtagccgcc

SEQ ID NO: 16296 - DNA, 2199 bp, Zea Mays
caatcgcttcctcccaacccgcaggttatcaaatacggtgaaccttgtgttcctgtgaaattttgcagctcattatacattgaaggcagaaagtcattctccaatctgaaggcgaaacaaggtgtgcacatatatgttctagaggataaagttcactgagctgctgttgggcattggagagcccagttgtggttctatgcctgaaaggaattctttgtaattttctcctgtatctggttctgttatcatcattattttcctggtgtggggcaatcatgtcagagagcgagttagcagtaataaaaccagaggcattgaaaacttatatctggcttcagtgctttgatggctccatacaacaagtggaggaagaagttgccatgttctgccctatgatatgtcgggaaataatgaaaaatgggacagggtcatctaagaatcatgctatagttctaccggaaagagttaatccggcaagtttgagtttgattcttgattattgtcggtttcatcaggtccctgggcgctcaaacaaggagcggaagtcattcgatgaaaagtttgtcaggatagacacagaaaaactgtgtaagttggcttctgcagcccttggtctgcagttaaggccactagttgatcttacttgtggagcacttgctcgaatcattggaggaaaaacacctgatgaagttagagatattttccatttaccagatgacttaacagaggaagagaaactggagccactaaaaaatttaaatgatgatcctacaattcgtttattgaaccgattgtatgcaaagaagcggaaagaactgcaggaacgccagaaactaaaggatgttcaaacacaagaagaacaaaaagacgagagatctttggatgagttactttgttttataaatggagatggagattccagaggtgggaaagcttctaagagtaagaaaaagaataaaagaaggaaagatcaagctaagaatcccacaaaagcgaactccgaacctgtaaataagttcaggagggagcttcctgtgtggttccgtgcaaagcagataatggtaacatttctaggcatccttgccaaagtcaaaatttgcaagataccgagtaccccttcgacaatgctgaccttgacgatggacttgatcctgcaatgagggaggagattgatagagaagtggccgacttcgagatgaagttgaagctagcttggaccgaaagaatgagtttggagcaggaccaacaaatggagtcacatgttgatacgcggtgaaaaccttaggcaggaaggagttttggtcgagaggtacaggatgacattgcgaggtgctattgtcatatgctgtgatttgtatgtaccctgctcttcaagaaagtagtgcccaaccatgttactgttaccccccaaagaaaggtgggtgactttgttagtgtaaaaaccagaagttttgaatctatgtatgttcattaattttgacaggaactcttatcattatgaaatgaataaaagggaaaatgatgtgttgttggaagttggcggaaacaataggtcgcttagctctataccgttggttcaatagtgctccagttttttctatccacgtttgggactggcttgttgagttgtttttaccgtgtaaactcggtcaaaatgtttgcaattatggtatttgtggactgctggataattctcagtcaaaaagtttgtgaaaatgtattatttgtggactatttgatacttctcagtcaaaaagtttcaccaaatatggtatttgggcattattgatatccttggattgatggagaccacgtgcaagccctctatcaaacgccacgaatagaaatttgcagcttccttgccagtgttatggtcaagttctcaagtttttcatgaaactacgaaaaactcgccaatgcccttttttttttaagtttgccttgtcgagacctgcaaatctacccaagaaaggcagaaatttgcatgaaattattttgaatacgggctgctttctaagtcttcccagacctctagctttccatttcgaacgattgcaagaacaaagctgctttctaagtaaaaaaaatgaaacaaagataaaagcgggagggtacaagcagggccagggtcacctctttttgaactcttcggccctgtagtttagtcttcccagtttttgcaatggagccgtagccgcc

SEQ ID NO: 16297 - DNA, 2283 bp, Zea Mays
caatcgcttcctcccaacccgcaggttatcaaatacggtgaaccttgtgttcctgtgaaattttgcagctcattatacattgaaggcagaaagtcattctccaatctgaaggcgaaacaaggtgtgcacatatatgttctagaggataaagttcactgagctgctgttgggcattggagagcccagttgtggttctatgcctgaaaggaattctttgtaattttctcctgtatctggttctgttatcatcattattttcctggtgtggggcaatcatgtcagagagcgagttagcagtaataaaaccagaggcattgaaaacttatatctggcttcagtgctttgatggctccatacaacaagtggaggaagaagttgccatgttctgccctatgatatgtcgggaaataatgaaaaatgggacagggtcatctaagaatcatgctatagttctaccggaaagagttaatccggcaagtttgagtttgattcttgattattgtcggtttcatcaggtccctgggcgctcaaacaaggagcggaagtcattcgatgaaaagtttgtcaggatagacacagaaaaactgtgtaagttggcttctgcagcccttggtctgcagttaaggccactagttgatcttacttgtggagcacttgctcgaatcattggaggaaaaacacctgatgaagttagagatattttccatttaccagatgacttaacagaggaagagaaactggagccactaaaaaatttaaatgatgatcctacaattcgtttattgaaccgattgtatgcaaagaagcggaaagaactgcaggaacgccagaaactaaaggatgttcaaacacaagaagaacaaaaagacgagagatctttggatgagttactttgttttataaatggagatggagattccagaggtgggaaagcttctaagagtaagaaaaagaataaaagaaggaaagatcaagctaagaatcccacaaaagcgaactccgaacctgtaaataaggagggagcttcctgtgtggttccgtgcaaagcagataatggtaacatttctaggcatccttgccaaagtcaaaatttgcaagataccgagtaccccttcgacaatgctgaccttgacgatggacttgatcctgcaatgagggaggagattgatagagaagtggccgacttcgagatgaagttgaagctagcttggaccgaaagaatgagtttggagcaggaccaacaaatggagtcacatgttgatacgcggtggtaatggttctgtggtgggaatctctgttaggtttttttccgaatagaattttcttgatgaggttttcttttgctgttagagtcggcagaaaaccttaggcaggaaggagttttggtcgagaggtacaggatgacattgcgaggtgctattgtcatatgctgtgatttgtatgtaccctgctcttcaagaaagtagtgcccaaccatgttactgttaccccccaaagaaaggtgggtgactttgttagtgtaaaaaccagaagttttgaatctatgtatgttcattaattttgacaggaactcttatcattatgaaatgaataaaagggaaaatgatgtgttgttggaagttggcggaaacaataggtcgcttagctctataccgttggttcaatagtgctccagttttttctatccacgtttgggactggcttgttgagttgtttttaccgtgtaaactcggtcaaaatgtttgcaattatggtatttgtggactgctggataattctcagtcaaaaagtttgtgaaaatgtattatttgtggactatttgatacttctcagtcaaaaagtttcaccaaatatggtatttgggcattattgatatccttggattgatggagaccacgtgcaagccctctatcaaacgccacgaatagaaatttgcagcttccttgccagtgttatggtcaagttctcaagtttttcatgaaactacgaaaaactcgccaatgcccttttttttttaagtttgccttgtcgagacctgcaaatctacccaagaaaggcagaaatttgcatgaaattattttgaatacgggctgctttctaagtcttcccagacctctagctttccatttcgaacgattgcaagaacaaagctgctttctaagtaaaaaaaatgaaacaaagataaaagcgggagggtacaagcagggccagggtcacctctttttgaactcttcggccctgtagtttagtcttcccagtttttgcaatggagccgtagccgcc

SEQ ID NO: 16298 - DNA, 2404 bp, Zea Mays
atcctcgccgccgccgccgccgccgccgtttgttatcgctcggagtttctccgttcccgtctctccggccgctgcagctcattatacattgaaggcagaaagtcattctccaatctgaaggcgaaacaaggtgtgcacatatatgttctagaggataaagttcactgagctgctgttgggcattggagagcccagttgtggttctatgcctgaaaggaattctttgtaattttctcctgtatctggttctgttatcatcattattttcctggtgtggggcaatcatgtcagagagcgagttagcagtaataaaaccagaggcattgaaaacttatatctggcttcagtgctttgatggctccatacaacaagtggaggaagaagttgccatgttctgccctatgatatgtcgggaaataatgaaaaatgggacagggtcatctaagaatcatgctatagttctaccggaaagagttaatccggcaagtttgagtttgattcttgattattgtcggtttcatcaggtccctgggcgctcaaacaaggagcggaagtcattcgatgaaaagtttgtcaggatagacacagaaaaactgtgtaagttggcttctgcagcccttggtctgcagttaaggccactagttgatcttacttgtggagcacttgctcgaatcattggaggaaaaacacctgatgaagttagagatattttccatttaccagatgacttaacagaggaagagaaactggagccactaaaaaatttaaatgatgatcctacaattcgtttattgaaccgattgtatgcaaagaagcggaaagaactgcaggaacgccagaaactaaaggatgttcaaacacaagaagaacaaaaagacgagagatctttggatgagttactttgttttataaatggagatggagaggtgggaaagcttctaagagtaagaaaaagaataaaagaaggaaagatcaagctaagaatcccacaaaagcgaactccgaacctgtaaataaggagggagcttcctgtgtggttccgtgcaaagcagataatggtaacatttctaggcatccttgccaaagtcaaaatttgcaagataccgagtaccccttcgacaatgctgaccttgacgatggacttgatcctgcaatgagggaggagattgatagagaagtggccgacttcgagatgaagttgaagctagcttggaccgaaagaatgagtttggagcaggaccaacaaatggagtcacatgttgatacgcggtggtaatggttctgtggtgggaatctctgttagggctagtttggaaacactaatttcccatgggattttcattttcccaagggaaattagttcattttcccttgggaaaatgaaaatcccatgggaaattagtgttcccaaactagcccttagtttttttccgaatagaattttcttgatgaggttttcttttgctgttagagtcggcagaaaaccttaggcaggaaggagttttggtcgagaggtacaggatgacattgcgaggtgctattgtcatatgctgtgatttgtatgtaccctgctcttcaagaaagtagtgcccaaccatgttactgttaccccccaaagaaaggtgggtgactttgttagtgtaaaaaccagaagttttgaatctatgtatgttcattaattttgacaggaactcttatcattatgaaatgaataaaagggaaaatgatgtgttgttggaagttggcggaaacaataggtcgcttagctctataccgttggttcaatagtgctccagttttttctatccacgtttgggactggcttgttgagttgtttttaccgtgtaaactcggtcaaaatgtttgcaattatggtatttgtggactgctggataattctcagtcaaaaagtttgtgaaaatgtattatttgtggactatttgatacttctcagtcaaaaagtttcaccaaatatggtatttgggcattattgatatccttggattgatggagaccacgtgcaagccctctatcaaacgccacgaatagaaatttgcagcttccttgccagtgttatggtcaagttctcaagtttttcatgaaactacgaaaaactcgccaatgcccttttttttttaagtttgccttgtcgagacctgcaaatctacccaagaaaggcagaaatttgcatgaaattattttgaatacgggctgctttctaagtcttcccagacctctagctttccatttcgaacgattgcaagaacaaagctgctttctaagtaaaaaaaatgaaacaaagataaaagcgggagggtacaagcagggccagggtcacctctttttgaactcttcggccctgtagtttagtcttcccagtttttgcaatggagccgtagccgcc

SEQ ID NO: 16299 - DNA, 2344 bp, Zea Mays
atcgttctatcctcgccgccgccgccgccgccgccgtttgttatcgctcggagtttctccgttcccgtctctccggccgctgcaggttatcaaatacggtgaaccttgtgttcctgtgaaattttgcagctcattatacattgaaggcagaaagtcattctccaatctgaaggcgaaacaaggtgtgcacatatatgttctagaggataaagttcactgagctgctgttgggcattggagagcccagttgtggttctatgcctgaaaggaattctttgtaattttctcctgtatctggttctgttatcatcattattttcctggtgtggggcaatcatgtcagagagcgagttagcagtaataaaaccagaggcattgaaaacttatatctggcttcagtgctttgatggctccatacaacaagtggaggaagaagttgccatgttctgccctatgatatgtcgggaaataatgaaaaatgggacagggtcatctaagaatcatgctatagttctaccggaaagagttaatccggcaagtttgagtttgattcttgattattgtcggtttcatcaggtccctgggcgctcaaacaaggagcggaagtcattcgatgaaaagtttgtcaggatagacacagaaaaactgtgtaagttggcttctgcagcccttggtctgcagttaaggccactagttgatcttacttgtggagcacttgctcgaatcattggaggaaaaacacctgatgaagttagagatattttccatttaccagatgacttaacagaggaagagaaactggagccactaaaaaatttaaatgatgatcctacaattcgtttattgaaccgattgtatgcaaagaagcggaaagaactgcaggaacgccagaaactaaaggatgttcaaacacaagaagaacaaaaagacgagagatctttggatgagttactttgttttataaatggagatggagattccagaggtgggaaagcttctaagagtaagaaaaagaataaaagaaggaaagatcaagctaagaatcccacaaaagcgaactccgaacctgtaaataaggagggagcttcctgtgtggttccgtgcaaagcagataatggtaacatttctaggcatccttgccaaagtcaaaatttgcaagataccgagtaccccttcgacaatgctgaccttgacgatggacttgatcctgcaatgagggaggagattgatagagaagtggccgacttcgagatgaagttgaagctagcttggaccgaaagaatgagtttggagcaggaccaacaaatggagtcacatgttgatacgcggtggtaatggttctgtggtgggaatctctgttaggtttttttccgaatagaattttcttgatgaggttttcttttgctgttagagtcggcagaaaaccttaggcaggaaggagttttggtcgagaggtacaggatgacattgcgaggtgctattgtcatatgctgtgatttgtatgtaccctgctcttcaagaaagtagtgcccaaccatgttactgttaccccccaaagaaaggtgggtgactttgttagtgtaaaaaccagaagttttgaatctatgtatgttcattaattttgacaggaactcttatcattatgaaatgaataaaagggaaaatgatgtgttgttggaagttggcggaaacaataggtcgcttagctctataccgttggttcaatagtgctccagttttttctatccacgtttgggactggcttgttgagttgtttttaccgtgtaaactcggtcaaaatgtttgcaattatggtatttgtggactgctggataattctcagtcaaaaagtttgtgaaaatgtattatttgtggactatttgatacttctcagtcaaaaagtttcaccaaatatggtatttgggcattattgatatccttggattgatggagaccacgtgcaagccctctatcaaacgccacgaatagaaatttgcagcttccttgccagtgttatggtcaagttctcaagtttttcatgaaactacgaaaaactcgccaatgcccttttttttttaagtttgccttgtcgagacctgcaaatctacccaagaaaggcagaaatttgcatgaaattattttgaatacgggctgctttctaagtcttcccagacctctagctttccatttcgaacgattgcaagaacaaagctgctttctaagtaaaaaaaatgaaacaaagataaaagcgggagggtacaagcagggccagggtcacctctttttgaactcttcggccctgtagtttagtcttcccagtttttgcaatggagccgtagccgcc

SEQ ID NO: 16300 - DNA, 2273 bp, Zea Mays
tgccgaccgagcctgaaatcgttctatcctcgccgccgccgccgccgccgccgtttgttatcgctcggagtttctccgttcccgtctctccggccgctgcagggttatcaaatacggtgaaccttgtgttcctgtgaaattttgcagctcattatacattgaaggcagaaagtcattctccaatctgaaggcgaaacaaggtgtgcacatatatgttctagaggataaagttcactgagctgctgttgggcattggagagcccagttgtggttctatgcctgaaaggaattctttgtaattttctcctgtatctggttctgttatcatcattattttcctggtgtggggcaatcatgtcagagagcgagttagcagtaataaaaccagaggcattgaaaacttatatctggcttcagtgctttgatggctccatacaacaagtggaggaagaagttgccatgttctgccctatgatatgtcgggaaataatgaaaaatgggacagggtcatctaagaatcatgctatagttctaccggaaagagttaatccggcaagtttgagtttgattcttgattattgtcggtttcatcaggtccctgggcgctcaaacaaggagcggaagtcattcgatgaaaagtttgtcaggatagacacagaaaaactgtgtaagttggcttctgcagcccttggtctgcagttaaggccactagttgatcttacttgtggagcacttgctcgaatcattggaggaaaaacacctgatgaagttagagatattttccatttaccagatgacttaacagaggaagagaaactggagccactaaaaaatttaaatgatgatcctacaattcgtttattgaaccgattgtatgcaaagaagcggaaagaactgcaggaacgccagaaactaaaggatgttcaaacacaagaagaacaaaaagacgagagatctttggatgagttactttgttttataaatggagatggagattccagaggtgggaaagcttctaagagtaagaaaaagaataaaagaaggaaagatcaagctaagaatcccacaaaagcgaactccgaacctgtaaataaggagggagcttcctgtgtggttccgtgcaaagcagataatggtaacatttctaggcatccttgccaaagtcaaaatttgcaagataccgagtaccccttcgacaatgctgaccttgacgatggacttgatcctgcaatgagggaggagattgatagagaagtggccgacttcgagatgaagttgaagctagcttggaccgaaagaatgagtttggagcaggaccaacaaatggagtcacatgttgatacgcggtgaaaaccttaggcaggaaggagttttggtcgagaggtacaggatgacattgcgaggtgctattgtcatatgctgtgatttgtatgtaccctgctcttcaagaaagtagtgcccaaccatgttactgttaccccccaaagaaaggtgggtgactttgttagtgtaaaaaccagaagttttgaatctatgtatgttcattaattttgacaggaactcttatcattatgaaatgaataaaagggaaaatgatgtgttgttggaagttggcggaaacaataggtcgcttagctctataccgttggttcaatagtgctccagttttttctatccacgtttgggactggcttgttgagttgtttttaccgtgtaaactcggtcaaaatgtttgcaattatggtatttgtggactgctggataattctcagtcaaaaagtttgtgaaaatgtattatttgtggactatttgatacttctcagtcaaaaagtttcaccaaatatggtatttgggcattattgatatccttggattgatggagaccacgtgcaagccctctatcaaacgccacgaatagaaatttgcagcttccttgccagtgttatggtcaagttctcaagtttttcatgaaactacgaaaaactcgccaatgcccttttttttttaagtttgccttgtcgagacctgcaaatctacccaagaaaggcagaaatttgcatgaaattattttgaatacgggctgctttctaagtcttcccagacctctagctttccatttcgaacgattgcaagaacaaagctgctttctaagtaaaaaaaatgaaacaaagataaaagcgggagggtacaagcagggccagggtcacctctttttgaactcttcggccctgtagtttagtcttcccagtttttgcaatggagccgtagccgcc

SEQ ID NO: 16301 - DNA, 2615 bp, Zea Mays
ggaccgttggacgtgccattgccgaccgagcctgaaatcgttctatcctcgccgccgccgccgccgccgccgtttgttatcgctcggagtttctccgttcccgtctctccggccgctgcaggttatcaaatacggtgaaccttgtgttcctgtgaaattttgcagctcattatacattgaaggcagaaagtcattctccaatctgaaggcgaaacaaggtgtgcacatatatgttctagaggataaagttcactgagctgctgttgggcattggagagcccagttgtggttctatgcctgaaaggaattctttgtaattttctcctgtatctggttctgttatcatcattattttcctggtgtggggcaatcatgtcagagagcgagttagcagtaataaaaccagaggcattgaaaacttatatctggcttcagtgctttgatggctccatacaacaagtggaggaagaagttgccatgttctgccctatgatatgtcgggaaataatgaaaaatgggacagggtcatctaagaatcatgctatagttctaccggaaagagttaatccggcaagtttgagtttgattcttgattattgtcggtttcatcaggtccctgggcgctcaaacaaggagcggaagtcattcgatgaaaagtttgtcaggatagacacagaaaaactgtgtaagttggcttctgcagcccttggtctgcagttaaggccactagttgatcttacttgtggagcacttgctcgaatcattggaggaaaaacacctgatgaagttagagatattttccatttaccagatgacttaacagaggaagagaaactggagccactaaaaaatttaaatgatgatcctacaattcgtttattgaaccgattgtatgcaaagaagcggaaagaactgcaggaacgccagaaactaaaggatgttcaaacacaagaagaacaaaaagacgagagatctttggatgagttactttgttttataaatggagatggagaggtgggaaagcttctaagagtaagaaaaagaataaaagaaggaaagatcaagctaagaatcccacaaaagcgaactccgaacctgtaaataaggagggagcttcctgtgtggttccgtgcaaagcagataatggtaacatttctaggcatccttgccaaagtcaaaatttgcaagataccgagtaccccttcgacaatgctgaccttgacgatggacttgatcctgcaatgagggaggagattgataggtgagggcataagatatcttatgggttgatgcacgcagctctttgttgtgctactggcctgtttctcaatcgaaaaagcctgtttttgtacatgaaacagcaaggttattgatgcttatatactgtcattttgataagtataagctgatttctggactttgaatcgataaattctgttaaatgcttccactcatctttttctgcagttctgcttgaactttgtggttggtgcttgtgcctgtcgcttgatccacccatttactgttgacatgcatgaaacactgccgtgttttgatataacaagcgattgttcttgacaattgacatacagagaagtggccgacttcgagatgaagttgaagctagcttggaccgaaagaatgagtttggagcaggaccaacaaatggagtcacatgttgatacgcggtgaaaaccttaggcaggaaggagttttggtcgagaggtacaggatgacattgcgaggtgctattgtcatatgctgtgatttgtatgtaccctgctcttcaagaaagtagtgcccaaccatgttactgttaccccccaaagaaaggtgggtgactttgttagtgtaaaaaccagaagttttgaatctatgtatgttcattaattttgacaggaactcttatcattatgaaatgaataaaagggaaaatgatgtgttgttggaagttggcggaaacaataggtcgcttagctctataccgttggttcaatagtgctccagttttttctatccacgtttgggactggcttgttgagttgtttttaccgtgtaaactcggtcaaaatgtttgcaattatggtatttgtggactgctggataattctcagtcaaaaagtttgtgaaaatgtattatttgtggactatttgatacttctcagtcaaaaagtttcaccaaatatggtatttgggcattattgatatccttggattgatggagaccacgtgcaagccctctatcaaacgccacgaatagaaatttgcagcttccttgccagtgttatggtcaagttctcaagtttttcatgaaactacgaaaaactcgccaatgcccttttttttttaagtttgccttgtcgagacctgcaaatctacccaagaaaggcagaaatttgcatgaaattattttgaatacgggctgctttctaagtcttcccagacctctagctttccatttcgaacgattgcaagaacaaagctgctttctaagtaaaaaaaatgaaacaaagataaaagcgggagggtacaagcagggccagggtcacctctttttgaactcttcggccctgtagtttagtcttcccagtttttgcaatggagccgtagccgcc

SEQ ID NO: 16302 - DNA, 2267 bp, Zea Mays
cgcgccgttacgattgggttggaccgttggacgtgccattgccgaccgagcctgaaatcgttctatcctcgccgccgccgccgccgccgccgtttgttatcgctcggagtttctccgttcccgtctctccggccgctgcagctcattatacattgaaggcagaaagtcattctccaatctgaaggcgaaacaaggtgtgcacatatatgttctagaggataaagttcactgagctgctgttgggcattggagagcccagttgtggttctatgcctgaaaggaattctttgtaattttctcctgtatctggttctgttatcatcattattttcctggtgtggggcaatcatgtcagagagcgagttagcagtaataaaaccagaggcattgaaaacttatatctggcttcagtgctttgatggctccatacaacaagtggaggaagaagttgccatgttctgccctatgatatgtcgggaaataatgaaaaatgggacagggtcatctaagaatcatgctatagttctaccggaaagagttaatccggcaagtttgagtttgattcttgattattgtcggtttcatcaggtccctgggcgctcaaacaaggagcggaagtcattcgatgaaaagtttgtcaggatagacacagaaaaactgtgtaagttggcttctgcagcccttggtctgcagttaaggccactagttgatcttacttgtggagcacttgctcgaatcattggaggaaaaacacctgatgaagttagagatattttccatttaccagatgacttaacagaggaagagaaactggagccactaaaaaatttaaatgatgatcctacaattcgtttattgaaccgattgtatgcaaagaagcggaaagaactgcaggaacgccagaaactaaaggatgttcaaacacaagaagaacaaaaagacgagagatctttggatgagttactttgttttataaatggagatggagattccagaggtgggaaagcttctaagagtaagaaaaagaataaaagaaggaaagatcaagctaagaatcccacaaaagcgaactccgaacctgtaaataaggagggagcttcctgtgtggttccgtgcaaagcagataatggtaacatttctaggcatccttgccaaagtcaaaatttgcaagataccgagtaccccttcgacaatgctgaccttgacgatggacttgatcctgcaatgagggaggagattgatagagaagtggccgacttcgagatgaagttgaagctagcttggaccgaaagaatgagtttggagcaggaccaacaaatggagtcacatgttgatacgcggtgaaaaccttaggcaggaaggagttttggtcgagaggtacaggatgacattgcgaggtgctattgtcatatgctgtgatttgtatgtaccctgctcttcaagaaagtagtgcccaaccatgttactgttaccccccaaagaaaggtgggtgactttgttagtgtaaaaaccagaagttttgaatctatgtatgttcattaattttgacaggaactcttatcattatgaaatgaataaaagggaaaatgatgtgttgttggaagttggcggaaacaataggtcgcttagctctataccgttggttcaatagtgctccagttttttctatccacgtttgggactggcttgttgagttgtttttaccgtgtaaactcggtcaaaatgtttgcaattatggtatttgtggactgctggataattctcagtcaaaaagtttgtgaaaatgtattatttgtggactatttgatacttctcagtcaaaaagtttcaccaaatatggtatttgggcattattgatatccttggattgatggagaccacgtgcaagccctctatcaaacgccacgaatagaaatttgcagcttccttgccagtgttatggtcaagttctcaagtttttcatgaaactacgaaaaactcgccaatgcccttttttttttaagtttgccttgtcgagacctgcaaatctacccaagaaaggcagaaatttgcatgaaattattttgaatacgggctgctttctaagtcttcccagacctctagctttccatttcgaacgattgcaagaacaaagctgctttctaagtaaaaaaaatgaaacaaagataaaagcgggagggtacaagcagggccagggtcacctctttttgaactcttcggccctgtagtttagtcttcccagtttttgcaatggagccgtagccgcc

SEQ ID NO: 16303 - DNA, 2356 bp, Zea Mays
gcttgatgcaggcccactggcacaggcccatggccccgcgccgttacgattgggttggaccgttggacgtgccattgccgaccgagcctgaaatcgttctatcctcgccgccgccgccgccgccgccgtttgttatcgctcggagtttctccgttcccgtctctccggccgctgcaggttatcaaatacggtgaaccttgtgttcctgtgaaattttgcagctcattatacattgaaggcagaaagtcattctccaatctgaaggcgaaacaaggtgtgcacatatatgttctagaggataaagttcactgagctgctgttgggcattggagagcccagttgtggttctatgcctgaaaggaattctttgtaattttctcctgtatctggttctgttatcatcattattttcctggtgtggggcaatcatgtcagagagcgagttagcagtaataaaaccagaggcattgaaaacttatatctggcttcagtgctttgatggctccatacaacaagtggaggaagaagttgccatgttctgccctatgatatgtcgggaaataatgaaaaatgggacagggtcatctaagaatcatgctatagttctaccggaaagagttaatccggcaagtttgagtttgattcttgattattgtcggtttcatcaggtccctgggcgctcaaacaaggagcggaagtcattcgatgaaaagtttgtcaggatagacacagaaaaactgtgtaagttggcttctgcagcccttggtctgcagttaaggccactagttgatcttacttgtggagcacttgctcgaatcattggaggaaaaacacctgatgaagttagagatattttccatttaccagatgacttaacagaggaagagaaactggagccactaaaaaatttaaatgatgatcctacaattcgtttattgaaccgattgtatgcaaagaagcggaaagaactgcaggaacgccagaaactaaaggatgttcaaacacaagaagaacaaaaagacgagagatctttggatgagttactttgttttataaatggagatggagattccagaggtgggaaagcttctaagagtaagaaaaagaataaaagaaggaaagatcaagctaagaatcccacaaaagcgaactccgaacctgtaaataaggagggagcttcctgtgtggttccgtgcaaagcagataatggtaacatttctaggcatccttgccaaagtcaaaatttgcaagataccgagtaccccttcgacaatgctgaccttgacgatggacttgatcctgcaatgagggaggagattgatagagaagtggccgacttcgagatgaagttgaagctagcttggaccgaaagaatgagtttggagcaggaccaacaaatggagtcacatgttgatacgcggtgagtcggcagaaaaccttaggcaggaaggagttttggtcgagaggtacaggatgacattgcgaggtgctattgtcatatgctgtgatttgtatgtaccctgctcttcaagaaagtagtgcccaaccatgttactgttaccccccaaagaaaggtgggtgactttgttagtgtaaaaaccagaagttttgaatctatgtatgttcattaattttgacaggaactcttatcattatgaaatgaataaaagggaaaatgatgtgttgttggaagttggcggaaacaataggtcgcttagctctataccgttggttcaatagtgctccagttttttctatccacgtttgggactggcttgttgagttgtttttaccgtgtaaactcggtcaaaatgtttgcaattatggtatttgtggactgctggataattctcagtcaaaaagtttgtgaaaatgtattatttgtggactatttgatacttctcagtcaaaaagtttcaccaaatatggtatttgggcattattgatatccttggattgatggagaccacgtgcaagccctctatcaaacgccacgaatagaaatttgcagcttccttgccagtgttatggtcaagttctcaagtttttcatgaaactacgaaaaactcgccaatgcccttttttttttaagtttgccttgtcgagacctgcaaatctacccaagaaaggcagaaatttgcatgaaattattttgaatacgggctgctttctaagtcttcccagacctctagctttccatttcgaacgattgcaagaacaaagctgctttctaagtaaaaaaaatgaaacaaagataaaagcgggagggtacaagcagggccagggtcacctctttttgaactcttcggccctgtagtttagtcttcccagtttttgcaatggagccgtagccgcc

SEQ ID NO: 16304 - DNA, 2357 bp, Zea Mays
gttggcggcagcttgatgcaggcccactggcacaggcccatggccccgcgccgttacgattgggttggaccgttggacgtgccattgccgaccgagcctgaaatcgttctatcctcgccgccgccgccgccgccgccgtttgttatcgctcggagtttctccgttcccgtctctccggccgctgcaggttatcaaatacggtgaaccttgtgttcctgtgaaattttgcagctcattatacattgaaggcagaaagtcattctccaatctgaaggcgaaacaaggtgtgcacatatatgttctagaggataaagttcactgagctgctgttgggcattggagagcccagttgtggttctatgcctgaaaggaattctttgtaattttctcctgtatctggttctgttatcatcattattttcctggtgtggggcaatcatgtcagagagcgagttagcagtaataaaaccagaggcattgaaaacttatatctggcttcagtgctttgatggctccatacaacaagtggaggaagaagttgccatgttctgccctatgatatgtcgggaaataatgaaaaatgggacagggtcatctaagaatcatgctatagttctaccggaaagagttaatccggcaagtttgagtttgattcttgattattgtcggtttcatcaggtccctgggcgctcaaacaaggagcggaagtcattcgatgaaaagtttgtcaggatagacacagaaaaactgtgtaagttggcttctgcagcccttggtctgcagttaaggccactagttgatcttacttgtggagcacttgctcgaatcattggaggaaaaacacctgatgaagttagagatattttccatttaccagatgacttaacagaggaagagaaactggagccactaaaaaatttaaatgatgatcctacaattcgtttattgaaccgattgtatgcaaagaagcggaaagaactgcaggaacgccagaaactaaaggatgttcaaacacaagaagaacaaaaagacgagagatctttggatgagttactttgttttataaatggagatggagattccagaggtgggaaagcttctaagagtaagaaaaagaataaaagaaggaaagatcaagctaagaatcccacaaaagcgaactccgaacctgtaaataaggagggagcttcctgtgtggttccgtgcaaagcagataatggtaacatttctaggcatccttgccaaagtcaaaatttgcaagataccgagtaccccttcgacaatgctgaccttgacgatggacttgatcctgcaatgagggaggagattgatagagaagtggccgacttcgagatgaagttgaagctagcttggaccgaaagaatgagtttggagcaggaccaacaaatggagtcacatgttgatacgcggtgaaaaccttaggcaggaaggagttttggtcgagaggtacaggatgacattgcgaggtgctattgtcatatgctgtgatttgtatgtaccctgctcttcaagaaagtagtgcccaaccatgttactgttaccccccaaagaaaggtgggtgactttgttagtgtaaaaaccagaagttttgaatctatgtatgttcattaattttgacaggaactcttatcattatgaaatgaataaaagggaaaatgatgtgttgttggaagttggcggaaacaataggtcgcttagctctataccgttggttcaatagtgctccagttttttctatccacgtttgggactggcttgttgagttgtttttaccgtgtaaactcggtcaaaatgtttgcaattatggtatttgtggactgctggataattctcagtcaaaaagtttgtgaaaatgtattatttgtggactatttgatacttctcagtcaaaaagtttcaccaaatatggtatttgggcattattgatatccttggattgatggagaccacgtgcaagccctctatcaaacgccacgaatagaaatttgcagcttccttgccagtgttatggtcaagttctcaagtttttcatgaaactacgaaaaactcgccaatgcccttttttttttaagtttgccttgtcgagacctgcaaatctacccaagaaaggcagaaatttgcatgaaattattttgaatacgggctgctttctaagtcttcccagacctctagctttccatttcgaacgattgcaagaacaaagctgctttctaagtaaaaaaaatgaaacaaagataaaagcgggagggtacaagcagggccagggtcacctctttttgaactcttcggccctgtagtttagtcttcccagtttttgcaatggagccgtagccgcc

SEQ ID NO: 16305 - DNA, 1638 bp, Zea Mays
atatacacgcggcagtggcacacacacagccagctgcacaaacatacgttcttggatctcagctcgcgcgcgccatggttgtggaggccaactcagggagcacgctggcggccgtcggcgtggccggcaccggcagcagcatggccgtgcacggccaccagctttcgaccgtggtgccgagctcggtgaccggggaggaggtgaactacgagctcgcggacgccgacttgctccacaagctgcattacgtacgcgcggtgcacgtgttccgcgcgccgaccggcgtcgcagcgcctccgctcaccatccgggagctgaaagagcccatgttcccgtggctggacatgtacttccccgtcagcggccggctccggcggcgtcaagcggccgagggcgaagaggccgccgcggcggcggtggggcggccctacgtgcggtgcaacgactgcggcgtgcgcatcgtggaggtcacctgcggcgccaccgtggagcagtggctggaggcggaggcggagcgcggcgggctgtgcaaggcgctggcctacgacaaggtcaccagcttcaagtgtggggggatggccctcggcttcacgtgggcgcacctcatcggcgacatcccctccgccgttgccagcttcagaaagtgggcgcaggtcctcggcggcaacaaggccccggcgccaaccctgcgagacccactcgccgtgccgccgtcggccccacctaccagcgtgacggtcccgccgtcggtcaaggccaccgcggcccccgtcggcgatcactgggtggtcccgaccacccatgacatggtgtccttctccttccacgtcaccgagcagcagctgcagggactccagctcagcgcgaccaagggtcatcatcggcgcgaggttgtgggcccgtttgaactggtctccgcgctgatgtggcgggcgctggccgcgatccgaggccccgaggaggaggaggcgacgcgcatggtgaccgtcgtgaagactggaccggcgccgacgtcggggggcggcccccgaccggcgctgaccaacgagcaccgcatcggccacgtcgtcttcgcgaccggcggctcctcgccagcgacggccgacgtggccaagctggcagcgctgctggccggcgcacacctggaggaggccagcgcggtcgcggccgccgcgttcgcgggagcggacgacgccgacgtggtcgtgtacggcgccaacctgacgttcgtggaagccgagggcctggaggtgtacgagctggagctcgcggggcggcgcccggcgcacgtggagtacgccgtggatggcgtcggcgacggcggcgcggccgtcgtgcaccgcgacgccggcgggcggggccggaccgtcgcggccgtcctgcgccggggcgaggcgggccgcctccgtgccgcgatccgtgacgcgctgcgggttgcttgatgatcttgcgggcagtagtcttgtggttttcagtacttgtcaggttgaataaattagaggatgttgtaggatgtactcttgtggcgcatatgctcgcctgtatgtggaccgatcctgcccttccatgccagtgcgtgtgtttaattttgaacttcctagttgttgaagcttcgacttctatctatataatgcacaa

SEQ ID NO: 16306 - DNA, 1282 bp, Zea Mays
cttttctctgcgccggcaccgccgtctcgtctggtctgctcttccattccgttcgcctttgaaaactacccacaccacaaagaaatcgaagaggggaacagaggagagagaagggagatggcggaggcgacggcgtacgaggagcagcgccggaggcaggtggaggcgaacaagcggaagctggaggagcttcagctccactacctctccgccgccgtcagagaggccgcagccgccgccaagccctcgccggtcaagaagcggaaggcgcgggtgccgcttgacgccgccgactccgtgatggagccactacggcggtccggccggctcgccaacctccccgataagtccgtgcaccgcgaggaggttccaactttttggagaaagattaggaggacgtatggatcagtgagaaaagatctggaaaaccgggtgtacgcgaccgacgaggcgaggagctacgccatctgtaaggcggaggaagtggagcaagagctggactccagcttccccgtcttcatcaaacccatgacccagtcccatgtcaccggaggcttctggctgggcctcccaaatcatttctgccggaagtacctgcccaagcgtgacgagacgatcaccctgctggatgaggatgacaacgagtcctacacgctatacctcgcattgaagcgaggcctcagcgctggatggagagggttcgctatccagcacaagctggttgatggagattgcttggtcttccagctgactgagagaacaaagttcaagaaagaattaaaacttgtttcaagcacggcctttttgcaggacgagattcacatgtgtacaaaggtaatcataattagagcaagttcttactatgaaagtgaggactgatgaaactaatagcttgtaatgtggtgtttggagcacagtttatggaggtgggctgcattggacaagcttgcatctggaaattgctgggtgtcttgaaccttttgggttacagagttatctcatgtacaaaatgtttacacagcccagtagctaccaattgctgatttgtgtacttcttgggcttaccacttgcacggttcagaaacctgcactatgtaagaggatgttgatggcaattgacctcattttgtaaatgatcctcgtttatcttggattcatttttagtgttcagtttggcagttgaccaccattgttggctttgtgtggtgttaatctacaaaaatgcgatcttgtgaattgcaccgggctagttatttgtgaggtgagagggccagggcatggc

SEQ ID NO: 16307 - DNA, 1178 bp, Zea Mays
tagaccgggtccacagatagaagaatccctctccccatattccttttctctgcgccggcaccgccgtctcgtctggtctgctcttccattccgttcgcctttgaaaactacccacaccacaaagaaatcgaagaggggaacagaggagagagaagggagatggcggaggcgacggcgtacgaggagcagcgccggaggcaggtggaggcgaacaagcggaagctggaggagcttcagctccactacctctccgccgccgtcagagaggccgcagccgccgccaagccctcgccggtcaagaagcggaaggcgcgggtgccgcttgacgccgccgactccgtgatggagccactacggcggtccggccggctcgccaacctccccgataagtccgtgcaccgcgaggaggttccaactttttggagaaagattaggaggacgtatggatcagtgagaaaagatctggaaaaccgggtgtacgcgaccgacgaggcgaggagctacgccatctgtaaggcggaggaagtggagcaagagctggactccagcttccccgtcttcatcaaacccatgacccagtcccatgtcaccggaggcttctggctgggcctcccaaatcatttctgccggaagtacctgcccaagcgtgacgagacgatcaccctgctggatgaggatgacaacgagtcctacacgctatacctcgcattgaagcgaggcctcagcgctggatggagagggttcgctatccagcacaagctggttgatggagattgcttggtcttccagctgactgagagaacaaagttcaagtttatggaggtgggctgcattggacaagcttgcatctggaaattgctgggtgtcttgaaccttttgggttacagagttatctcatgtacaaaatgtttacacagcccagtagctaccaattgctgatttgtgtacttcttgggcttaccacttgcacggttcagaaacctgcactatgtaagaggatgttgatggcaattgacctcattttgtaaatgatcctcgtttatcttggattcatttttagtgttcagtttggcagttgaccaccattgttggctttgtgtggtgttaatctacaaaaatgcgatcttgtgaattgcaccgggctagttatttgtgaggtgagagggccagggcatggc

SEQ ID NO: 16308 - DNA, 1326 bp, Zea Mays
catagaccgggtccacagatagaagaatccctctccccatattccttttctctgcgccggcaccgccgtctcgtctggtctgctcttccattccgttcgcctttgaaaactacccacaccacaaagaaatcgaagaggggaacagaggagagagaagggagatggcggaggcgacggcgtacgaggagcagcgccggaggcaggtggaggcgaacaagcggaagctggaggagcttcagctccactacctctccgccgccgtcagagaggccgcagccgccgccaagccctcgccggtcaagaagcggaaggcgcgggtgccgcttgacgccgccgactccgtgatggagccactacggcggtccggccggctcgccaacctccccgataagtccgtgcaccgcgaggaggttccaactttttggagaaagattaggaggacgtatggatcagtgagaaaagatctggaaaaccgggtgtacgcgaccgacgaggcgaggagctacgccatctgtaaggcggaggaagtggagcaagagctggactccagcttccccgtcttcatcaaacccatgacccagtcccatgtcaccggaggcttctggctgggcctcccaaatcatttctgccggaagtacctgcccaagcgtgacgagacgatcaccctgctggatgaggatgacaacgagtcctacacgctatacctcgcattgaagcgaggcctcagcgctggatggagagggttcgctatccagcacaagctggttgatggagattgcttggtcttccagctgactgagagaacaaagttcaaggtaatcataattagagcaagttcttactatgaaagtgaggactgatgaaactaatagcttgtaatgtggtgtttggagcacagcttttgatcaacaaacttcaacgcttaccacttgcattaaaactatctgtacttccattattctttatggaggtgggctgcattggacaagcttgcatctggaaattgctgggtgtcttgaaccttttgggttacagagttatctcatgtacaaaatgtttacacagcccagtagctaccaattgctgatttgtgtacttcttgggcttaccacttgcacggttcagaaacctgcactatgtaagaggatgttgatggcaattgacctcattttgtaaatgatcctcgtttatcttggattcatttttagtgttcagtttggcagttgaccaccattgttggctttgtgtggtgttaatctacaaaaatgcgatcttgtgaattgcaccgggctagttatttgtgaggtgagagggccagggcatggc

SEQ ID NO: 16309 - DNA, 784 bp, Zea Mays
gccgtctcgtctggtctgctcttccattccgttcgcctttgaaaactacccacaccacaaagaaatcgaagaggggaacagaggagagagaagggagatggcggaggcgacggcgtacgaggagcagcgccggaggcaggtggaggcgaacaagcggaagctggaggagcttcagctccactacctctccgccgccgtcagagaggccgcagccgccgccaagccctcgccggtcaagaagcggaaggcgcgggtgccgcttgacgccgccgactccgtgatggagccactacggcggtccggccggctcgccaacctccccgataagtccgtgcaccgcgaggaggttccaactttttggagaaagattaggaggacgtatggatcagtgagaaaagatctggaaaaccgggtgtacgcgaccgacgaggcgaggagctacgccatctgtaaggcggaggaagtggagcaagagctggactccagcttccccgtcttcatcaaacccatgacccagtcccatgtcaccggaggcttctggctgggcctcccaaatcatttctgccggaagtacctgcccaagcgtgacgagacgatcaccctgctggatgaggatgacaacgagtcctacacgctatacctcgcattgaagcgaggcctcagcgctggatggagagggttcgctatccagcacaagctggttgatggagattgcttggtcttccagctgactgagagaacaaagttcaagttgtgctgtgcagtcccccccgtgccggctctc

SEQ ID NO: 16310 - DNA, 679 bp, Zea Mays
atcaatagcatgtggatcaaagttttctcatctcctttccatgacgtgtggggaccacctgtaggaggtttcctcttcaccacaacatagcagaaatcatatcgcacagccgcccctactgtacgctggaaagcagaccgccgccgttcacgccacgggcccgcgccgcaccacctactactgcgcacccagcagcgatatgccttctctcctcttctcctcctttatagctcggattactggcccattagagccagccgtttcctccatcaatggtgttcaaatcctccgtttctcatcttcaatccctattaatttggccacgaatcttcctctcctaccgcctataaaatctgagccgagcttgttctcctctcccctgctggctccggttgttctcatgctccaaatatttgctcccttgcgctgagttcgttacttcattgtcgcgaagtcatctgtgtgcgtcgtctgcgctccagcagcctgccagccagactcgtcgccggagttcgccgttcatcgccggagctacgccacccgtcatccgaagccgagccctgctcttctccacccggccgaaaccccgtcgagccatccctgtcacacgtgcgaacccaagaagccgactgtgtggtagagaatccgaactcgttcggggacgacccgcaagacgctg

SEQ ID NO: 16311 - DNA, 1877 bp, Zea Mays
ataaaaaaatggcgaaatgaaattcacggtaccagggtcaaccgagcacggacgcgtaaagccaacaaggggggaccgggggagcacgaggaaaccgaggagactgacccaacccgtgcttgcggcggcgctgcgctggtgccggccacggccatgatcggcggcgggcgggcagcggatagccacccggcgtcctgctcgtcctcgtcctcgtcttcctcctcgccgtcaggcccgtcgacggggggctcccgccttcaccgcagcaagaggcgtcccgacatcctcaacatgctcatgagtgcagcatgtctcagttcatcatcttctgatactggaaaaggacaaagcaagttttcaagcaacaaagtaacacacggatttcacttagtggaaggaagatctggccatgatatggaagactaccatgtagcagagtatagatatgaaaatgatcacgaacttggtctttttgctatttatgatggacatctgggagatagtgtggccagttatttgaaagctaatctttttgacaacatactgaaagagcctctcttttggtcagaccctcaagaagcaattaaaaacgcatacagctctacaaacaaatatattctggaaaacactaggcaactaggaccaggggggtcaacagcagtcactgctattgtagttgatggtacagatatgtggattgcaaatataggtgattcaagagctgttttgtctgaaactggtactgccagccaggttactgttgatcacgaacctcataccactaatgaacgaaagaggatagaagaaaaaggtggttttgtctctacgttccccggtgacgttcctcgtgtaaacggccaacttgcggttgcaagagcatttggtgatcagagcctcaaggcacacttgagctcagagcctgatgttaagcatataaagataaattcaagcacagagtttgtcatacttgccagtgacgggttatggaaggtaatgaagaaccaggaagccgttgatctggtgaagtcaaccaaggacccgcaaacagcggcgaagcgactgacgtccgaggccctgggaaggatgagcaaggacgatatctcatgcattgtcatccgttttcgatgctgactcttgggtaatccagctcatccattgccctaagctgcctgtgtgcatcagcagaactgtttcctccgtatcgtagctggtagcgtctggatctgtttgcagctcaggatcagattggtgattggactggacaggttattgaccaaagaatagaagaatgctgggtttgggtgttttcagcgtctgcaggctgttctttttttcttcttctgtgcatatatacacgttggaatcaaatatataccgtcggactggagccaagaaaaaccatatatataccgccccaagatgcaaagatgatacagattatgtaagcttgtagacatgtagtagttggattatggcttttagtgactcgtgtgtgtggtgtgaattcctgtgtgtattgaagataaagttccgttgccattcacgtacggaaccagcgatatgctatgaacgggatcaacttcaaataacattcgtctctcctttataaaacaagaactctatcagaaattgcatactgccgtcgcgtatccagtggcaacagaaagctggatagcagggttgaaggttgaaagttttctttttttgtttgataagtgctagcacgagactgattcttacaaacaaagtgacatgtttgaggaacagcagactggcgagcctgtttggctagtctatctgctatcttgttgcgttgcactggaatcttgtaaaaagcaacattctgatttgatgtatctgagcaacattatggtacc

SEQ ID NO: 16312 - DNA, 1868 bp, Zea Mays
ataaaaaaatggcgaaatgaaattcacggtaccagggtcaaccgagcacggacgcgtaaagccaacaaggggggaccgggggagcacgaggaaaccgaggagactgacccaacccgtgcttgcggcggcgctgcgctggtgccggccacggccatgatcggcggcgggcgggcagcggatagccacccggcgtcctgctcgtcctcgtcctcgtcttcctcctcgccgtcaggcccgtcgacggggggctcccgccttcaccgcagcaagaggcgtcccgacatcctcaacatgctcatgagtgcagcatgtctcagttcatcatcttctgatactggaaaaggacaaagcaagttttcaagcaacaaagtaacacacggatttcacttagtggaaggaagatctggccatgatatggaagactaccatgtagcagagtatagatatgaaaatgatcacgaacttggtctttttgctatttatgatggacatctgggagatagtgtggccagttatttgaaagctaatctttttgacaacatactgaaagagcctctcttttggtcagaccctcaagaagcaattaaaaacgcatacagctctacaaacaaatatattctggaaaacactaggcaactaggaccaggggggtcaacagcagtcactgctattgtagttgatggtacagatatgtggattgcaaatataggtgattcaagagctgttttgtctgaaactggtactgccagccaggttactgttgatcacgaacctcataccactaatgaacgaaagaggatagaagaaaaaggtggttttgtctctacgttccccggtgacgttcctcgtgtaaacggccaacttgcggttgcaagagcatttggtgatcagagcctcaaggcacacttgagctcagagcctgatgttaagcatataaagataaattcaagcacagagtttgtcatacttgccagtgacgggttatggaagaaccaggaagccgttgatctggtgaagtcaaccaaggacccgcaaacagcggcgaagcgactgacgtccgaggccctgggaaggatgagcaaggacgatatctcatgcattgtcatccgttttcgatgctgactcttgggtaatccagctcatccattgccctaagctgcctgtgtgcatcagcagaactgtttcctccgtatcgtagctggtagcgtctggatctgtttgcagctcaggatcagattggtgattggactggacaggttattgaccaaagaatagaagaatgctgggtttgggtgttttcagcgtctgcaggctgttctttttttcttcttctgtgcatatatacacgttggaatcaaatatataccgtcggactggagccaagaaaaaccatatatataccgccccaagatgcaaagatgatacagattatgtaagcttgtagacatgtagtagttggattatggcttttagtgactcgtgtgtgtggtgtgaattcctgtgtgtattgaagataaagttccgttgccattcacgtacggaaccagcgatatgctatgaacgggatcaacttcaaataacattcgtctctcctttataaaacaagaactctatcagaaattgcatactgccgtcgcgtatccagtggcaacagaaagctggatagcagggttgaaggttgaaagttttctttttttgtttgataagtgctagcacgagactgattcttacaaacaaagtgacatgtttgaggaacagcagactggcgagcctgtttggctagtctatctgctatcttgttgcgttgcactggaatcttgtaaaaagcaacattctgatttgatgtatctgagcaacattatggtacc

SEQ ID NO: 16313 - DNA, 815 bp, Zea Mays
gcttcgagcaagtacaggaaggtctcatctgttgacaaaattagtaaaggctggcaagaagagtacgactcttcatccaagcagtgtatgcacgggccaaaatgcaaactcggaagcaattgcacagtgggtagaaggttgcaggagattaatatattgggtggtctaatacttcctgtatggggtgcagtagcaaaggcactggctaagcaggcacggcagattcacaggagaatacgtgtggtccgcttggagaccacgactgagaacaaacggtttgttgggcttatcattccaaattctgcagtggagtctgtactcgaaggtttgcaatgggtccaagatattgacgaatgatttggcaagaagctactcctttggcagtccttcctttgctttggaccaaatctttgtcgctgaggcaacttgtgcatttcgcttgtgaaacggttgtggttgtacgcagtcaggaaaagtatacgacaacggctgggccacttttgtgttatatatatgaaagttacgtaaacgtttatatcagaccggggtgctgttgtaagttagcctgttgttggaggctacatgcctaaatgctgcacgatgtagtggtgtggagatgtggtggctgtggctcttatgggcctgtgttgtttccctgacaagggtggctcatatggctggcctgagaccgattgggttggggtttgttttctataaacaaaacgaggttgaggattggtcattgtttggtaggctgtacaaacgaatctggttaccgtgcatcagctcatgggtagagttacccgtttcttctt

SEQ ID NO: 16314 - DNA, 1042 bp, Zea Mays
tgataagcacattgttctctatgttttcaattgcaaatgttcagttagcaaattcaatacttgaagaaaggctgaaagataaagcaggttcttctagtgatggattctatgagtccagaaaagaatgggcggggagaagacactttctgctagctttcgaaggttcagctgaaggattgtacatagtaattcggccagctgttggggaggcttcgagggaaatgtctttggttgagcttaaaagcaagtacaggaaggtctcatctgttgacaaaattagtaaaggctggcaagaagagtacgactcttcatccaagcagtgtatgcacgggccaaaatgcaaactcggaagcaattgcacagtgggtagaaggttgcaggagattaatatattgggtggtctaatacttcctgtatggggtgcagtagcaaaggcactggctaagcagattcacaggagaatacgtgtggtccgcttggagaccacgactgagaacaaacggtttgttgggcttatcattccaaattctgcagtggagtctgtactcgaaggtttgcaatgggtccaagatattgacgaatgatttggcaagaagctactcctttggcagtccttcctttgctttggaccaaatctttgtcgctgaggcaacttgtgcatttcgcttgtgaaacggttgtggttgtacgcagtcaggaaaagtatacgacaacggctgggccacttttgtgttatatatatgaaagttacgtaaacgtttatatcagaccggggtgctgttgtaagttagcctgttgttggaggctacatgcctaaatgctgcacgatgtagtggtgtggagatgtggtggctgtggctcttatgggcctgtgttgtttccctgacaagggtggctcatatggctggcctgagaccgattgggttggggtttgttttctataaacaaaacgaggttgaggattggtcattgtttggtaggctgtacaaacgaatctggttaccgtgcatcagctcatgggtagagttacccgtttcttctt

SEQ ID NO: 16315 - DNA, 1034 bp, Zea Mays
atatccgcttgcatcaagctttcagagttagcaaattcaatacttgaagaaaggctgaaagataaagcaggttcttctagtgatggattctatgagtccagaaaagaatgggcggggagaagacactttctgctagctttcgaaggttcagctgaaggattgtacatagtaattcggccagctgttggggaggcttcgagggaaatgtctttggttgagcttaaaagcaagtacaggaaggtctcatctgttgacaaaattagtaaaggctggcaagaagagtacgactcttcatccaagcagtgtatgcacgggccaaaatgcaaactcggaagcaattgcacagtgggtagaaggttgcaggagattaatatattgggtggtctaatacttcctgtatggggtgcagtagcaaaggcactggctaagcaggcacggcagattcacaggagaatacgtgtggtccgcttggagaccacgactgagaacaaacggtttgttgggcttatcattccaaattctgcagtggagtctgtactcgaaggtttgcaatgggtccaagatattgacgaatgatttggcaagaagctactcctttggcagtccttcctttgctttggaccaaatctttgtcgctgaggcaacttgtgcatttcgcttgtgaaacggttgtggttgtacgcagtcaggaaaagtatacgacaacggctgggccacttttgtgttatatatatgaaagttacgtaaacgtttatatcagaccggggtgctgttgtaagttagcctgttgttggaggctacatgcctaaatgctgcacgatgtagtggtgtggagatgtggtggctgtggctcttatgggcctgtgttgtttccctgacaagggtggctcatatggctggcctgagaccgattgggttggggtttgttttctataaacaaaacgaggttgaggattggtcattgtttggtaggctgtacaaacgaatctggttaccgtgcatcagctcatgggtagagttacccgtttcttctt

SEQ ID NO: 16316 - DNA, 3590 bp, Zea Mays
  misc_feature (1)..(2): n is a, c, g, or t
nnatccccaacttgggaggaaaggagttgagaaaaaacaaagacgaatccgcgcctgacacaaacaagagggacctctagaaaggagagagttaagccatccctccatgaccaaaaatcacccacccactcactaaaacctggagcttagcagctccagccaaacaccacaatctaacttcttctctgctgaagttttgggctaccgaaagggaaggagaggcaccctcaaaaacataaatatttctcttattccaaagggtccaagcaccaaaaataacgaaagaatgaaaaccttcccttctatctttcttcactcgccggcttgatttcctccaccattccgcgaaacagacctcgttctgtctaggagaaataccacccaaccccagtggggcaacaaatggtgccaaaattgccttgtaaaaacgcaggtcgtgagaatgtttttttctctcgaacgcgcaggagagctgcgcatcattatattaagataggaaaaaaatgtccaaaatggaccagagtacaaaacccatagggtgaaaacaactggaccaaggcaatactaaactagcacccctgcctcctctacagcaacacaagagaagaaacggaagcatgggtgcaggcaggcctgactagactagactgcagcactagtgttagccaagaccctatttaaagcagctgcgagtccaagattttcaagatatttagcaccagccttctcccaacagatcaactcatcaaaaaacagtcttttaactcgaacacgtgggagaaccacgtatcaatatattaagaagacaagaaaaaaaaagtctagaaaagaccccgtacaaaggtgccaagaaagcacccaagggaaaaaacaaaaatcaaactacagccaaacctgcctaagagcagcggccccaccaaggccccataacaaagcctcatcatggatggacagcaaaattgcgtggatgtttggggaagcattgtcaaacacacacgcatttctatgcttccaaatctgccaagctactaaaattacaatagagttgaaactttttttcttatgcttagacacaaatctttctgcctcactccaccattcctgaaaccctgtagcatcagacgtgggagcaagatgttgtagtcccagcctgcttagcattctaaatcatacttccctcgtaaagacacaagccaccagcatgtgatgcactgtctcgtcctgctggtcacacaagggacaactatctgggtgatccatgccatgacgcgctagtcgatcagccgtccaacatcggttgagagatgcaagccaaatgaaatacttgcaacgcgggggccccaagtcttctagattcttttagcaggctcaaaggttgttgcaccaccatggaagcgcatataagcagaactggccgaatacagccccgaggaagatggcatccaccgatgctggtcctcaacattaggaatttaggatgcagctgcacctcttggagtaaatcccagaccaacaaaaactcaaacagcacttttttgacagggatctctctggaagccttccggcgcaggtgctgtttgagttagggtggcctctcaaagctagacgatctgctgtccaacacttgttccggatagccaaccaaaggaaacttttgcatttggacgtagcccaagatttccaaagtcgtttccaaggctcaaaagatatggccccaaaaagagggctttgtagcaggatttggatgaataatatccgcttgcatcaagctttcagaggtgatggtcaggttcttgagataggatactgctttctaccacatcccagatctgtaaatactgcaacaggccatccatagatagggccctaataatatctctcacccaactcctgtcgaccatagcctcagccactgtccgtctactctgtaaccttttaggtacacaagcaacaactgcaggcatgagatcagctaaagcgcatccatgcacccagcgatctgtccaaaagaatgtattcaagctatagcccacttggctgatcaaagagatggagaacaatgcacgtgaattaggatggacagggatctcaattccggcccaaggttgcacccatctattttttttcagccaaagccatcgtatttggagagcccatccagcaacctgaaggtttggagtaccaagcccgcccagattgataggtctggtcacctccccaagctaccaaacaaatgcccctgtaaccctgtttgtctcttttcttcctgtccacaagaaagctcttctgattttatcaatcttcttgatcacccatttaggcacgttcaatgcaataagaagataaaccgggatagctgacaacacaaatcgaaccatggcagtccttcctgccaagtttaataagtgtgccttccaaccggggagtggatccactatcttatcaatccattgcatgagatcacttttcctcaattttttgtttgaaagtggcagtcccagataattgcatggaaaaatagaaatttggcaactctgcacctcttgataagcacattgttctctatgttttcaattgcaaatgttcagttagcaaattcaatacttgaagaaaggctgaaagataaagcaggttcttctagtgatggattctatgagtccagaaaagaatgggcggggagaagacactttctgctagctttcgaaggctgaaggattgtacatagtaattcggccagctgttggggaggcttcgagggaaatgtctttggttgagcttaaaagcaagtacaggaaggtctcatctgttgacaaaattagtaaaggctggcaagaagagtacgactcttcatccaagcagtgtatgcacgggccaaaatgcaaactcggaagcaattgcacagtgggtagaaggttgcaggagattaatatattgggtggtctaatacttcctgtatggggtgcagtagcaaaggcactggctaagcaggcacggcagattcacaggagaatacgtgtggtccgcttggagaccacgactgagaacaaacggtttgttgggcttatcattccaaattctgcagtggagtctgtactcgaaggtttgcaatgggtccaagatattgacgaatgatttggcaagaagctactcctttggcagtccttcctttgctttggaccaaatctttgtcgctgaggcaacttgtgcatttcgcttgtgaaacggttgtggttgtacgcagtcaggaaaagtatacgacaacggctgggccacttttgtgttatatatatgaaagttacgtaaacgtttatatcagaccggggtgctgttgtaagttagcctgttgttggaggctacatgcctaaatgctgcacgatgtagtggtgtggagatgtggtggctgtggctcttatgggcctgtgttgtttccctgacaagggtggctcatatggctggcctgagaccgattgggttggggtttgttttctataaacaaaacgaggttgaggattggtcattgtttggtaggctgtacaaacgaatctggttaccgtgcatcagctcatgggtagagttacccgtttcttctt

SEQ ID NO: 16317 - DNA, 2897 bp, Zea Mays
  misc_feature (1)..(2): n is a, c, g, or t
nnatccccaacttgggaggaaaggagttgagaaaaaacaaagacgaatccgcgcctgacacaaacaagagggacctctagaaaggagagagttaagccatccctccatgaccaaaaatcacccacccactcactaaaacctggagcttagcagctccagccaaacaccacaatctaacttcttctctgctgaagttttgggctaccgaaagggaaggagaggcaccctcaaaaacataaatatttctcttattccaaagggtccaagcaccaaaaataacgaaagaatgaaaaccttcccttctatctttcttcactcgccggcttgatttcctccaccattccgcgaaacagacctcgttctgtctaggagaaataccacccaaccccagtggggcaacaaatggtgccaaaattgccttgtaaaaacgcaggtcgtgagaatgtttttttctctcgaacgcgcaggagagctgcgcatcattatattaagataggaaaaaaatgtccaaaatggaccagagtacaaaacccatagggtgaaaacaactggaccaaggcaatactaaactagcacccctgcctcctctacagcaacacaagagaagaaacggaagcatgggtgcaggcaggcctgactagactagactgcagcactagtgttagccaagaccctatttaaagcagctgcgagtccaagattttcaagatatttagcaccagccttctcccaacagatcaactcatcaaaaaacagtcttttaactcgaacacgtgggagaaccacgtatcaatatattaagaagacaagaaaaaaaaagtctagaaaagaccccgtacaaaggtgccaagaaagcacccaagggaaaaaacaaaaatcaaactacagccaaacctgcctaagagcagcggccccaccaaggccccataacaaagcctcatcatggatggacagcaaaattgcgtggatgtttggggaagcattgtcaaacacacacgcatttctatgcttccaaatctgccaagctactaaaattacaatagagttgaaactttttttcttatgcttagacacaaatctttctgcctcactccaccattcctgaaaccctgtagcatcagacgtgggagcaagatgttgtagtcccagcctgcttagcattctaaatcatacttccctcgtaaagacacaagccaccagcatgtgatgcactgtctcgtcctgctggtcacacaagggacaactatctgggtgatccatgccatgacgcgctagtcgatcagccgtccaacatcggttgagagatgcaagccaaatgaaatacttgcaacgcgggggccccaagtcttctagattcttttagcaggctcaaaggttgttgcaccaccatggaagcgcatataagcagaactggccgaatacagccccgaggaagatggcatccaccgatgctggtcctcaacattaggaatttaggatgcagctgcacctcttggagtaaatcccagaccaacaaaaactcaaacagcacttttttgacagggatctctctggaagccttccggcgcaggtgctgtttgagttagggtggcctctcaaagctagacgatctgctgtccaacacttgttccggatagccaaccaaaggaaacttttgcatttggacgtagcccaagatttccaaagtcgtttccaaggctcaaaagatatggccccaaaaagagggctttgtagcaggatttggatgaataatatccgcttgcatcaagctttcagaggtgatggtcaggttcttgagataggatactgctttctaccacatcccagatctgtaaatactgcaacaggccatccatagatagggccctaataatatctctcacccaactcctgtcgaccatagcctcagccactgtccgtctactctgtaaccttttaggtacacaagcaacaactgcaggcatgagatcagctaaagcgcatccatgcacccagcgatctgtccaaaagaatgtattcaagctatagcccacttggctgatcaaagagatggagaacaatgcacgtgaattaggatggacagggatctcaattccggcccaaggttgcacccatctattttttttcagccaaagccatcgtatttggagagcccatccagcaacctgaaggtttggagtaccaagcccgcccagattgataggtctggtcacctccccaagctaccaaacaaatgcccctgtaaccctgtttgtctcttttcttcctgtccacaagaaagctcttctgattttatcaatcttcttgatcacccatttaggcacgttcaatgcaataagaagataaaccgggatagctgacaacacaaatcgaaccatggcagtccttcctgccaagtttaataagtgtgccttccaaccggggagtggatccactatcttatcaatccattgcatgagatcacttttcctcaattttttgtttgaaagtggcagtcccagataattgcatggaaaaatagaaatttggcaactctgcacctcttgataagcacattgttctctatgttttcaattgcaaatgttcagttagcaaattcaatacttgaagaaaggctgaaagataaagcaggttcttctagtgatggattctatgagtccagaaaagaatgggcggggagaagacactttctgctagctttcgaaggttcagctgaaggattgtacatagtaattcggccagctgttggggaggcttcgagggaaatgtctttggttgagcttaaaagcaagtacaggaaggtctcatctgttgacaaaattagtaaaggctggcaagaagagtacgactcttcatccaagcagtgatctgttattgccaatgagggtacaaattag

SEQ ID NO: 16318 - DNA, 2843 bp, Zea Mays
ggaaggcctcgtttggcaagccgatccacagtccatcatcggttatttttggcaagccaaagaaagaacttgcagcggagaggagcccaactcctccaaattaatctccaaggtctgaacttgacagacccctcaaagaaagcagagtaggctgatttgctagtgtagcaaccggattgagtaaacttccacacatgctgatctggcccccctccaagggtcacaccctccaagacatcccaaatctgaagaatatgtatagaaaggcagctgcactttgggttgaactgcgtgttgaactcctatcagccattgaatattatgcagaagataaagtcaattcagctcaaatttggcggctatactgggcaagtcatcagcgtttctttaggcatatgtgtatgtctgcaaaggtacctgctgtcgtgagattggcaaaagaagccttagcagaagaaaaatgtgtggtgattggtcttcagagcactggagaagctcgaacagaggaagctgttgctaaatatggcattgaattggaagatttcgtttctggtcctagagagcttcttcttaagctggtagaagataattatcctttgcctccaaagcctgattgttttgagcaaggtgaagaaaaagtccaggagtttcagcacaagcggcattatggatctgacatgtccttaaaaggacgagttagtaaacttggaaaaaaggaagacgtgagtgaagatgggggtgatgagtatcctccacattcagatcatgaatcaacagaatctgatgaggacttctatatgtgtcagatttgcaacactgaagaggagaaaaactcattgttttgttgctgtatttgtgcttcacgggttcaccctggttgcctcactccaccttcgactgacatcgtgaatgatgattggtcatgttatggttgcaaggagaaagtaaaaagctacttaaaagaaagagatgcttacttgactgaactctcaaagaggtatgatgctgcattggacagaaagtcaaaaattcttgacataatccgttccttggatttacctagtaatcctttagatgatatcatcgatcagcttggtggtcctgacaatgttgcagaaataactggacgacgtggtatgctaataagagcatcagatggaaaaggtgttatttaccaggcgcgaaacacgaaagaagttgcattggacatgatcaatatgcatgaaaagcagcaattcatggatggagaaaagaatgttgccataatatcagaagcaggatcagctggcgtttctctacatgctgatcgaagggcaaaaaatcagaggagaagagtgcacataacactagagcttccttggagtgcagaccgtgcgattcagcagtttgggagaacccatcgttctaatcaaacttctgcacctgaatataggcttcttttcacaaaccttggtggtgaaaagcgatttgcatcaatcgtggcaaagagactggagtctcttggagctttaacgcaaggagatcgaagggctggaccatcacttagcgccttcaactatgacagtaattatggaaagaaagccctgacaatgatgtacagaggaataatggaacaggatgcctttcctgttgtgcctttcgaatgctctgagaatcaagctacccttgaagagttcatcactaaagcaaaagctgctttagtgtcagttggaattattagggaccctataatgtgcaatggtaaaaatggtggaaagcttactggtaggattattgattctgatatgcatgatgttgcccgtttccttaatcgtattctgggattgtttccagacattcagaatagattatttgaccttttcacaagcatacttgatatagtcattcagaatgcacgaattgaaggacaacttgattctggtattgttgatatcaaagctaaaagtgtcgaaatgaaagaatcaccaaagactgttcatgttgatactgtgtccggtgctagtacaatattatatacttttacagttgaccgtggagtttcttgggaggtaactttcatattgaagccattatctgtttctcctaagaacttgtgtgacatgaaatgtatttatatttcagttttgttctacattacctttttttctcgaaacgcaggagagctgtgcatcatattataaaagaggaaaattaggggaaaagaatcccttacaattgtagaacatgaaggtgcttgatatatttgatagatggggtacaatatatagactcacaaccctaaccctaatgggccggcagcccaacagtggtgccggcccacgcacacacacacaatctaacatctccccgcagtcgcaacgggggcaccacacatgatgagactagagtagaagcagaaggtaggagccaacgggttgaaatccccttgtagtcacaacgtcgtaagggtgcgaatgttgcggctggagtagagaccggtgtgtgctccaaggagacgatagcccgtagatgccaaggtagttgaagtcgaggtggccgcagtcgggagacacgtagcatgagcctgttcgttgggaggggtcgacgttcgagcgtcaacgaatggtgagggcgacacaacaaaagagcaccagcaacctcagagccttcttacttcgttccacgatcgatcgtcgaggagcctcgccagggaggccggcgacagcgcacgcatctgcgccagtcagggtgggtcgcgcccgcggcagaaaagaaggggtatcggcggatccggtcggaaaagccacgacagcgatggatccagccatgaagacgacgatctagacaaagggatggcggatcta

SEQ ID NO: 16319 - DNA, 3428 bp, Zea Mays
ataggaggggttgacacgatcaatttccttgtcaatagttcagctgtcacatttttcttggagtctgtcaatgcctcaagctgctggaagacttttagaaagaaagatcctcacttgttttggactccatgtgctgctcactgtttggacctcatgcttgaggacattgggaaaattggagagttcaagaaatgcatttcccatgctcgccaagtgacaaccttcatatatatgcatggcaagcttcttgatgctacgagggagaagatatggggtgatttagtgagacctgcagttacaaaatttgttacatctttccttactctccagtccatatataagcataagcaatctttgagatgcctctttgttagtgatgactggactaggtccaagctatcaagcatagaagcaggaaagaaggtcacagagatacttctttctacaaacttttggaactcagtccaagattgtattcgagcatcacaaccactcatcgtgttgccagaggttgccgctgccatggatatggcaaaagcaaagatcacttcgggttttgaaggtagagaggcaatgaagaggaagttgcttgccattattaatcggaggtggcaagatcaaatggaggtgaagttgtatggggctgcattgtttttaaatccaaataagttctttgaacttcaaaaaaaggatccaacaaaaagggaggttggtaagctgagggcaacattcaatgaggtgctatggaagatggttgaagattatgaccttcaagctataatcagtaaacaagctgatgagtggaagaagaccaaagttgacatgaatatgtatagaaaggcagctgcactttgggttgaactgcgtgttgaactcctatcagccattgaatattatgcagaagataaagtcaattcagctcaaatttggcggctatactgggcaagtcatcagcgtttctttaggcatatgtgtatgtctgcaaaggtacctgctgtcgtgagattggcaaaagaagccttagcagaagaaaaatgtgtggtgattggtcttcagagcactggagaagctcgaacagaggaagctgttgctaaatatggcattgaattggaagatttcgtttctggtcctagagagcttcttcttaagctggtagaagataattatcctttgcctccaaagcctgattgttttgagcaaggtgaagaaaaagtccaggagtttcagcacaagcggcattatggatctgacatgtccttaaaaggacgagttagtaaacttggaaaaaaggaagacgtgagtgaagatgggggtgatgagtatcctccaccagattcagatcatgaatcaacagaatctgatgaggacttctatatgtgtcagatttgcaacactgaagaggagaaaaactcattgttttgttgctgtatttgtgcttcacgggttcaccctggttgcctcactccaccttcgactgacatcgtgaatgatgattggtcatgttatggttgcaaggagaaagtaaaaagctacttaaaagaaagagatgcttacttgactgaactctcaaagaggtatgatgctgcattggacagaaagtcaaaaattcttgacataatccgttccttggatttacctagtaatcctttagatgatatcatcgatcagcttggtggtcctgacaatgttgcagaaataactggacgacgtggtatgctaataagagcatcagatggaaaaggtgttatttaccaggcgcgaaacacgaaagaagttgcattggacatgatcaatatgcatgaaaagcagcaattcatggatggagaaaagaatgttgccataatatcagaagcaggatcagctggcgtttctctacatgctgatcgaagggcaaaaaatcagaggagaagagtgcacataacactagagcttccttggagtgcagaccgtgcgattcagcagtttgggagaacccatcgttctaatcaaacttctgcacctgaatataggcttcttttcacaaaccttggtggtgaaaagcgatttgcatcaatcgtggcaaagagactggagtctcttggagctttaacgcaaggagatcgaagggctggaccatcacttagcgccttcaactatgacagtaattatggaaagaaagccctgacaatgatgtacagaggaataatggaacaggttaccaggatgcctttcctgttgtgcctttcgaatgctctgagaatcaagctacccttgaagagttcatcactaaagcaaaagctgctttagtgtcagttggaattattagggaccctataatgtgcaatggtaaaaatggtggaaagcttactggtaggattattgattctgatatgcatgatgttgcccgtttccttaatcgtattctgggattgtttccagacattcagaatagattatttgaccttttcacaagcatacttgatatagtcattcagaatgcacgaattgaaggacaacttgattctggtattgttgatatcaaagctaaaagtgtcgaaatgaaagaatcaccaaagactgttcatgttgatactgtgtccggtgctagtacaatattatatacttttacagttgaccgtggagtttcttgggaggtaactttcatattgaagccattatctgtttctcctaagaacttgtgtgacatgaaatgtatttatatttcagttttgttctacattacctttttttctcgaaacgcaggagagctgtgcatcatattataaaagaggaaaattaggggaaaagaatcccttacaattgtagaacatgaaggtgcttgatatatttgatagatggggtacaatatatagactcacaaccctaaccctaatgggccggcagcccaacagtggtgccggcccacgcacacacacacaatctaacatctccccgcagtcgcaacgggggcaccacacatgatgagactagagtagaagcagaaggtaggagccaacgggttgaaatccccttgtagtcacaacgtcgtaagggtgcgaatgttgcggctggagtagagaccggtgtgtgctccaaggagacgatagcccgtagatgccaaggtagttgaagtcgaggtggccgcagtcgggagacacgtagcatgagcctgttcgttgggaggggtcgacgttcgagcgtcaacgaatggtgagggcgacacaacaaaagagcaccagcaacctcagagccttcttacttcgttccacgatcgatcgtcgaggagcctcgccagggaggccggcgacagcgcacgcatctgcgccagtcagggtgggtcgcgcccgcggcagaaaagaaggggtatcggcggatccggtcggaaaagccacgacagcgatggatccagccatgaagacgacgatctagacaaagggatggcggatcta

SEQ ID NO: 16320 - DNA, 3434 bp, Zea Mays
ataggaggggttgacacgatcaatttccttgtcaatagttcagctgtcacatttttcttggagtctgtcaatgcctcaagctgctggaagacttttagaaagaaagatcctcacttgttttggactccatgtgctgctcactgtttggacctcatgcttgaggacattgggaaaattggagagttcaagaaatgcatttcccatgctcgccaagtgacaaccttcatatatatgcatggcaagcttcttgatgctacgagggagaagatatggggtgatttagtgagacctgcagttacaaaatttgttacatctttccttactctccagtccatatataagcataagcaatctttgagatgcctctttgttagtgatgactggactaggtccaagctatcaagcatagaagcaggaaagaaggtcacagagatacttctttctacaaacttttggaactcagtccaagattgtattcgagcatcacaaccactcatcgtgttgccagaggttgccgctgccatggatatggcaaaagcaaagatcacttcgggttttgaaggtagagaggcaatgaagaggaagttgcttgccattattaatcggaggtggcaagatcaaatggaggtgaagttgtatggggctgcattgtttttaaatccaaataagttctttgaacttcaaaaaaaggatccaacaaaaagggaggttggtaagctgagggcaacattcaatgaggtgctatggaagatggttgaagattatgaccttcaagctataatcagtaaacaagctgatgagtggaagaagaccaaagttgacatgaatatgtatagaaaggcagctgcactttgggttgaactgcgtgttgaactcctatcagccattgaatattatgcagaagataaagtcaattcagctcaaatttggcggctatactgggcaagtcatcagcgtttctttaggcatatgtgtatgtctgcaaaggtacctgctgtcgtgagattggcaaaagaagccttagcagaagaaaaatgtgtggtgattggtcttcagagcactggagaagctcgaacagaggaagctgttgctaaatatggcattgaattggaagatttcgtttctggtcctagagagcttcttcttaagctggtagaagataattatcctttgcctccaaagcctgattgttttgagcaagatgaaggtgaagaaaaagtccaggagtttcagcacaagcggcattatggatctgacatgtccttaaaaggacgagttagtaaacttggaaaaaaggaagacgtgagtgaagatgggggtgatgagtatcctccaccagattcagatcatgaatcaacagaatctgatgaggacttctatatgtgtcagatttgcaacactgaagaggagaaaaactcattgttttgttgctgtatttgtgcttcacgggttcaccctggttgcctcactccaccttcgactgacatcgtgaatgatgattggtcatgttatggttgcaaggagaaagtaaaaagctacttaaaagaaagagatgcttacttgactgaactctcaaagaggtatgatgctgcattggacagaaagtcaaaaattcttgacataatccgttccttggatttacctagtaatcctttagatgatatcatcgatcagcttggtggtcctgacaatgttgcagaaataactggacgacgtggtatgctaataagagcatcagatggaaaaggtgttatttaccaggcgcgaaacacgaaagaagttgcattggacatgatcaatatgcatgaaaagcagcaattcatggatggagaaaagaatgttgccataatatcagaagcaggatcagctggcgtttctctacatgctgatcgaagggcaaaaaatcagaggagaagagtgcacataacactagagcttccttggagtgcagaccgtgcgattcagcagtttgggagaacccatcgttctaatcaaacttctgcacctgaatataggcttcttttcacaaaccttggtggtgaaaagcgatttgcatcaatcgtggcaaagagactggagtctcttggagctttaacgcaaggagatcgaagggctggaccatcacttagcgccttcaactatgacagtaattatggaaagaaagccctgacaatgatgtacagaggaataatggaacaggttaccaggatgcctttcctgttgtgcctttcgaatgctctgagaatcaagctacccttgaagagttcatcactaaagcaaaagctgctttagtgtcagttggaattattagggaccctataatgtgcaatggtaaaaatggtggaaagcttactggtaggattattgattctgatatgcatgatgttgcccgtttccttaatcgtattctgggattgtttccagacattcagaatagattatttgaccttttcacaagcatacttgatatagtcattcagaatgcacgaattgaaggacaacttgattctggtattgttgatatcaaagctaaaagtgtcgaaatgaaagaatcaccaaagactgttcatgttgatactgtgtccggtgctagtacaatattatatacttttacagttgaccgtggagtttcttgggaggtaactttcatattgaagccattatctgtttctcctaagaacttgtgtgacatgaaatgtatttatatttcagttttgttctacattacctttttttctcgaaacgcaggagagctgtgcatcatattataaaagaggaaaattaggggaaaagaatcccttacaattgtagaacatgaaggtgcttgatatatttgatagatggggtacaatatatagactcacaaccctaaccctaatgggccggcagcccaacagtggtgccggcccacgcacacacacacaatctaacatctccccgcagtcgcaacgggggcaccacacatgatgagactagagtagaagcagaaggtaggagccaacgggttgaaatccccttgtagtcacaacgtcgtaagggtgcgaatgttgcggctggagtagagaccggtgtgtgctccaaggagacgatagcccgtagatgccaaggtagttgaagtcgaggtggccgcagtcgggagacacgtagcatgagcctgttcgttgggaggggtcgacgttcgagcgtcaacgaatggtgagggcgacacaacaaaagagcaccagcaacctcagagccttcttacttcgttccacgatcgatcgtcgaggagcctcgccagggaggccggcgacagcgcacgcatctgcgccagtcagggtgggtcgcgcccgcggcagaaaagaaggggtatcggcggatccggtcggaaaagccacgacagcgatggatccagccatgaagacgacgatctagacaaagggatggcggatcta

SEQ ID NO: 16321 - DNA, 1737 bp, Zea Mays
ataggaggggttgacacgatcaatttccttgtcaatagttcagctgtcacatttttcttggagtctgtcaatgcctcaagctgctggaagacttttagaaagaaagatcctcacttgttttggactccatgtgctgctcactgtttggacctcatgcttgaggacattgggaaaattggagagttcaagaaatgcatttcccatgctcgccaagtgacaaccttcatatatatgcatggcaagcttcttgatgctacgagggagaagatatggggtgatttagtgagacctgcagttacaaaatttgttacatctttccttactctccagtccatatataagcataagcaatctttgagatgcctctttgttagtgatgactggactaggtccaagctatcaagcatagaagcaggaaagaaggtcacagagatacttctttctacaaacttttggaactcagtccaagattgtattcgagcatcacaaccactcatcgtgttgccagaggttgccgctgccatggatatggcaaaagcaaagatcacttcgggttttgaaggtagagaggcaatgaagaggaagttgcttgccattattaatcggaggtggcaagatcaaatggaggtgaagttgtatggggctgcattgtttttaaatccaaataagttctttgaacttcaaaaaaaggatccaacaaaaagggaggttggtaagctgagggcaacattcaatgaggtgctatggaagatggttgaagattatgaccttcaagctataatcagtaaacaagctgatgagtggaagaagaccaaagttgacatgaatatgtatagaaaggcagctgcactttgggttgaactgcgtgttgaactcctatcagccattgaatattatgcagaagataaagtcaattcagctcaaatttggcggctatactgggcaagtcatcagcgtttctttaggcatatgtgtatgtctgcaaaggtacctgctgtcgtgagattggcaaaagaagccttagcagaagaaaaatgtgtggtgattggtcttcagagcactggagaagctcgaacagaggaagctgttgctaaatatggcattgaattggaagatttcgtttctggtcctagagagcttcttcttaagctggtagaagataattatcctttgcctccaaagcctgattgttttgagcaaggtgaagaaaaagtccaggagtttcagcacaagcggcattatggatctgacatgtccttaaaaggacgagttagtaaacttggaaaaaaggaagacgtgagtgaagatgggggtgatgagtatcctccaccagattcagatcatgaatcaacagaatctgatgaggacttctatatgtgtcagatttgcaacactgaagaggagaaaaactcattgttttgttgctgtatttgtgcttcacgggttcaccctggttgcctcactccaccttcgactgacatcgtgaatgatgattggtcatgttatggttgcaaggagaaagtaaaaagctacttaaaagaaagagatgcttacttgactgaactctcaaagaggtatgatgctgcattggacagaaagtcaaaaattcttgacataatccgttccttggatttacctagtaatcctttagatgatatcatcgatcagttgatattcataagtcataacctcacactacaagaggacgatgtgaacccaaatctcgttaagacatgt

SEQ ID NO: 16322 - DNA, 1395 bp, Zea Mays
ataggaggggttgacacgatcaatttccttgtcaatagttcagctgtcacatttttcttggagtctgtcaatgcctcaagctgctggaagacttttagaaagaaagatcctcacttgttttggactccatgtgctgctcactgtttggacctcatgcttgaggacattgggaaaattggagagttcaagaaatgcatttcccatgctcgccaagtgacaaccttcatatatatgcatggcaagcttcttgatgctacgagggagaagatatggggtgatttagtgagacctgcagttacaaaatttgttacatctttccttactctccagtccatatataagcataagcaatctttgagatgcctctttgttagtgatgactggactaggtccaagctatcaagcatagaagcaggaaagaaggtcacagagatacttctttctacaaacttttggaactcagtccaagattgtattcgagcatcacaaccactcatcgtgttgccagaggttgccgctgccatggatatggcaaaagcaaagatcacttcgggttttgaaggtagagaggcaatgaagaggaagttgcttgccattattaatcggaggtggcaagatcaaatggaggtgaagttgtatggggctgcattgtttttaaatccaaataagttctttgaacttcaaaaaaaggatccaacaaaaagggaggttggtaagctgagggcaacattcaatgaggtgctatggaagatggttgaagattatgaccttcaagctataatcagtaaacaagctgatgagtggaagaagaccaaagttgacatgaatatgtatagaaaggcagctgcactttgggttgaactgcgtgttgaactcctatcagccattgaatattatgcagaagataaagtcaattcagctcaaatttggcggctatactgggcaagtcatcagcgtttctttaggcatatgtgtatgtctgcaaaggtacctgctgtcgtgagattggcaaaagaagccttagcagaagaaaaatgtgtggtgattggtcttcagagcactggagaagctcgaacagaggaagctgttgctaaatatggcattgaattggaagatttcgtttctggtcctagagagcttcttcttaagctggtagaagataattatcctttgcctccaaagcctgattgttttgagcaaggtgaagaaaaagtccaggagtttcagcacaagcggcattatggatctgacatgtccttaaaaggacgagttagtaaacttggaaaaaaggaagaccctagttccagcatggtcatcaattgggtcaaggatgagtctcatctctggtgtagggctggagccagtgatttatctagcatccttatgctccagtga

SEQ ID NO: 16323 - DNA, 2670 bp, Zea Mays
gattttttcacgcatgcagattttttttcacgcttgcctgcgctcgcccgtggctgtcgctcctccaccccctgctcggtcacggcaactgaccgtgcgtgcccaggtgaagctcacctctccttggctctcgcgatcggctccccggaatagatttccttgccgtgagctcttgtctcggctgctgcaaattcttctcctcatctccctccagcagttctgagctcgacgtcaatctccacctgcacgtcgttctccatggagagcctctgctcttgatcggcgctcgaccacacctccccatgccgtgcactcgccagactcgccttccctttgcccatcttcaacgccagccgatcctctccttccccacctcaggccgacggcctcaccttccttggcgcccaagctctgctcggcacccatcccagcgcgcgtcaccctcttgctggacgcacgtcctcgctcctcgtgtcgcagttcgtcgagctcatcccatactcgcctcgccatggccacagtccgtgcctcctcgagctccctccctgtccggccgtcgacatcgccgaccatcgacgtctggctccttgtctcgctccaccagtctaaccccggcgaccacggtcaagtccccgactcctcgtctctgtgcgtcgtcgatcccttcacggtgctcgtcgtcgtctcctcatcgccgtgccgaatgtctcggagcccgccagcctgtcgttagagaaccacagtgcagtacgatgccccagcaggtgttcggtgatatgcgcaagccgaacagcgtcgtcaaattcatggtttcaagtcggatttagctctggtatgtttattgattacgtgatgcgaaggaccaaggttgagtcgaccacaagctgatgtaaagcgtgagccactcgcgaggtgatgctgatggacgaacctgaagatggataaactgaacgaatgccaagacaaaggatggtcgtcaagtggacgtcatctaacaaacactaacgtagtgtttattccaggcaagccccggtgcatgcaaccgcttccttgtgtttttaaataatttttgcacactttaagtctagtgaaatgtgcattaggtttataggagttgcttggaaaccctttgatgcattgcctaccttgatatacatacctttatagatacttctgatgaagtatcaaaatatgatttacaaaattgcttagccttgcttagaggtaaatcttgtggatagaggttgtcctttgcgttaatgcctagctcaggggttatcctgaggaaggatgacttctgccagcaagaatattttcattgggagcaatggtaggatcttactgcaaagttccctgtgatgctcttttcatcctaaggaacacaaacaatgctaaggatggaagttcttaaatcgggacttgggctaggaacaggtgatgttctacccaggttgattaaggattatactgaatgtaggcttgctgatcgaggaccctttaactggtcacatgcctcatcatgggtaagctttgcctcgggcagactaataccagaataagataacacgcaatgagagtggagagatggcgagagtagcgtgtaccctccgtggcaagaggctggacggtcgtgtatctgtgctctgggttggcgtgaacctgatctggtcttaagaaccccggtggcgagtttacatatgcaaggtttaagtgttacatatgtcgtgtgattagagatcctcagctgagtataatcgattcagatcgctgtaacttcgcggacatgaagacttggtcactgccctgcaatctaagtcatggatggaatcttaatgagcaaaaatcatgttggattgattaatgtgatggtgaaattagactagatgcaaacaaggtctattaatacttaatctagcattaaaatgttgaaagtaaggactcactttagtaagttatttctgcaaaaatatctaaattgattcttactaaagcctctccttgattcccaaatctagcatatccttgagagtcttttctttagtcgggtaagtcttgctgagtaattccatactcagggttttattccctgttgtttttcaagttatagttttgtgctgatgttgatggtgttaagtgctggtgggctcggccttcttatataagtataccccgtctttatcttcatattgaggatggtcacttgagctagcatatatttcaaaactataaataatttataatagttcaaagttgttcatttgaatcactttttgtaagcactccgatcatgtacattataaaacttgatgtaactcataaaatttggtaataagttttccgctgcaaaattgttggtgtgtgatttgtgtttacttaatctcgcggttctggttgtaagtggtttattcggggtccttgggacactcagacggatcatgttaagttatctggtgcacatgcacagccgtctgaggtctttgagacaaggataggtgcatgtgggcccaataacttgggaggttctgccacaatcagtggggcacggttgtaggtgggccgagacacgtgaaatcagcccaaggtgaggtttctgtccttttttattattttctttttgtttgcttttcaaattccaattagattttaaattcaaacaaagttctaatttgc

SEQ ID NO: 16324 - DNA, 1850 bp, Zea Mays
ctcctctaaagtttcttgtttagctgcagcaccaacacaactaaataatgctcctgggttgtttggtcaagggaatctaccactggcttctggaatgcaccatggatcgatgtatggtcctggatcctacaagggacgccagcaaggtagcaaatttggtggcagtactacaagttggagttctgctggccgcagatttggtactatcgacttgagtggcaatcaacaaaggggcagcatgccatttggtagtcacaatggctctctggagttcatgaatgagcaaaaccgtggaccacgcgctacaaaaccgaagatacaaggcacagagaacacctcaggagatgagagaagcgagaaaattgttcctctgattgatagcgaactgtacaatcgctctgattttataactgagtacaaggatgccaaattctttgtaataaagtcctacaccgaggaccatgtacataggagcattaagtataaagtttgggccagcacagccagcgggaacaggaagctggattctgcttaccatgcagccaaagagaaagaagagcattgccctattttcttgtttttctcagtaagaacaactcatctcctttggttttttgcttttcccttcgaggaaaaaaaaagagtaacagtacatagtgggtgtttgatcctttattagcatgtgctaaggtgtttccgattttggtaatttcttttatgaataattgttccttttataggttaatgggagtggccaattctgtggcgtggctgagatgattggacctgtcgatttcgacagaagtgttgattactggcagcaggataagtggagtggccagttccctgtgaagtggcacataattaaagatgtaccgaacaaccttctgcggcacatcattcttgagaacaatgacagtaaacctgtcacaaatagcagggacacacaggaggtgaagctggaacagggcctccagatgctaacaatcttcaagaaccatgaggctgagacaacgatcgtggaagatttcgacttctatgagcagcgggagaaagccttgcaggagaacagacgtcaacagcagcctcccaccacctatcctcagaagctggtggataccaacgctcaaggtcctgtggccgatatatcagatgcatttgccaaggccgtccagttgaaggatactgcgaacagcgggacgaccccgaaagctgagggtgcctcagctgaaaatggatccgctgccacagccaaggttgaagggagtgcaaacctgaacacaggccctgtggagtagagtccgtttcccttctttctgctaatttggagcagcagatgaattgcatgctgcaatgtgaatgccggaaaagtggaaagtgcaggttgatcgtgttaaatatggtcgtggctgcgtcagttgtacaacatcataggctttgttttatctccatttatgttatataagttcaatatcatagttccaaaattattgttcccagttctcttctttcctgctttattttgcttccgacttccgtggtcctcgtgtcgcaccatgaatgatcgttccattttagcgggtttataggcataagaagctgcagaattatgctgcgatgaagttgcattttctgcagttgaatgtgatactgtcgagtcttgcactgtctgtaatttcagagatcctctagtgtatcttcgtcttgttactctcagcatgtacaatctgcagtagttctcttggtcacattgctccaaatccctaacacttgcacattacaaatgaaatgtagaactctctaataccttcaggtaaagccgttgttgcagcagcaaacctaaaatcacc

SEQ ID NO: 16325 - DNA, 2359 bp, Zea Mays
caacgcgtgagtttgtcctgtgcatatgcgtgtagtagcttcggaatgcttaggattgaggagttatagtgtgattccgctgcagtctgaacctgcacttgataataatccctccaagagtgcaaacgctagggaccagattctttctggtacggagaatgtgactacaggcaatgcacgcggcggcagctccttgaaatcgcaaaaaggcccgccagagaaggctagctctgtcggaaaacctggagaacaaccttttccctaccatcaaaatgtgtatgcaccacagccacaaccactctatcctggaggctacatgaacccttcaggacaatgggaggaatatccccattatgtgagtatggaggggctccattccgtatctcccggaatctacaatgacaaccagtccctcatgctatctcctggatatgcaaacaatccccaaatgatgtatggagcatattctcctgtttccaccgttggggatggccaacaatacctccctatgcattttcccttctcaagtccttactatcaaccaccagcttctcctagcatgggatattcaagctctgcgactggaatatcccaaggagaccctatgctgcagcaagagtacttccttcctgatggtcttctatattcacccacacaagggtatcatcaaccattcagctcattcgacagagcaccaacacaactaaataatgctcctgggttgtttggtcaagggaatctaccactggcttctggaatgcaccatggatcgatgtatggtcctggatcctacaagggacgccagcaaggtagcaaatttggtggcagtactacaagttggagttctgctggccgcagatttggtactatcgacttgagtggcaatcaacaaaggggcagcatgccatttggtagtcacaatggctctctggagttcatgaatgagcaaaaccgtggaccacgcgctacaaaaccgaagatacaaggcacagagaacacctcaggagatgagagaagcgagaaaattgttcctctgattgatagcgaactgtacaatcgctctgattttataactgagtacaaggatgccaaattctttgtaataaagtcctacaccgaggaccatgtacataggagcattaagtataaagtttgggccagcacagccagcgggaacaggaagctggattctgcttaccatgcagccaaagagaaagaagagcattgccctattttcttgtttttctcagttaatgggagtggccaattctgtggcgtggctgagatgattggacctgtcgatttcgacagaagtgttgattactggcagcaggataagtggagtggccagttccctgtgaagtggcacataattaaagatgtaccgaacaaccttctgcggcacatcattcttgagaacaatgacagtaaacctgtcacaaatagcagggacacacaggaggtgaagctggaacagggcctccagatgctaacaatcttcaagaaccatgaggctgagacaacgatcgtggaagatttcgacttctatgagcagcgggagaaagccttgcaggagaacagacgtcaacagcagcctcccaccacctatcctcagaagctggtggataccaacgctcaaggtcctgtggccgatatatcagatgcatttgccaaggccgtccagttgaaggatactgcgaacagcgggacgaccccgaaagctgagggtgcctcagctgaaaatggatccgctgccacagccaaggttgaagggagtgcaaacctgaacacaggccctgtggagtagagtccgtttcccttctttctgctaatttggagcagcagatgaattgcatgctgcaatgtgaatgccggaaaagtggaaagtgcaggttgatcgtgttaaatatggtcgtggctgcgtcagttgtacaacatcataggctttgttttatctccatttatgttatataagttcaatatcatagttccaaaattattgttcccagttctcttctttcctgctttattttgcttccgacttccgtggtcctcgtgtcgcaccatgaatgatcgttccattttagcgggtttataggcataagaagctgcagaattatgctgcgatgaagttgcattttctgcagttgaatgtgatactgtcgagtcttgcactgtctgtaatttcagagatcctctagtgtatcttcgtcttgttactctcagcatgtacaatctgcagtagttctcttggtcacattgctccaaatccctaacacttgcacattacaaatgaaatgtagaactctctaataccttcaggtaaagccgttgttgcagcagcaaacctaaaatcacc

SEQ ID NO: 16326 - DNA, 2321 bp, Zea Mays
ggaagctctagcttcagtacatattagatagtgtgattccgctgcagtctgaacctgcacttgataataatccctccaagagtgcaaacgctagggaccagattctttctggtacggagaatgtgactacaggcaatgcacgcggcggcagctccttgaaatcgcaaaaaggcccgccagagaaggctagctctgtcggaaaacctggagaacaaccttttccctaccatcaaaatgtgtatgcaccacagccacaaccactctatcctggaggctacatgaacccttcaggacaatgggaggaatatccccattatgtgagtatggaggggctccattccgtatctcccggaatctacaatgacaaccagtccctcatgctatctcctggatatgcaaacaatccccaaatgatgtatggagcatattctcctgtttccaccgttggggatggccaacaatacctccctatgcattttcccttctcaagtccttactatcaaccaccagcttctcctagcatgggatattcaagctctgcgactggaatatcccaaggagaccctatgctgcagcaagagtacttccttcctgatggtcttctatattcacccacacaagggtatcatcaaccattcagctcattcgacagagcaccaacacaactaaataatgctcctgggttgtttggtcaagggaatctaccactggcttctggaatgcaccatggatcgatgtatggtcctggatcctacaagggacgccagcaaggtagcaaatttggtggcagtactacaagttggagttctgctggccgcagatttggtactatcgacttgagtggcaatcaacaaaggggcagcatgccatttggtagtcacaatggctctctggagttcatgaatgagcaaaaccgtggaccacgcgctacaaaaccgaagatacaaggcacagagaacacctcaggagatgagagaagcgagaaaattgttcctctgattgatagcgaactgtacaatcgctctgattttataactgagtacaaggatgccaaattctttgtaataaagtcctacaccgaggaccatgtacataggagcattaagtataaagtttgggccagcacagccagcgggaacaggaagctggattctgcttaccatgcagccaaagagaaagaagagcattgccctattttcttgtttttctcagttaatgggagtggccaattctgtggcgtggctgagatgattggacctgtcgatttcgacagaagtgttgattactggcagcaggataagtggagtggccagttccctgtgaagtggcacataattaaagatgtaccgaacaaccttctgcggcacatcattcttgagaacaatgacagtaaacctgtcacaaatagcagggacacacaggaggtgaagctggaacagggcctccagatgctaacaatcttcaagaaccatgaggctgagacaacgatcgtggaagatttcgacttctatgagcagcgggagaaagccttgcaggagaacagacgtcaacagcagcctcccaccacctatcctcagaagctggtggataccaacgctcaaggtcctgtggccgatatatcagatgcatttgccaaggccgtccagttgaaggatactgcgaacagcgggacgaccccgaaagctgagggtgcctcagctgaaaatggatccgctgccacagccaaggttgaagggagtgcaaacctgaacacaggccctgtggagtagagtccgtttcccttctttctgctaatttggagcagcagatgaattgcatgctgcaatgtgaatgccggaaaagtggaaagtgcaggttgatcgtgttaaatatggtcgtggctgcgtcagttgtacaacatcataggctttgttttatctccatttatgttatataagttcaatatcatagttccaaaattattgttcccagttctcttctttcctgctttattttgcttccgacttccgtggtcctcgtgtcgcaccatgaatgatcgttccattttagcgggtttataggcataagaagctgcagaattatgctgcgatgaagttgcattttctgcagttgaatgtgatactgtcgagtcttgcactgtctgtaatttcagagatcctctagtgtatcttcgtcttgttactctcagcatgtacaatctgcagtagttctcttggtcacattgctccaaatccctaacacttgcacattacaaatgaaatgtagaactctctaataccttcaggtaaagccgttgttgcagcagcaaacctaaaatcacc

SEQ ID NO: 16327 - DNA, 2483 bp, Zea Mays
cgtcacgtgcaaaggggggaaaacttctttctctctcttttttttccctcccccgcccgaatctgatgcttaaaccctcgccgggaggaggattccaatcccgacgcaccagcccgcgcccgccacctacagccgcgcccggatctccgccatggccgccgcgccgcaccaggcccagggccccgcaggatagtgtgattccgctgcagtctgaacctgcacttgataataatccctccaagagtgcaaacgctagggaccagattctttctggtacggagaatgtgactacaggcaatgcacgcggcggcagctccttgaaatcgcaaaaaggcccgccagagaaggctagctctgtcggaaaacctggagaacaaccttttccctaccatcaaaatgtgtatgcaccacagccacaaccactctatcctggaggctacatgaacccttcaggacaatgggaggaatatccccattatgtgagtatggaggggctccattccgtatctcccggaatctacaatgacaaccagtccctcatgctatctcctggatatgcaaacaatccccaaatgatgtatggagcatattctcctgtttccaccgttggggatggccaacaatacctccctatgcattttcccttctcaagtccttactatcaaccaccagcttctcctagcatgggatattcaagctctgcgactggaatatcccaaggagaccctatgctgcagcaagagtacttccttcctgatggtcttctatattcacccacacaagggtatcatcaaccattcagctcattcgacagagcaccaacacaactaaataatgctcctgggttgtttggtcaagggaatctaccactggcttctggaatgcaccatggatcgatgtatggtcctggatcctacaagggacgccagcaaggtagcaaatttggtggcagtactacaagttggagttctgctggccgcagatttggtactatcgacttgagtggcaatcaacaaaggggcagcatgccatttggtagtcacaatggctctctggagttcatgaatgagcaaaaccgtggaccacgcgctacaaaaccgaagatacaaggcacagagaacacctcaggagatgagagaagcgagaaaattgttcctctgattgatagcgaactgtacaatcgctctgattttataactgagtacaaggatgccaaattctttgtaataaagtcctacaccgaggaccatgtacataggagcattaagtataaagtttgggccagcacagccagcgggaacaggaagctggattctgcttaccatgcagccaaagagaaagaagagcattgccctattttcttgtttttctcagttaatgggagtggccaattctgtggcgtggctgagatgattggacctgtcgatttcgacagaagtgttgattactggcagcaggataagtggagtggccagttccctgtgaagtggcacataattaaagatgtaccgaacaaccttctgcggcacatcattcttgagaacaatgacagtaaacctgtcacaaatagcagggacacacaggaggtgaagctggaacagggcctccagatgctaacaatcttcaagaaccatgaggctgagacaacgatcgtggaagatttcgacttctatgagcagcgggagaaagccttgcaggagaacagacgtcaacagcagcctcccaccacctatcctcagaagctggtggataccaacgctcaaggtcctgtggccgatatatcagatgcatttgccaaggccgtccagttgaaggatactgcgaacagcgggacgaccccgaaagctgagggtgcctcagctgaaaatggatccgctgccacagccaaggttgaagggagtgcaaacctgaacacaggccctgtggagtagagtccgtttcccttctttctgctaatttggagcagcagatgaattgcatgctgcaatgtgaatgccggaaaagtggaaagtgcaggttgatcgtgttaaatatggtcgtggctgcgtcagttgtacaacatcataggctttgttttatctccatttatgttatataagttcaatatcatagttccaaaattattgttcccagttctcttctttcctgctttattttgcttccgacttccgtggtcctcgtgtcgcaccatgaatgatcgttccattttagcgggtttataggcataagaagctgcagaattatgctgcgatgaagttgcattttctgcagttgaatgtgatactgtcgagtcttgcactgtctgtaatttcagagatcctctagtgtatcttcgtcttgttactctcagcatgtacaatctgcagtagttctcttggtcacattgctccaaatccctaacacttgcacattacaaatgaaatgtagaactctctaataccttcaggtaaagccgttgttgcagcagcaaacctaaaatcacc

SEQ ID NO: 16328 - DNA, 2485 bp, Zea Mays
cgtcacgtgcaaaggggggaaaacttctttctctctcttttttttccctcccccgcccgaatctgatgcttaaaccctcgccgggaggaggattccaatcccgacgcaccagcccgcgcccgccacctacagccgcgcccggatctccgccatggccgccgcgccgcaccaggcccagggccccgcagtagatagtgtgattccgctgcagtctgaacctgcacttgataataatccctccaagagtgcaaacgctagggaccagattctttctggtacggagaatgtgactacaggcaatgcacgcggcggcagctccttgaaatcgcaaaaaggcccgccagagaaggctagctctgtcggaaaacctggagaacaaccttttccctaccatcaaaatgtgtatgcaccacagccacaaccactctatcctggaggctacatgaacccttcaggacaatgggaggaatatccccattatgtgagtatggaggggctccattccgtatctcccggaatctacaatgacaaccagtccctcatgctatctcctggatatgcaaacaatccccaaatgatgtatggagcatattctcctgtttccaccgttggggatggccaacaatacctccctatgcattttcccttctcaagtccttactatcaaccaccagcttctcctagcatgggatattcaagctctgcgactggaatatcccaaggagaccctatgctgcagcaagagtacttccttcctgatggtcttctatattcacccacacaagggtatcatcaaccattcagctcattcgacagagcaccaacacaactaaataatgctcctgggttgtttggtcaagggaatctaccactggcttctggaatgcaccatggatcgatgtatggtcctggatcctacaagggacgccagcaaggtagcaaatttggtggcagtactacaagttggagttctgctggccgcagatttggtactatcgacttgagtggcaatcaacaaaggggcagcatgccatttggtagtcacaatggctctctggagttcatgaatgagcaaaaccgtggaccacgcgctacaaaaccgaagatacaaggcacagagaacacctcaggagatgagagaagcgagaaaattgttcctctgattgatagcgaactgtacaatcgctctgattttataactgagtacaaggatgccaaattctttgtaataaagtcctacaccgaggaccatgtacataggagcattaagtataaagtttgggccagcacagccagcgggaacaggaagctggattctgcttaccatgcagccaaagagaaagaagagcattgccctattttcttgtttttctcagttaatgggagtggccaattctgtggcgtggctgagatgattggacctgtcgatttcgacagaagtgttgattactggcagcaggataagtggagtggccagttccctgtgaagtggcacataattaaagatgtaccgaacaaccttctgcggcacatcattcttgagaacaatgacagtaaacctgtcacaaatagcagggacacacaggaggtgaagctggaacagggcctccagatgctaacaatcttcaagaaccatgaggctgagacaacgatcgtggaagatttcgacttctatgagcagcgggagaaagccttgcaggagaacagacgtcaacagcagcctcccaccacctatcctcagaagctggtggataccaacgctcaaggtcctgtggccgatatatcagatgcatttgccaaggccgtccagttgaaggatactgcgaacagcgggacgaccccgaaagctgagggtgcctcagctgaaaatggatccgctgccacagccaaggttgaagggagtgcaaacctgaacacaggccctgtggagtagagtccgtttcccttctttctgctaatttggagcagcagatgaattgcatgctgcaatgtgaatgccggaaaagtggaaagtgcaggttgatcgtgttaaatatggtcgtggctgcgtcagttgtacaacatcataggctttgttttatctccatttatgttatataagttcaatatcatagttccaaaattattgttcccagttctcttctttcctgctttattttgcttccgacttccgtggtcctcgtgtcgcaccatgaatgatcgttccattttagcgggtttataggcataagaagctgcagaattatgctgcgatgaagttgcattttctgcagttgaatgtgatactgtcgagtcttgcactgtctgtaatttcagagatcctctagtgtatcttcgtcttgttactctcagcatgtacaatctgcagtagttctcttggtcacattgctccaaatccctaacacttgcacattacaaatgaaatgtagaactctctaataccttcaggtaaagccgttgttgcagcagcaaacctaaaatcacc

SEQ ID NO: 16329 - DNA, 2608 bp, Zea Mays
cttctcgtcacgtgcaaaggggggaaaacttctttctctctcttttttttccctcccccgcccgaatctgatgcttaaaccctcgccgggaggaggattccaatcccgacgcaccagcccgcgcccgccacctacagccgcgcccggatctccgccatggccgccgcgccgcaccaggcccagggccccgcagatagtgtgattccgctgcagtctgaacctgcacttgataataatccctccaagagtgcaaacgctagggaccagattctttctggtacggagaatgtgactacaggcaatgcacgcggcggcagctccttgaaatcgcaaaaaggcccgccagagaaggctagctctgtcggaaaacctggagaacaaccttttccctaccatcaaaatgtgtatgcaccacagccacaaccactctatcctggaggctacatgaacccttcaggacaatgggaggaatatccccattatggaatctacaatgacaaccagtccctcatgctatctcctggatatgcaaacaatccccaaatgatgtatggagcatattctcctgtttccaccgttggggatggccaacaatacctccctatgcattttcccttctcaagtccttactatcaaccaccagcttctcctagcatgggatattcaagctctgcgactggaatatcccaaggagaccctatgctgcagcaagagtacttccttcctgatggtcttctatattcacccacacaagggtatcatcaaccattcagctcattcgacagagcaccaacacaactaaataatgctcctgggttgtttggtcaagggaatctaccactggcttctggaatgcaccatggatcgatgtatggtcctggatcctacaagggacgccagcaaggtagcaaatttggtggcagtactacaagttggagttctgctggccgcagatttggtactatcgacttgagtggcaatcaacaaaggggcagcatgccatttggtagtcacaatggctctctggagttcatgaatgagcaaaaccgtggaccacgcgctacaaaaccgaagatacaaggcacagagaacacctcaggagatgagagaagcgagaaaattgttcctctgattgatagcgaactgtacaatcgctctgattttataactgagtacaaggatgccaaattctttgtaataaagtcctacaccgaggaccatgtacataggagcattaagtataaagtttgggccagcacagccagcgggaacaggaagctggattctgcttaccatgcagccaaagagaaagaagagcattgccctattttcttgtttttctcagtaagaacaactcatctcctttggttttttgcttttcccttcgaggaaaaaaaaagagtaacagtacatagtgggtgtttgatcctttattagcatgtgctaaggtgtttccgattttggtaatttcttttatgaataattgttccttttataggttaatgggagtggccaattctgtggcgtggctgagatgattggacctgtcgatttcgacagaagtgttgattactggcagcaggataagtggagtggccagttccctgtgaagtggcacataattaaagatgtaccgaacaaccttctgcggcacatcattcttgagaacaatgacagtaaacctgtcacaaatagcagggacacacaggaggtgaagctggaacagggcctccagatgctaacaatcttcaagaaccatgaggctgagacaacgatcgtggaagatttcgacttctatgagcagcgggagaaagccttgcaggagaacagacgtcaacagcagcctcccaccacctatcctcagaagctggtggataccaacgctcaaggtcctgtggccgatatatcagatgcatttgccaaggccgtccagttgaaggatactgcgaacagcgggacgaccccgaaagctgagggtgcctcagctgaaaatggatccgctgccacagccaaggttgaagggagtgcaaacctgaacacaggccctgtggagtagagtccgtttcccttctttctgctaatttggagcagcagatgaattgcatgctgcaatgtgaatgccggaaaagtggaaagtgcaggttgatcgtgttaaatatggtcgtggctgcgtcagttgtacaacatcataggctttgttttatctccatttatgttatataagttcaatatcatagttccaaaattattgttcccagttctcttctttcctgctttattttgcttccgacttccgtggtcctcgtgtcgcaccatgaatgatcgttccattttagcgggtttataggcataagaagctgcagaattatgctgcgatgaagttgcattttctgcagttgaatgtgatactgtcgagtcttgcactgtctgtaatttcagagatcctctagtgtatcttcgtcttgttactctcagcatgtacaatctgcagtagttctcttggtcacattgctccaaatccctaacacttgcacattacaaatgaaatgtagaactctctaataccttcaggtaaagccgttgttgcagcagcaaacctaaaatcacc

SEQ ID NO: 16330 - DNA, 2518 bp, Zea Mays
cagagacgctcgtggtttcatttcttccccccttctcgtcacgtgcaaaggggggaaaacttctttctctctcttttttttccctcccccgcccgaatctgatgcttaaaccctcgccgggaggaggattccaatcccgacgcaccagcccgcgcccgccacctacagccgcgcccggatctccgccatggccgccgcgccgcaccaggcccagggccccgcagatagtgtgattccgctgcagtctgaacctgcacttgataataatccctccaagagtgcaaacgctagggaccagattctttctggtacggagaatgtgactacaggcaatgcacgcggcggcagctccttgaaatcgcaaaaaggcccgccagagaaggctagctctgtcggaaaacctggagaacaaccttttccctaccatcaaaatgtgtatgcaccacagccacaaccactctatcctggaggctacatgaacccttcaggacaatgggaggaatatccccattatgtgagtatggaggggctccattccgtatctcccggaatctacaatgacaaccagtccctcatgctatctcctggatatgcaaacaatccccaaatgatgtatggagcatattctcctgtttccaccgttggggatggccaacaatacctccctatgcattttcccttctcaagtccttactatcaaccaccagcttctcctagcatgggatattcaagctctgcgactggaatatcccaaggagaccctatgctgcagcaagagtacttccttcctgatggtcttctatattcacccacacaagggtatcatcaaccattcagctcattcgacagagcaccaacacaactaaataatgctcctgggttgtttggtcaagggaatctaccactggcttctggaatgcaccatggatcgatgtatggtcctggatcctacaagggacgccagcaaggtagcaaatttggtggcagtactacaagttggagttctgctggccgcagatttggtactatcgacttgagtggcaatcaacaaaggggcagcatgccatttggtagtcacaatggctctctggagttcatgaatgagcaaaaccgtggaccacgcgctacaaaaccgaagatacaaggcacagagaacacctcaggagatgagagaagcgagaaaattgttcctctgattgatagcgaactgtacaatcgctctgattttataactgagtacaaggatgccaaattctttgtaataaagtcctacaccgaggaccatgtacataggagcattaagtataaagtttgggccagcacagccagcgggaacaggaagctggattctgcttaccatgcagccaaagagaaagaagagcattgccctattttcttgtttttctcagttaatgggagtggccaattctgtggcgtggctgagatgattggacctgtcgatttcgacagaagtgttgattactggcagcaggataagtggagtggccagttccctgtgaagtggcacataattaaagatgtaccgaacaaccttctgcggcacatcattcttgagaacaatgacagtaaacctgtcacaaatagcagggacacacaggaggtgaagctggaacagggcctccagatgctaacaatcttcaagaaccatgaggctgagacaacgatcgtggaagatttcgacttctatgagcagcgggagaaagccttgcaggagaacagacgtcaacagcagcctcccaccacctatcctcagaagctggtggataccaacgctcaaggtcctgtggccgatatatcagatgcatttgccaaggccgtccagttgaaggatactgcgaacagcgggacgaccccgaaagctgagggtgcctcagctgaaaatggatccgctgccacagccaaggttgaagggagtgcaaacctgaacacaggccctgtggagtagagtccgtttcccttctttctgctaatttggagcagcagatgaattgcatgctgcaatgtgaatgccggaaaagtggaaagtgcaggttgatcgtgttaaatatggtcgtggctgcgtcagttgtacaacatcataggctttgttttatctccatttatgttatataagttcaatatcatagttccaaaattattgttcccagttctcttctttcctgctttattttgcttccgacttccgtggtcctcgtgtcgcaccatgaatgatcgttccattttagcgggtttataggcataagaagctgcagaattatgctgcgatgaagttgcattttctgcagttgaatgtgatactgtcgagtcttgcactgtctgtaatttcagagatcctctagtgtatcttcgtcttgttactctcagcatgtacaatctgcagtagttctcttggtcacattgctccaaatccctaacacttgcacattacaaatgaaatgtagaactctctaataccttcaggtaaagccgttgttgcagcagcaaacctaaaatcacc

SEQ ID NO: 16331 - DNA, 2359 bp, Zea Mays
gccgggatcagccagcgcgacgcgaggggcacgtcgcctgcagccgcggctgtataatatcactgatagtgtgattccgctgcagtctgaacctgcacttgataataatccctccaagagtgcaaacgctagggaccagattctttctggtacggagaatgtgactacaggcaatgcacgcggcggcagctccttgaaatcgcaaaaaggcccgccagagaaggctagctctgtcggaaaacctggagaacaaccttttccctaccatcaaaatgtgtatgcaccacagccacaaccactctatcctggaggctacatgaacccttcaggacaatgggaggaatatccccattatgtgagtatggaggggctccattccgtatctcccggaatctacaatgacaaccagtccctcatgctatctcctggatatgcaaacaatccccaaatgatgtatggagcatattctcctgtttccaccgttggggatggccaacaatacctccctatgcattttcccttctcaagtccttactatcaaccaccagcttctcctagcatgggatattcaagctctgcgactggaatatcccaaggagaccctatgctgcagcaagagtacttccttcctgatggtcttctatattcacccacacaagggtatcatcaaccattcagctcattcgacagagcaccaacacaactaaataatgctcctgggttgtttggtcaagggaatctaccactggcttctggaatgcaccatggatcgatgtatggtcctggatcctacaagggacgccagcaaggtagcaaatttggtggcagtactacaagttggagttctgctggccgcagatttggtactatcgacttgagtggcaatcaacaaaggggcagcatgccatttggtagtcacaatggctctctggagttcatgaatgagcaaaaccgtggaccacgcgctacaaaaccgaagatacaaggcacagagaacacctcaggagatgagagaagcgagaaaattgttcctctgattgatagcgaactgtacaatcgctctgattttataactgagtacaaggatgccaaattctttgtaataaagtcctacaccgaggaccatgtacataggagcattaagtataaagtttgggccagcacagccagcgggaacaggaagctggattctgcttaccatgcagccaaagagaaagaagagcattgccctattttcttgtttttctcagttaatgggagtggccaattctgtggcgtggctgagatgattggacctgtcgatttcgacagaagtgttgattactggcagcaggataagtggagtggccagttccctgtgaagtggcacataattaaagatgtaccgaacaaccttctgcggcacatcattcttgagaacaatgacagtaaacctgtcacaaatagcagggacacacaggaggtgaagctggaacagggcctccagatgctaacaatcttcaagaaccatgaggctgagacaacgatcgtggaagatttcgacttctatgagcagcgggagaaagccttgcaggagaacagacgtcaacagcagcctcccaccacctatcctcagaagctggtggataccaacgctcaaggtcctgtggccgatatatcagatgcatttgccaaggccgtccagttgaaggatactgcgaacagcgggacgaccccgaaagctgagggtgcctcagctgaaaatggatccgctgccacagccaaggttgaagggagtgcaaacctgaacacaggccctgtggagtagagtccgtttcccttctttctgctaatttggagcagcagatgaattgcatgctgcaatgtgaatgccggaaaagtggaaagtgcaggttgatcgtgttaaatatggtcgtggctgcgtcagttgtacaacatcataggctttgttttatctccatttatgttatataagttcaatatcatagttccaaaattattgttcccagttctcttctttcctgctttattttgcttccgacttccgtggtcctcgtgtcgcaccatgaatgatcgttccattttagcgggtttataggcataagaagctgcagaattatgctgcgatgaagttgcattttctgcagttgaatgtgatactgtcgagtcttgcactgtctgtaatttcagagatcctctagtgtatcttcgtcttgttactctcagcatgtacaatctgcagtagttctcttggtcacattgctccaaatccctaacacttgcacattacaaatgaaatgtagaactctctaataccttcaggtaaagccgttgttgcagcagcaaacctaaaatcacc

SEQ ID NO: 16332 - DNA, 920 bp, Zea Mays
atgcccccgtcgtatccgattgagccatgcgtggcggtgctgacaataggcgtgacacttccagcagccaccgtcactaccatcctctctcgctcacccttgccccatccaatcctctccttgccttatcttgtctcgttggcagcttgggcacgcacactaggtgttcaacaggagtcctcgccggcgcggaagatgtacgtggtcaagcgggacgaacgccgggagacggtgcaattcgacgagatcacggtgcgccttaagaagctcagctacggcctcagtcaggaccacttcaacctaatgctcgtcatgcaaaaggtctgcacgtgggtctataagggcgccaccagcagccaactcaatgagcttgtcgcgactacgcctcgctagtggcgaggtttattgtgtcgatcctgcacaagaacacaaagaagtccttctcgaagacgtaagtaacgtctggctttggttcaatttcattcattcatagtggcatggatttgttggattaggttatgagttgggtgtgactgttatggacgcaagataaaggaaatctacatgtacttcaatgagacttttacgatatctaagatgatggcccctctagttgctgaagatgtttgtgaactcatcatgagggtgagattcttgtttgccttgccacttttctgagaggcctcctatgtaaatagctagtctctctctctctttaccgaccctccctctccctctcctctctctataaaagctggtctctgccgtgccggagctcctggctcacccaagctcgctctctccctcttttcctctctctctctctctcctcgctcgtcatcgagccacccgacgccgtcgccggagttcggccgcgcccgcgccctcctctcggccatgcccgtgcccctgctccccag

SEQ ID NO: 16333 - DNA, 661 bp, Zea Mays
agcttgaaaccaaagggggattttggacagtgtcagtttgggttgctagtgtttggacttgttgtgaggacgatggctgatcttgtggccgtgggcataaagaggagggacgccgaagtgggcagccatggattccccatcctccttggtcccaagaggatcaaactagaggacgaggcagagatcccggagccgatggaagaagaggaaccacttgcagacgtggacgcagacgccggtgcagcagcaccggtcgttgtgcaggcgcagccagccgtgtcggtgtcgatgccctcaccgtcaccgctgcagccagctcagggccacgaggaggctgctgtcctccgtgagccgcagcctggcctgcaacaggcggcgccgatggacgtcgaggaggatttccggcagccgcagccgcagcctggcctgcatcctcgcttttggtctgttctgatggcgggagctcctgtttgtgcaagcgtgcaacaaccaaaaagtggcgcgccactgttccaggcagcctttgtcacctgctagctccgtacacgctggattgaatgtgccgtcgcagtaatgtctagcttcctgcaattggtggtgttgcagtagtcttcggtccttggaacatgtagctttcggagacagagtactgaatagatcc

SEQ ID NO: 16334 - DNA, 666 bp, Zea Mays
agcttgaaaccaaagggggattttggacagtgtcagtttgggttgctagtgtttggacttgttgtgaggacgatggctgatcttgtggccgtgggcataaagaggagggacgccgaagtgggcagccatggattccccatcctccttggtcccaagaggatcaaactagaggacgaggcagagatcccggagccgatggaagaagaggaaccacttgcagacgtggacgcagacgccggtgcagcagcaccggtcgttgtgcaggcgcagccagccgtgtcggtgtcgatgccctcaccgtcaccgctgcagccagctcagggccacgaggaggctgctgtcctccgtgagccgcagcctggcctgcaacaggcggcgccgatggacgtcgaggaggatttccggcagccgcagccgcagcctggcctgcatcctcgcttttggtcaggtctgttctgatggcgggagctcctgtttgtgcaagcgtgcaacaaccaaaaagtggcgcgccactgttccaggcagcctttgtcacctgctagctccgtacacgctggattgaatgtgccgtcgcagtaatgtctagcttcctgcaattggtggtgttgcagtagtcttcggtccttggaacatgtagctttcggagacagagtactgaatagatcc

SEQ ID NO: 16335 - DNA, 566 bp, Zea Mays
tatgttgtttttagtgcggttttgattgatctggtggtttctacattgtattttctagcagctttgggaagggtggtgtcaggcgctgccgttgcgtatgctgccctatgcatcttctgcctctacatgtttgcacaaagcaccgatctgtttgatcagctcccttcttgggtccctgtgggtagggattctttgggcggtactcaggataccgcgtgattttccacatgtacatggattgcagagtttttcttctcttccactgtctgtatatggtcttgcaggctaatagcttgaactatagcatctatctctgcccccacggtattacaactgtacccagtgtttagcaatggagtaatgatctttgtatatatatatgacacgtttgcaacttgccagatgccagtgatgcatcctgtatgttttcggagctcattgcagatctctctggcttgacatggttgttggtcgtgagattttgtgatggtgtgttttgcctgtaatctaaatatctaataaagatctgtctttcatcacgtaatacatgctcatgcattgcgaag

SEQ ID NO: 16336 - DNA, 702 bp, Zea Mays
cttgtatgaccacaaatcaaacacaacggtgcctgtggatcctcttgaatggcagatctctcaggagatggcaaatagcatagttgcatctttagccaatacagtaggagctgctgagtctgtattaagggtggctgcaactggacatgacaagaagctgtttttcaaggtggtttctacattgtattttctagcagctttgggaagggtggtgtcaggcgctgccgttgcgtatgctgccctatgcatcttctgcctctacatgtttgcacaaagcaccgatctgtttgatcagctcccttcttgggtccctgtgggtagggattctttgggcggtactcaggataccgcgtgattttccacatgtacatggattgcagagtttttcttctcttccactgtctgtatatggtcttgcaggctaatagcttgaactatagcatctatctctgcccccacggtattacaactgtacccagtgtttagcaatggagtaatgatctttgtatatatatatgacacgtttgcaacttgccagatgccagtgatgcatcctgtatgttttcggagctcattgcagatctctctggcttgacatggttgttggtcgtgagattttgtgatggtgtgttttgcctgtaatctaaatatctaataaagatctgtctttcatcacgtaatacatgctcatgcattgcgaag

SEQ ID NO: 16337 - DNA, 751 bp, Zea Mays
agcaggctagtggtagatgctgctggtagttgtagctgatggctagtagatcgtactgcaaaaaagcggaaaggagggtgcctgtggatcctcttgaatggcagatctctcaggagatggcaaatagcatagttgcatctttagccaatacagtaggagctgctgagtctgtattaagggtggctgcaactggacatgacaagaagctgtttttcaaggtggtttctacattgtattttctagcagctttgggaagggtggtgtcaggcgctgccgttgcgtatgctgccctatgcatcttctgcctctacatgtttgcacaaagcaccgatctgtttgatcagctcccttcttgggtccctgtgggtagggattctttgggcggtactcaggataccgcgtgattttccacatgtacatggattgcagagtttttcttctcttccactgtctgtatatggtcttgcaggctaatagcttgaactatagcatctatctctgcccccacggtattacaactgtacccagtgtttagcaatggagtaatgatctttgtatatatatatgacacgtttgcaacttgccagatgccagtgatgcatcctgtatgttttcggagctcattgcagatctctctggcttgacatggttgttggtcgtgagattttgtgatggtgtgttttgcctgtaatctaaatatctaataaagatctgtctttcatcacgtaatacatgctcatgcattgcgaag

SEQ ID NO: 16338 - DNA, 757 bp, Zea Mays
gccatattgcccttgtgctatattttaacatattatatatataaacccaacgcgctctcctctccatcagacagtactactactgttggcacatctcgaaattccaacagcggcacgtacaccaccatggccggcgggaagaggagtaagctgctgcagggtgctccgccgccgccgccgccgccgcaatggtctgacgtccgtggcctgctccacatgcggttgacggacgccgccgcggagctcaacgtctcaatcacctacctcaggcgcctctgccgccagaacggcttcgctcagtggccaggaaagaagatccggtacatgaacagtacagggaagaaggtgatgctggaggcagatgatgcgctgctggacgcctcgccgtctgctggtctcgctggtacttccgggctccggcaggccatgagcgcggaaacccggaacgaggaagaggacgacgaaccagttgcgaatcaggaactcaccactttaaacttgatagacaaggttggatcgtcctcgtcccccagccgcagcgacggccgcagctagtttgccagtgctagcttgctgtcatctgtgtgatgcaaaatgcaatacatgtagctgatcacaggcttcatctatatcggtcgactatgtattattactgtgatcccagttcgagcgagaacatctattatattgaatgtgctttgttgttaactccaacctgcagctttgttggttaataagtcacttgcgttgcaactga

SEQ ID NO: 16339 - DNA, 5105 bp, Zea Mays
atctgttcccatctcttctgcctccgtctcaatctcgaccggtcaccccatctccaccgccacatccgtcgtcttccgccgccgccgatggcccgcctcctcacgcaaaccctcaccctagcccgccccgcctcctccccctccactaccgccgcatccgcttccctccgtggcctcgccaccaaggtcgagatcatcgagatcgatctcgccgaggaagacgctggctcctcgtcccacggctccccctcctcgtccccgtcggtcgaggcggtcgggatccggcgcctggaggaggccatccacggcgtcatggtgcgccgcgccgcgcccgactggctccccttcgtgccgggagggtccttctgggtgcccccgctgcgccgcccgcacggggtcgccgagcttgttggccggatcgcggctgctgggggcaccgaagggggcgccggggccgttggtggcgcggtcgaagtcttggagctcgacgcgcccatgacggaggagcaggcgttttgtttctccaccacgcgcggctggccctcggcctctttcttcgtcgaaggtgaatccccttcgtgatctggtgcttagaatttcacatgttctggtctatgggtgccatgttttaagcaaaaactccctctttcaaaaacaatgcaagcttgcctgccagtcaaagctgttcgtgtttcgccaaattttagtacatttaaggatccaaatcaatttattatgaaaatatatttcataattaataaataatattataaatattgatacttttttattgataattgatcaagagaacatattttgggctcacggaacctccatggtgcatcacattttttacttacctcctctgccattagagttgatataggaggggtctgggataagtaaaaaattgtccgtctcgtaggattgctcgtggatgcattagatttaaagtgctacgtttccattggtcaaactcaaggtattaaaatactatactacacgagaattgcattctttatggggcgagggagtagatgtggatagtcctgtcagaaagacaaaccttgtcgctttaattgtattagagttaaatgcatgagcgaagttgttaagaggtggcactttggtccataaacttcgaaaacatatttctaggcccctaatcttggtaagggagtgtttggaagcaaaatatttcaaaaccatggttttagaatacaataattttaaaatgtcatgacacaaccatattattttttacatcactctaagcaatacttgtttgaagacgaagtatctcaaatcatggttttttagtatatatgcacaagaagctagtcatagacaaaaactttggattggagtggagttttaaatactccaaaataacatggtaactgtcaaactatggtatacaaaacaaagttttttacaaggtagccaaacaccccttggcaaaaactatcatgttattcactggttttatctcaaaactccaaaaatacttttcttccaaacagtgctgaagctacattaagaaccgcgggtgcatacacacccacgaaaatttgtaaaatcagtgatttagaccaaaatttcaccatatatgcaccacttataaattattactatgcatcctcaagggatatgcaccctcccctgattaactctagcttcgacgctgcttccaagcatcccctaagtggtgcaccacaatattcgatatggtctagaaatagacatgtggtccatcattttacaagtttagggatgtgtgatgcactgtaaacaaatttagggacccaaaaacacatttacaaagttcataggctcaagtggcaccctttgacaagtttagacgtcgctgatgcatttaactcattatattatgtgcacccaatttttatcagatgtctaggcggattattgatgcgaattggtattgctttgtatatacggatgttgcttgttagttgttactccaattacccaccaaactagatttaggtaccatttggatgggatatgtgggttgggaattagaaatgttgtggaggataaggtttgtcccatgttcgtttggagggaattgggaaacaagggaactcaatagggaaacgcgtatcctaccaattcaatcccagtggaagagatgggttacatctgggaaatgagaacagaagtgcagcgctttcaaactaggattggttcccacttcccaggttgctatggtgagctcggcgtgtgcttctgggggatgagaatggcctgttcagctgcttgctgttagcacagttattctttgagtggcagctgcaaagaccaaatgatgaacaggcccatggtgaacagctgccaaacaggccctgacagtgttgtatatatgtggccatggtgaacgaagccaccatcattggccttgccgcccggtggccagggcggtagtcttcagttttggctctagcacctgcggctagcggctagccacatgtgtgctcaagaaaggcagcaccagcaggaccagatcatcaacaaagcctaccatctttggttggatgtgccaatcgccttgcacagcagtgcgcggagctaggggtgggtgggggactatgtgaaggagaatagaattggtgtatttggatggatctattacattgcgcccttaggtggtttatattgagtacatgacttagaagcaacccacgtatacatatgacaatctatgagacacaatatctaaactactaaatatactgtaacacatatgacaatctatgagacacaatatttaaactaccaattatactcccccccggcacagttgtagcatgagcattgtatacggttacactatagaagaagttgatgaactaacatactcccacagtcgcgacgttgttgcaatgcagatgcaacagctgacactattttcaagtcgaagtcggtttggaaaaatcacgattaatcgcgcaagtcgtccgactaatcgtgattaatcgcgattaatcgcttgagtcggtcagccagaacgactagcaaatcgtccgacttgaaaacatggacgactggagaagaaattgataagtagctaatgcagacgatagccaagtatgaggacgggcagccatggtcgatggaagttgttgatgtcaccgaaaagtaggagccgcacaagtcacggacacactaggggtgtcgtggtgatggtgccacataggaggaagtgccatagacgaagatggcaacgtagtcgaggcagtcaatgaaaaaggtctatgccgaagttgacattgtcgaaccatcatggccaaggcatgctaggtttgccaggtctgagaacacgtcggggatgaaggcatgcaccaatgttgttagtaccagacgtactaggtagagggctccaaccatgcgtcaacgtctgaaggaactagcagagaaggcctccacgatgattgcgatgcacagaagaatggcgaggaagaaggtatcgatgccgcccgcggttgttggagtggactaagtagacgaggacgagaggatggcattgcagatgaggttgtgctggacaaagtcgaagtatttgggtgacatatcgaggctcctggagtgtcagggctggggcgagagagctgcaccgcacaagcaaagccgcgatggtgctggagtgtcacgacatcgttgctcaaagaaggcgatgaagagcgcgaatagtcggggtagaccatgtgctagaggcgcacaacgatgaagtcgacaatgatgtagggccaacaatgaggatgacaacgggcggtgatggtgcaaacccgatcaccaatcagttagaataaaaggactcacaacaacaacaaatttggctgcggatctagggcgataacagagcccgtgggcttgagcggcctctccacaatcgtcaccactgttagctgatatatcagacatgtgtttcctgccatatagacgcaggatcccctaccatacaagtgtaggcatacttgccttactagcactgccgcatataggaagctacagccgcatataggaagatatagatacaatcctcccatttagggggtagagatagttttcctccattcaaggagatctcagggtattgtttctataaacctgagatctcctacccctctgtccctctataaatatgtgcgcctgtactccctcttcatcaatcaatatagacaacaatcatattgctatcatggtatcacgagttgaagttcatatcctcctttcgctgccctaggcgcagtcctctagctgtgccgcctccctcctccctgcgcaccacgtcttggctgcgccctcgcctcccctctgcgcgccatccaggcagcgccctcccttgaccatggctggtctggaacaaccacctctcgacgactcaggctgctgccaggcgcgatgctgcactcgccaagcccttcaggcagagcaggaggcggccaccgcggcccgggagcgcgatgttgccgccgaatgtgttcgcactgctctcgagcgcgcagcacatgcacgcgccctcgctgcttagactgccgccgatggcagtcctgtcgacgacaatcagtcccacctctttgatccagcaggtggtgctgacaagggcctccacgacgccatcctccttcatgaggctgctgcgatcgtcaacctccactcccatgccgtcgctgtgcaaaacatccggagtctcgttcacgttgtcctcgacctcgccaacaacaactacacccgctggcgtgatgagttccttctcgtcactagcaaatactccctggacagccacatcctcgacgacactcccgcgcctcacttccccgactgggcacgcatggactgcgttgtcaagtccttgatctccggctccatctccccggaccttgctgaaatggccatggaacgcggcgccactgcctgcaccacttggcggactccgggaatcgggaaacccacgccctccacctcgacgctcagttccggcacttcgtccaaggtgatctacctatctccgattattgtcgccgtttcagaaccatggcagatgccctcggtgatcttggcgaaccagtcttcgaccggac

SEQ ID NO: 16340 - DNA, 384 bp, Zea Mays
cttgaagatcttttgaaattcagtcggtgcttcctcatctctttgcgcaccccagagctcacacacaccagccgaattgcgttagcaactccgagagcaacatcttctccatcgccattctcggcgccgccgtggtgagcgtctccgtggccaggtcgactaggtgagctcgtcggaaccgttcctcgccgccaaagcaccccaccataggccgccgcaacgtggacaaccaactcgggccttcctccggccgtccccgtcactgttcctggttctaggtgagctagtgaagcttgccctacccccaattttaactctaccgctataagaattataaaagaattgatctcctcatgtgatttactatccatttcttgagacttg

SEQ ID NO: 16341 - DNA, 2786 bp, Zea Mays
gttttttgctctttgttgtcaacatggatcattgatatgatcatgtttctcgtgttttatctttcagttgctgatgcaaggctttcaaaagtttaacagtctcacttgatgcaaaagcaacacaatcactctaaaggtttggatcagtcatttcagagcatgggttcgcggtttccatcccatcagctaagcaatggcttgtatgtctctggccgacctgagcaacctaaagagaaggccccagtcatttgctcctcggctatgccgtacactggcggggacataaagaaatctggagaacttggaaagatgtttgatctccatagaaaatctggtccattgggtaatccgccttcaaggaatacttcctttggtggtgctgccgccaactctggaccagtttccaatgctgtcggtcgctccaactactctggttctatttcgtctgcagttcctggcactggaggatcttctaggacaaaatctaactctggacctctcaacaagcatggagaaccaacaaagaggctatctggcccccaatcttctggagtaaacccgatggcccgtcagaactctggccctctacctcctgtacttcctacaactgggctaattacatcaggtcctatcacatctggtcagttgaattcgtctggtgctcaaaggaaagtatcaggccctcttgattctagtgtatcaatgaagatgcgtgttacctcttttgcacacaacccagccgtcacaaatatcaatgtgggagatggttactcgattaggggcagcattccgaccacaataatctggttggtcgcgttgctctttttggttgggtttgtagctggtggcttcattctcgctgccattcataatccgatcttgcttatagttgtggtggtgatatttggctttgttgctacactggtgatctggaacatctgctggggaagaagaggtgtgattggttttatcagtcgctatcctgatgcagaccttagaaccacaaaagatggggagtatgtgaaggttactggggttgttacttgtggaaatttgccccttgagtcctcgttccaacgggtgccgcgatgtgtgtacacttcaacttgcttgtatgagtacaggggttgggattcgaaagctgctaactccacacatcaccgatttacctggggtctcaggtcaatggagcgtcatgcagtggacttctacatctccgatttccagtctgggctgagagcgttggtcaggacagggtccggtgcacgagtatccccatatgtggacgagtctgttgttatcgacataaacccagacaacaaggacatgtcgcctgagttcctgaggtggctccgcggaaggaatctctcgagcgatgaccggattatgcgcctcaaagaagggtatatcaaggagggcagcaccgtgagcgtgatgggtgttgttcaaaggaatgagaacgtgctgatgatcgttcctccggctgaacccatctccactggctgccaatgggccaaatgcatcctcccgaccagcctcgacggtctggtcctgagatgcgaggacacgtctgacctggatgtggtaccagtctagttggttccggcgcggaggaggagaaaaagatgccttgactcgatttgagttggtttctgtgggttgttagtgttggagggaaaaaaatgtgcaaatgcagggtgtgattatgggctaagtaaagttacaatgtcagtggtcggtcagctacctggagattggtcgtacagtatgtcatgtgtaatttttgtcgtctcgttttggttgagccatgggtggtgcttgtaacaaaaggatggcttggtgtcagtactacctaccctaccatggagcctgtttggagattcagtggtctggtttcccattcatattttgttcttttttcttttggcgtagggttccgacaatgccctggaagcctgcagtttccttctgtacccagatctacatggaaatcgcttacctaaacttgagaggcatatttccggtggtgagaaaccaatgtaaaaaaaagttgattccaattcgtgttgacgcgtttccgaagcttaccggaggacaaaatctattgccgtgggtcgttgagatgctcagagtcacatgatattccaagttttacagcgtacatgcatgcacgaccatcaatcacatccataccgaccggccggtgtgccgcactgtcaacgttaggtcagtggttagcaacacacaagcaggctgcattgcatttgcattaccgttggacttggacaggaattagggaacaaccgggggttgccgcccaggaaccttattagctggtagcatggtcctgtctgtcacaatcttgtgccttcgtagcatcactcatctaccaaccacaacttagaagacaagtctggatggatctagcaaacgacacggatatgacacaactgctgctagcggagcgtgccaagttgctgaaatgaaaatcttgcaccaacatcaacaagctacgcgatcttcaaaactttgtcgcatgtatcatgaaagcaacaacgagagttgaggaatcatttaggtcaggtccgcgcttcttgtttttctatggtttcttggataaacccctaccaaatgcaagcacgtaaagaagccgtttttcttagggcatgttgggtatatctctgttgtacactatagcagctctaaaactttagattggagcaactatgttgttgagttttagtgacatttaggtaaaataaatggttcgtagcttttagaacaaa

SEQ ID NO: 16342 - DNA, 3128 bp, Zea Mays
ctttatcgaaatgttgcggctaactccatactcgttgctcaaacctgaaatggtgctgccaaagcaacatgtttacctcaatgagtgtttgccgtgtctacttgtgtctatatttctgtttgggctatattttgtaccatggaataagttttgcagttcaggcgcataatgttggctaacacacatgggcgcaccgcttttcctattgttagcctagttaaccccacctaacttagccgcacagtgtttaggccaaagcagcatagcttatttaagataacccagcttgtggaaacccagaggcagctaaatgcagaagatttctgcaagagaatcttcaatttacctgcacacaaacagaagtgctactctgctaatactaagttttttgctctttgttgtcaacatgttgctgatgcaaggctttcaaaagtttaacagtctcacttgatgcaaaagcaacacaatcactctaaaggtttggatcagtcatttcagagcatgggttcgcggtttccatcccatcagctaagcaatggcttgtatgtctctggccgacctgagcaacctaaagagaaggccccagtcatttgctcctcggctatgccgtacactggcggggacataaagaaatctggagaacttggaaagatgtttgatctccatagaaaatctggtccattgggtaatccgccttcaaggaatacttcctttggtggtgctgccgccaactctggaccagtttccaatgctgtcggtcgctccaactactctggttctatttcgtctgcagttcctggcactggaggatcttctaggacaaaatctaactctggacctctcaacaagcatggagaaccaacaaagaggctatctggcccccaatcttctggagtaaacccgatggcccgtcagaactctggccctctacctcctgtacttcctacaactgggctaattacatcaggtcctatcacatctggtcagttgaattcgtctggtgctcaaaggaaagtatcaggccctcttgattctagtgtatcaatgaagatgcgtgttacctcttttgcacacaacccagccgtcacaaatatcaatgtgggagatggttactcgattaggggcagcattccgaccacaataatctggttggtcgcgttgctctttttggttgggtttgtagctggtggcttcattctcgctgccattcataatccgatcttgcttatagttgtggtggtgatatttggctttgttgctacactggtgatctggaacatctgctggggaagaagaggtgtgattggttttatcagtcgctatcctgatgcagaccttagaaccacaaaagatggggagtatgtgaaggttactggggttgttacttgtggaaatttgccccttgagtcctcgttccaacgggtgccgcgatgtgtgtacacttcaacttgcttgtatgagtacaggggttgggattcgaaagctgctaactccacacatcaccgatttacctggggtctcaggtcaatggagcgtcatgcagtggacttctacatctccgatttccagtctgggctgagagcgttggtcaggacagggtccggtgcacgagtatccccatatgtggacgagtctgttgttatcgacataaacccagacaacaaggacatgtcgcctgagttcctgaggtggctccgcggaaggaatctctcgagcgatgaccggattatgcgcctcaaagaagggtatatcaaggagggcagcaccgtgagcgtgatgggtgttgttcaaaggaatgagaacgtgctgatgatcgttcctccggctgaacccatctccactggctgccaatgggccaaatgcatcctcccgaccagcctcgacggtctggtcctgagatgcgaggacacgtctgacctggatgtggtaccagtctagttggttccggcgcggaggaggagaaaaagatgccttgactcgatttgagttggtttctgtgggttgttagtgttggagggaaaaaaatgtgcaaatgcagggtgtgattatgggctaagtaaagttacaatgtcagtggtcggtcagctacctggagattggtcgtacagtatgtcatgtgtaatttttgtcgtctcgttttggttgagccatgggtggtgcttgtaacaaaaggatggcttggtgtcagtactacctaccctaccatggagcctgtttggagattcagtggtctggtttcccattcatattttgttcttttttcttttggcgtagggttccgacaatgccctggaagcctgcagtttccttctgtacccagatctacatggaaatcgcttacctaaacttgagaggcatatttccggtggtgagaaaccaatgtaaaaaaaagttgattccaattcgtgttgacgcgtttccgaagcttaccggaggacaaaatctattgccgtgggtcgttgagatgctcagagtcacatgatattccaagttttacagcgtacatgcatgcacgaccatcaatcacatccataccgaccggccggtgtgccgcactgtcaacgttaggtcagtggttagcaacacacaagcaggctgcattgcatttgcattaccgttggacttggacaggaattagggaacaaccgggggttgccgcccaggaaccttattagctggtagcatggtcctgtctgtcacaatcttgtgccttcgtagcatcactcatctaccaaccacaacttagaagacaagtctggatggatctagcaaacgacacggatatgacacaactgctgctagcggagcgtgccaagttgctgaaatgaaaatcttgcaccaacatcaacaagctacgcgatcttcaaaactttgtcgcatgtatcatgaaagcaacaacgagagttgaggaatcatttaggtcaggtccgcgcttcttgtttttctatggtttcttggataaacccctaccaaatgcaagcacgtaaagaagccgtttttcttagggcatgttgggtatatctctgttgtacactatagcagctctaaaactttagattggagcaactatgttgttgagttttagtgacatttaggtaaaataaatggttcgtagcttttagaacaaa

SEQ ID NO: 16343 - DNA, 2797 bp, Zea Mays
aagctatactcgtgatctgatggtgtcggtggcgtggtggttgtttaatccactgcccatagtggtcgaaatcatttgttgctgatgcaaggctttcaaaagtttaacagtctcacttgatgcaaaagcaacacaatcactctaaaggtttggatcagtcatttcagagcatgggttcgcggtttccatcccatcagctaagcaatggcttgtatgtctctggccgacctgagcaacctaaagagaaggccccagtcatttgctcctcggctatgccgtacactggcggggacataaagaaatctggagaacttggaaagatgtttgatctccatagaaaatctggtccattgggtaatccgccttcaaggaatacttcctttggtggtgctgccgccaactctggaccagtttccaatgctgtcggtcgctccaactactctggttctatttcgtctgcagttcctggcactggaggatcttctaggacaaaatctaactctggacctctcaacaagcatggagaaccaacaaagaggctatctggcccccaatcttctggagtaaacccgatggcccgtcagaactctggccctctacctcctgtacttcctacaactgggctaattacatcaggtcctatcacatctggtcagttgaattcgtctggtgctcaaaggaaagtatcaggccctcttgattctagtgtatcaatgaagatgcgtgttacctcttttgcacacaacccagccgtcacaaatatcaatgtgggagatggttactcgattaggggcagcattccgaccacaataatctggttggtcgcgttgctctttttggttgggtttgtagctggtggcttcattctcgctgccattcataatccgatcttgcttatagttgtggtggtgatatttggctttgttgctacactggtgatctggaacatctgctggggaagaagaggtgtgattggttttatcagtcgctatcctgatgcagaccttagaaccacaaaagatggggagtatgtgaaggttactggggttgttacttgtggaaatttgccccttgagtcctcgttccaacgggtgccgcgatgtgtgtacacttcaacttgcttgtatgagtacaggggttgggattcgaaagctgctaactccacacatcaccgatttacctggggtctcaggtcaatggagcgtcatgcagtggacttctacatctccgatttccagtctgggctgagagcgttggtcaggacagggtccggtgcacgagtatccccatatgtggacgagtctgttgttatcgacataaacccagacaacaaggacatgtcgcctgagttcctgaggtggctccgcggaaggaatctctcgagcgatgaccggattatgcgcctcaaagaagggtatatcaaggagggcagcaccgtgagcgtgatgggtgttgttcaaaggaatgagaacgtgctgatgatcgttcctccggctgaacccatctccactggctgccaatgggccaaatgcatcctcccgaccagcctcgacggtctggtcctgagatgcgaggacacgtctgacctggatgtggtaccagtctagttggttccggcgcggaggaggagaaaaagatgccttgactcgatttgagttggtttctgtgggttgttagtgttggagggaaaaaaatgtgcaaatgcagggtgtgattatgggctaagtaaagttacaatgtcagtggtcggtcagctacctggagattggtcgtacagtatgtcatgtgtaatttttgtcgtctcgttttggttgagccatgggtggtgcttgtaacaaaaggatggcttggtgtcagtactacctaccctaccatggagcctgtttggagattcagtggtctggtttcccattcatattttgttcttttttcttttggcgtagggttccgacaatgccctggaagcctgcagtttccttctgtacccagatctacatggaaatcgcttacctaaacttgagaggcatatttccggtggtgagaaaccaatgtaaaaaaaagttgattccaattcgtgttgacgcgtttccgaagcttaccggaggacaaaatctattgccgtgggtcgttgagatgctcagagtcacatgatattccaagttttacagcgtacatgcatgcacgaccatcaatcacatccataccgaccggccggtgtgccgcactgtcaacgttaggtcagtggttagcaacacacaagcaggctgcattgcatttgcattaccgttggacttggacaggaattagggaacaaccgggggttgccgcccaggaaccttattagctggtagcatggtcctgtctgtcacaatcttgtgccttcgtagcatcactcatctaccaaccacaacttagaagacaagtctggatggatctagcaaacgacacggatatgacacaactgctgctagcggagcgtgccaagttgctgaaatgaaaatcttgcaccaacatcaacaagctacgcgatcttcaaaactttgtcgcatgtatcatgaaagcaacaacgagagttgaggaatcatttaggtcaggtccgcgcttcttgtttttctatggtttcttggataaacccctaccaaatgcaagcacgtaaagaagccgtttttcttagggcatgttgggtatatctctgttgtacactatagcagctctaaaactttagattggagcaactatgttgttgagttttagtgacatttaggtaaaataaatggttcgtagcttttagaacaaa

SEQ ID NO: 16344 - DNA, 2770 bp, Zea Mays
ttagctccaggctgatgctgaatcatagtgaaatcgggctttgtgcaagtgttgctgatgcaaggctttcaaaagtttaacagtctcacttgatgcaaaagcaacacaatcactctaaaggtttggatcagtcatttcagagcatgggttcgcggtttccatcccatcagctaagcaatggcttgtatgtctctggccgacctgagcaacctaaagagaaggccccagtcatttgctcctcggctatgccgtacactggcggggacataaagaaatctggagaacttggaaagatgtttgatctccatagaaaatctggtccattgggtaatccgccttcaaggaatacttcctttggtggtgctgccgccaactctggaccagtttccaatgctgtcggtcgctccaactactctggttctatttcgtctgcagttcctggcactggaggatcttctaggacaaaatctaactctggacctctcaacaagcatggagaaccaacaaagaggctatctggcccccaatcttctggagtaaacccgatggcccgtcagaactctggccctctacctcctgtacttcctacaactgggctaattacatcaggtcctatcacatctggtcagttgaattcgtctggtgctcaaaggaaagtatcaggccctcttgattctagtgtatcaatgaagatgcgtgttacctcttttgcacacaacccagccgtcacaaatatcaatgtgggagatggttactcgattaggggcagcattccgaccacaataatctggttggtcgcgttgctctttttggttgggtttgtagctggtggcttcattctcgctgccattcataatccgatcttgcttatagttgtggtggtgatatttggctttgttgctacactggtgatctggaacatctgctggggaagaagaggtgtgattggttttatcagtcgctatcctgatgcagaccttagaaccacaaaagatggggagtatgtgaaggttactggggttgttacttgtggaaatttgccccttgagtcctcgttccaacgggtgccgcgatgtgtgtacacttcaacttgcttgtatgagtacaggggttgggattcgaaagctgctaactccacacatcaccgatttacctggggtctcaggtcaatggagcgtcatgcagtggacttctacatctccgatttccagtctgggctgagagcgttggtcaggacagggtccggtgcacgagtatccccatatgtggacgagtctgttgttatcgacataaacccagacaacaaggacatgtcgcctgagttcctgaggtggctccgcggaaggaatctctcgagcgatgaccggattatgcgcctcaaagaagggtatatcaaggagggcagcaccgtgagcgtgatgggtgttgttcaaaggaatgagaacgtgctgatgatcgttcctccggctgaacccatctccactggctgccaatgggccaaatgcatcctcccgaccagcctcgacggtctggtcctgagatgcgaggacacgtctgacctggatgtggtaccagtctagttggttccggcgcggaggaggagaaaaagatgccttgactcgatttgagttggtttctgtgggttgttagtgttggagggaaaaaaatgtgcaaatgcagggtgtgattatgggctaagtaaagttacaatgtcagtggtcggtcagctacctggagattggtcgtacagtatgtcatgtgtaatttttgtcgtctcgttttggttgagccatgggtggtgcttgtaacaaaaggatggcttggtgtcagtactacctaccctaccatggagcctgtttggagattcagtggtctggtttcccattcatattttgttcttttttcttttggcgtagggttccgacaatgccctggaagcctgcagtttccttctgtacccagatctacatggaaatcgcttacctaaacttgagaggcatatttccggtggtgagaaaccaatgtaaaaaaaagttgattccaattcgtgttgacgcgtttccgaagcttaccggaggacaaaatctattgccgtgggtcgttgagatgctcagagtcacatgatattccaagttttacagcgtacatgcatgcacgaccatcaatcacatccataccgaccggccggtgtgccgcactgtcaacgttaggtcagtggttagcaacacacaagcaggctgcattgcatttgcattaccgttggacttggacaggaattagggaacaaccgggggttgccgcccaggaaccttattagctggtagcatggtcctgtctgtcacaatcttgtgccttcgtagcatcactcatctaccaaccacaacttagaagacaagtctggatggatctagcaaacgacacggatatgacacaactgctgctagcggagcgtgccaagttgctgaaatgaaaatcttgcaccaacatcaacaagctacgcgatcttcaaaactttgtcgcatgtatcatgaaagcaacaacgagagttgaggaatcatttaggtcaggtccgcgcttcttgtttttctatggtttcttggataaacccctaccaaatgcaagcacgtaaagaagccgtttttcttagggcatgttgggtatatctctgttgtacactatagcagctctaaaactttagattggagcaactatgttgttgagttttagtgacatttaggtaaaataaatggttcgtagcttttagaacaaa

SEQ ID NO: 16345 - DNA, 3049 bp, Zea Mays
gatttttttaattgaaaaatccttaacttagtatgcgggggaaccaccggtagcaagcccttccggtcctgcattttgttgtcccctctccgtagcggagacgttcgttcacttcctctctctcgcctcccgtttgccccgcgtgcgctctgtgtcgctccctctcttgtgaggagtgaggacgactggggcgaccgccgccgccgccgccgccctacgccagatgcccaggtaggggccattcgctagctcttcttcgtgcccttcgccggcgacgagcattcaccaggatcattgatatgatcatgtttctcgtgttttatctttcagttgctgatgcaaggctttcaaaagtttaacagtctcacttgatgcaaaagcaacacaatcactctaaaggtttggatcagtcatttcagagcatgggttcgcggtttccatcccatcagctaagcaatggcttgtatgtctctggccgacctgagcaacctaaagagaaggccccagtcatttgctcctcggctatgccgtacactggcggggacataaagaaatctggagaacttggaaagatgtttgatctccatagaaaatctggtccattgggtaatccgccttcaaggaatacttcctttggtggtgctgccgccaactctggaccagtttccaatgctgtcggtcgctccaactactctggttctatttcgtctgcagttcctggcactggaggatcttctaggacaaaatctaactctggacctctcaacaagcatggagaaccaacaaagaggctatctggcccccaatcttctggagtaaacccgatggcccgtcagaactctggccctctacctcctgtacttcctacaactgggctaattacatcaggtcctatcacatctggtcagttgaattcgtctggtgctcaaaggaaagtatcaggccctcttgattctagtgtatcaatgaagatgcgtgttacctcttttgcacacaacccagccgtcacaaatatcaatgtgggagatggttactcgattaggggcagcattccgaccacaataatctggttggtcgcgttgctctttttggttgggtttgtagctggtggcttcattctcgctgccattcataatccgatcttgcttatagttgtggtggtgatatttggctttgttgctacactggtgatctggaacatctgctggggaagaagaggtgtgattggttttatcagtcgctatcctgatgcagaccttagaaccacaaaagatggggagtatgtgaaggttactggggttgttacttgtggaaatttgccccttgagtcctcgttccaacgggtgccgcgatgtgtgtacacttcaacttgcttgtatgagtacaggggttgggattcgaaagctgctaactccacacatcaccgatttacctggggtctcaggtcaatggagcgtcatgcagtggacttctacatctccgatttccagtctgggctgagagcgttggtcaggacagggtccggtgcacgagtatccccatatgtggacgagtctgttgttatcgacataaacccagacaacaaggacatgtcgcctgagttcctgaggtggctccgcggaaggaatctctcgagcgatgaccggattatgcgcctcaaagaagggtatatcaaggagggcagcaccgtgagcgtgatgggtgttgttcaaaggaatgagaacgtgctgatgatcgttcctccggctgaacccatctccactggctgccaatgggccaaatgcatcctcccgaccagcctcgacggtctggtcctgagatgcgaggacacgtctgacctggatgtggtaccagtctagttggttccggcgcggaggaggagaaaaagatgccttgactcgatttgagttggtttctgtgggttgttagtgttggagggaaaaaaatgtgcaaatgcagggtgtgattatgggctaagtaaagttacaatgtcagtggtcggtcagctacctggagattggtcgtacagtatgtcatgtgtaatttttgtcgtctcgttttggttgagccatgggtggtgcttgtaacaaaaggatggcttggtgtcagtactacctaccctaccatggagcctgtttggagattcagtggtctggtttcccattcatattttgttcttttttcttttggcgtagggttccgacaatgccctggaagcctgcagtttccttctgtacccagatctacatggaaatcgcttacctaaacttgagaggcatatttccggtggtgagaaaccaatgtaaaaaaaagttgattccaattcgtgttgacgcgtttccgaagcttaccggaggacaaaatctattgccgtgggtcgttgagatgctcagagtcacatgatattccaagttttacagcgtacatgcatgcacgaccatcaatcacatccataccgaccggccggtgtgccgcactgtcaacgttaggtcagtggttagcaacacacaagcaggctgcattgcatttgcattaccgttggacttggacaggaattagggaacaaccgggggttgccgcccaggaaccttattagctggtagcatggtcctgtctgtcacaatcttgtgccttcgtagcatcactcatctaccaaccacaacttagaagacaagtctggatggatctagcaaacgacacggatatgacacaactgctgctagcggagcgtgccaagttgctgaaatgaaaatcttgcaccaacatcaacaagctacgcgatcttcaaaactttgtcgcatgtatcatgaaagcaacaacgagagttgaggaatcatttaggtcaggtccgcgcttcttgtttttctatggtttcttggataaacccctaccaaatgcaagcacgtaaagaagccgtttttcttagggcatgttgggtatatctctgttgtacactatagcagctctaaaactttagattggagcaactatgttgttgagttttagtgacatttaggtaaaataaatggttcgtagcttttagaacaaa

SEQ ID NO: 16346 - DNA, 2039 bp, Zea Mays
ttccaagtgcccatgatttccaaatacattcccaaggccgaaattgaatcgatccttgcaagaaaccctcataggcagatttggccaagtgggtcccagagataaagatattcagcaagcaccctactgaaaccacaccctgaatatcctctccaagaaaggtcaccatcttgatgatacttgggtggcttatgctggaagtggagctggaaataggccgccccctatacttagctggcagcaattagcatccggcactccaggtggtcgtttcagtcattcttgccttctagttggtgacacattagtcttgtttggtggaatcacagatcagggacagcgtttgaatgatacatggactggtcaaatcatctgtgaagagcctcgaaggccacggatctcatggagattgctggaggtaggtcggcttgcaccacctccacgtggagctcatgcagcctgctgtgtggatgacaagtttattgtcattcatggtgggatagggctctatggaagccggcttggtgatacatggcttcttgatctctcaaatggccttcagtctggcagctggcaccaaataggcaacacatggcctttgcctcaacctcgttctggccactctttaacttggattggcagcacatgcatggtattatttggtggtagaggatcggaatttgaggttcttaatgatgtctggctgtttgatatcagtgatcaataccccaaatggaaggagctaaagtatggcttgtctagtgctcttggtgagcttccttttccacgggttgggcattcagcgatacttgtgttgggtggcaaggtccttgtgtatggcggggaggactcacaaaggcgacgaaaggatgacttttggatcttggatacaccagctctacttcaatacgagtcaggttccaagaaaatgaccagaaagatgtggaagaaactaagaattgatggtcagtgcccaaactaccgatccttccatggggcatgtgtagatgcttctggttgctgtgtgtatatttttggtggaatggttgatggccttgtacacccttcagaagccttgggcatgaggtttgatgggcatctgtatcaagtggagctcgtgctacatctttaggacgtgtttgttcccttgtatatccgagaaattccataggtttgatgtttagcgtctggtgtagtaccatgtcacccaggttttcaacattgtaaggatactccagatggtgcctaacggtcgtttgcgcatggatgcttgcgcacagctgtcgctgatctgtgaaaggaacagtgacccttgtaattttggcctgatgtgtctgcatatggccatatgggtttgaattgtcattcctttgtcagattcatatgttccaaagaatgtccgtcaataccatctggagcagatggttgttttgctacctgatgagccatcatatagtcatgggaagagagagaaagatattcttttccacaataatccaatgcgcgaggattgctcgggaccatatggagctgctattggatctttgcatcccagtcacaggttagctcaatgcaggagaggaccatgtcccattcaacccttgggttcacatgcacagaacctgttatttgtatttatctaatgatggtgcatgagtcatattggcatcaccaagcatcagaatttcttccaaagatgaatgctggtttgatctttggtccaccagcactcgatagtcatgtcttgcgcgcattaattctgcgataacaggaccgatgattgcttggattatttcagattatggaccatttgcagtatgattgctcgagagaaatctggagctcctgttcagatccactttgtgacagcaaggcatgcttcagcatgaagatccatgtatgatacctctgaaaggtttacttaggcctagactcagtttgtctctgattctgtacattcttgatagattatatttgctcaagatgttgtttcagtgcagcattcaactgcaaattttattgctggatgaatcgctatc

SEQ ID NO: 16347 - DNA, 2145 bp, Zea Mays
atcgattatgaagcttgtatggttttgttagttatgacgggcttgcaagttgtttagagagccttctaatatctcatgtatcctgactgtaacataccatggtatgtgctggtaatgtagcacatcggacataacttcaggaagacttacatcatgattgtaggaggaaatccttggaaatttaggatttcatttcaagttcgaatgaaattctatggaccaaatccaaatggttcattagctggaattattttcatgcaaatcaaggtcaccatcttgatgatacttgggtggcttatgctggaagtggagctggaaataggccgccccctatacttagctggcagcaattagcatccggcactccaggtggtcgtttcagtcattcttgccttctagttggtgacacattagtcttgtttggtggaatcacagatcagggacagcgtttgaatgatacatggactggtcaaatcatctgtgaagagcctcgaaggccacggatctcatggagattgctggaggtaggtcggcttgcaccacctccacgtggagctcatgcagcctgctgtgtggatgacaagtttattgtcattcatggtgggatagggctctatggaagccggcttggtgatacatggcttcttgatctctcaaatggccttcagtctggcagctggcaccaaataggcaacacatggcctttgcctcaacctcgttctggccactctttaacttggattggcagcacatgcatggtattatttggtggtagaggatcggaatttgaggttcttaatgatgtctggctgtttgatatcagtgatcaataccccaaatggaaggagctaaagtatggcttgtctagtgctcttggtgagcttccttttccacgggttgggcattcagcgatacttgtgttgggtggcaaggtccttgtgtatggcggggaggactcacaaaggcgacgaaaggatgacttttggatcttggatacaccagctctacttcaatacgagtcaggttccaagaaaatgaccagaaagatgtggaagaaactaagaattgatggtcagtgcccaaactaccgatccttccatggggcatgtgtagatgcttctggttgctgtgtgtatatttttggtggaatggttgatggccttgtacacccttcagaagccttgggcatgaggtttgatgggcatctgtatcaagtggagctcgtgctacatctttaggacgtgtttgttcccttgtatatccgagaaattccataggtttgatgtttagcgtctggtgtagtaccatgtcacccaggttttcaacattgtaaggatactccagatggtgcctaacggtcgtttgcgcatggatgcttgcgcacagctgtcgctgatctgtgaaaggaacagtgacccttgtaattttggcctgatgtgtctgcatatggccatatgggtttgaattgtcattcctttgtcagattcatatgttccaaagaatgtccgtcaataccatctggagcagatggttgttttgctacctgatgagccatcatatagtcatgggaagagagagaaagatattcttttccacaataatccaatgcgcgaggattgctcgggaccatatggagctgctattggatctttgcatcccagtcacaggttagctcaatgcaggagaggaccatgtcccattcaacccttgggttcacatgcacagaacctgttatttgtatttatctaatgatggtgcatgagtcatattggcatcaccaagcatcagaatttcttccaaagatgaatgctggtttgatctttggtccaccagcactcgatagtcatgtcttgcgcgcattaattctgcgataacaggaccgatgattgcttggattatttcagattatggaccatttgcagtatgattgctcgagagaaatctggagctcctgttcagatccactttgtgacagcaaggcatgcttcagcatgaagatccatgtatgatacctctgaaaggtttacttaggcctagactcagtttgtctctgattctgtacattcttgatagattatatttgctcaagatgttgtttcagtgcagcattcaactgcaaattttattgctggatgaatcgctatc

SEQ ID NO: 16348 - DNA, 975 bp, Zea Mays
aagcaacgcgcaggtgctaaaactcgtgtactgttgatggatgatgactgttcccatggatagtgctagcgcagccccatcctccgcgcgggaccttgccatggatagtgctagcactagcatgaagcactttcagttttataattgaaaaaaacacttgcatttgttgctgcttaatatctcttttacaattacattattttttatctgtctatttgtaaacacagagaccagcacatgccttgtcaacaattgatggctacagcggttgtggagctgatcaaggtgaaaagcatttacaaaactacactcaaatccaagagttcaataaatgaggtgaatcaggttgctcagctgaggatcatcataaaaccaaaatcctgcaatggtgttgggctattgtgcactgcacaacagattgagactgaaaagctgctagcccagttagttgagactaagatgaacatacgtttggatatggcatgtgcatttttgtataaaaaggtgcaatggattacagagaccccactgactgggccaaactcaatcattggtagagctgttgttgttcacgctgctcctgatgatcttgtaaaggagcagctctttttaaagttcccctccaagccgacaccccatccaccatcatcatcggcgcatcgtgccttgttcgctgcttgtgatgatcaccgttctcttcaatcgcttcgacgacggtttatttcagaaaggaaaacaactgagataaatcaagttgctactcaagaaaatgaaatcagtcagaatggtagacctacatctaaaacatgctcagcattaccagaacctattctagcttactggagtgtgaactcagaccatgttcatagggaggctgttggaacaacatcactgagggatggacggttcgaggatcccgtgtctgtggcagaagaggccacgttctgcaatgttgcactgaacataaccatctag

SEQ ID NO: 16349 - DNA, 1238 bp, Zea Mays
cccacgcatcaacaaaacgtgtggcccgccctctcccgtgggccgcggcccgtgcccaaaagcagggcatccagcagtataaagccggcgccacatcctgtgcttggccgcagcaccagttgcttcacggcttcatcatcactccactagccagtcagctactggcctacagctagccgcctcctctcctctcatcccatcccatctcatctccgacaagcgaagcagagcactggcatgagcatggaccgcatggcgcggcgttccgtgtccttgctcctcgctctggctctcctggccgccgcggcgtcggcggactcgtggctgtacgagaagttcacgacggagggcaacgtgcgcgcggactacaacgcgcaggggcagcaggtgacgtctctgatcctgacgcagcagtccggcggcgccttcagctcgcggcagaagtacctgtacggggagttcagcatccagatgaggctgatcccgggcaactccgcgggcaccgtgacctccttctacctgtcgtcgggcgacgggcccgggcacgacgagatcgacatggagttcatgggcaacgccagcgggcagcccgtggtgctgaacaccaacgtgtgggccaacggcgacggcaagaaggagcaccagttctacctgtggttcgacccggccgccgacttccacacctacaccatcatctggaacgacaagaacgtcatcttcaaggtggacgacctcttcgtgcggtgcttcaagcggtacccggacctggcgtacccgggcgggaagcccatgtcggtgcacgccacgctgtgggacggcagctactgggccacgcagcaggggaaggtgaaggtggactggtccgccgcgcccttcgccgtctcctaccgcggctactccgccgacgcctgcgtgcccgacggcgacggccgcccgctctcctgccccgccggcaccgaccgctggatgagccgccagctcgacgccgccgagtggggcaccgtcgcctgggccaggcagaactacatgcactacaactactgcgacgacggctggcgcttcccgcagggcttccccgccgagtgctcccgcaactgattcattggtttgtttgttatccccgatccgttcgcgcggtcgccgtccgtcccacacagtgccctgccctgcccccccgacgatttcttgcttcctgttcctcatctaattaatcatcaatggtgtttgttcgtcaagaa

SEQ ID NO: 16350 - DNA, 1255 bp, Zea Mays
cttggcatcagctatgttaaggagaatcaattgatggtcaacatggggattagtccgaggcggagtgctccgtcgacctcaagctcggcgggctaggcgagatcggggcggcggacggcacaaccacgaaggagccggtggctgcaaccgcagctccgtccgccaccccgatgaagcgcccgcgcttgcggcccggcggcgccggcggggcgcagtgcccgtcgtgcgcggtggacggctgcaaggccgacctgagcaagtgccgcgactaccaccgccgccacaaggtctgtgagacgcactccaagacgcccatcgttgtcgtcaccggccgcgagatgcgcttctgccagcagtgcagcagggttctatattcataagcatgttgttgcaccacacaacctttttgttttatatgttgtcatctgatctctggtgaaaaggagggagatgagctacggaggaaatctgatgttatggaattctaagaaaagtctagatttccacaggtccagtggtgccactgatgtcaagtcagcagaaacgattcttgagcatgagtatgcgtcgatgctctttttccctgaggcaatgctactcctatgcacagtgatgtagtagcaacggagaactgtcattaattggatacttcttatcctaattgcagtcgtatcatttagcttggggtttgaattatcggattgccctaccatactgcttagctaaagcccttgtcaaaatgcataattagaagcaactattaaagaaagatcagcttcagatagagtgaagacgcgagtgcattttccagggatggaaagaaggcatgatttattttcctccgacatataaatactcattcaactcggatcgttactctggtgtgcggcccaaataaaatcggaggacacatgcttggtgcgatcacattccgtggcctcttgcagtcgtcctacatccgcggagagtctcgcttctttgaccacggaccagtgtacaatcttttcatggctaaggttgggagtgtccaccacagaagatcgaacttaaccttgatcatgatctctagcgctgagggaacagtgatagattgatatgaggtttgtaggtgtaattatgtgtataataaccttttttttattttccttgcccctatggtgtagtacctgaaaagcaaaatgatgtatgtatttgttgttaaatacttttctaattctaacagtaagaaattaaggttgtgccgatgcacactgcc

SEQ ID NO: 16351 - DNA, 2061 bp, Zea Mays
ggaagacatatattagtactaacggaccaacgctggaaaggcggtgcagtgtctttacacactcgctcaactcggacggcttgtactgcgtgtagtgagcaagcgtggagttctacttccagatgtaacgagtgtcgtcagccaccaagacagcatcattctcatcaggcaacaactgctacacaaagaagatatgatgccaacctacccaaggatacttcgttggctggagtacaaatctcgccaagaaaatagctgaggcagcgattagtgatggagagtaagacagaagactgtactccagcagggatagctcagcgatgtaattggccaggaactccagatgcagagcaggatcctgtacaaacaaagagtaggggcattatcacagaatccctgcctgccacatatacatgtaattcctggcagcagtacctcatcacacgcctgcatccgtgtccaagactccaactatcatacgcctgcatcctgtacaaaaaaattgttggatacttgaatacttgaatccaagctgccaagttggatacttgaatccaagctgtattcttacacctgcaaaagactccaactatcattcttgtgtcaaaaaaattgttgaaccggacacccatgtccacatccaagcagcactggtttagcatccttgtcctctacaactccatttggacaacattcatttatgggatgatggttcgtttcattatgatcaagatttatttaacagcaaaattacagtatattgaatgaagttgatatcaagcggcgccaagaggatgacataaatagggtttcaactgttctttcaatttccaaaccagaggcatgtgtcttctccgcaactataactggagtgttagtaaggtgcatgacgaatggtttgctgatgaagagcgtgttcggaaggtggttggtttaccagagaagcatattgaaatgccaaatgacagagaagtattcccatgcttcattagtttcacttgttcttccagttgcctaagcatgtttgctctagagatagaatcacagctcctaattcgaatctataatcctagtatataagttataagttgtggtgatctgctggagatgaatacagtattatcatcctcaaacttgtttctttcaatatcctcaccccacttataggatgggtattggatgatggaaaaaagcccgtctgtatagtacatcagtaccacagtgcataaaatatagacacatgtattgcatttgtagacctgtagtcactcatattatttgacccatgcgtatttttagtggacaatcattaaattagcaacaatctatgtctggacaatcattcgtttatttcagaatatgcaccagggctatcccaaagaaacactggtgcatttccttaaggctagagagtggaatgtagcaaaggctcataaaatggtaacgtttcatacaagtttctcaacagtgggtgaagtgaccacgaatttgattaataatatgtttgtttctatagattgtagaatgtttgaattggaggattcaaaatgaaattgatagtgtgctggagaggcctatagccccagtagatttatacagatcaatatgtgattcacaacttattggcctgtcaggatacacaaaggaggctacaactacagccaaaatcataaaagtgtctggtttgaagctatcagcactaagccaaataaaggattccggctctcatcaagtgactccccctcacgttgactttgcggatgtctcaattctagtggtggagctacgaacaacaatccgatgtcctgatcgagagcgatggagttaatgtttgaacttgtgtgtttgaacttgtgaactaaaaatgtgaactatgtatgtgaacttgtgtgaatttgtgaacttatgtatttggacttatgtgaatttgtgaacttatatatttggacttgtgtgagtttgtgatatgaacatatatcaatgtgtttgaaatctgtattgtatgtgatatattgtgttgcatgtgatattatgtgtctaatttttcatttttgtattttt

SEQ ID NO: 16352 - DNA, 2345 bp, Zea Mays
ggaagacatatattagtactaacggaccaacgctggaaaggcggtgcagtgtctttacacactcgctcaactcggacggcttgtactgcgtgtagtgagcaagcgtggagttctacttccagatgtaacgagtgtcgtcagccaccaagacagcatcattctcatcaggcaacaactgctacacaaagaagatatgatgccaacctacccaaggatacttcgttggctggagtacaaatctcgccaagaaaatagctgaggcagcgattagtgatggagagtaagacagaagactgtactccagcagggatagctcagcgatgtaattggccaggaactccagatgcagagcaggatcctgtacaaacaaagagtaggggcattatcacagaatccctgcctgccacatatacatgtaattcctggcagcagtacctcatcacacgcctgcatccgtgtccaagactccaactatcatacgcctgcatcctgtacaaaaaaattgttggatacttgaatacttgaatccaagctgccaagttggatacttgaatccaagctgtattcttacacctgcaaaagactccaactatcattcttgtgtcaaaaaaattgttgaaccggacacccatgtccacatccaagcagcactggtttagcatccttgtcctctacaactccatttggacaacattcatttatgcaaaattacagtatattgaatgaagttgatatcaagcggcgccaagaggatgacataaatagggtttcaactgttctttcaatttccaaaccagaggcatgtgtcttctccgcaactataactggagtgttagtaaggtgcatgacgaatggtttgctgatgaagagcgtgttcggaaggtggttggtttaccagagaagcatattgaaatgccaaatgacagagaagtattcccatgcttcattagtttcacttgttcttccagttgcctaagcatgtttgctctagagatagaatcacagctcctaattcgaatctataatcctagtatataagttataagttgtggtgatctgctggagatgaatacagtattatcatcctcaaacttgtttctttcaatatcctcaccccacttataggatgggtattggatgatggaaaaaagcccgtctgtatagtacatcagtaccacagtgcataaaatatagacacatgtattgcatttgtagacctgtagtcactcatattatttgacccatgcgtatttttagtggacaatcattaaattagcaacaatctatgtctggacaatcattcgtttatttcagaatatgcaccagggctatcccaaagaaacactggtgcatttccttaaggctagagagtggaatgtagcaaaggctcataaaatggtaacgtttcatacaagtttctcaacagtgggtgaagtgaccacgaatttgattaataatatgtttgtttctatagattgtagaatgtttgaattggaggattcaaaatgaaattgatagtgtgctggaggtgagtcatcctgtctagaatttaatccttccagatattactgtatatgttaatcagaaagctaatgaaggttcccttaaagttctacgattctggtcttctcctaatcatttctcattttgattgtttattttattattgcagcaataccactctcaataatctgcctatttgtgtctgtttatatagcaaaattcattttctttttctgatcaatgtttgcactgtccatctgcagaggcctatagccccagtagatttatacagatcaatatgtgattcacaacttattggcctgtcaggatacacaaaggagggtctcccaatttttggcattggtgttgggcatagcacatatgacaaagcttcggtaattactctgatgcttgctatttgtttggtaggctacaactacagccaaaatcataaaagtgtctggtttgaagctatcagcactaagccaaataaaggattccggctctcatcaagtgactccccctcacgttgactttgcggatgtctcaattctagtggtggagctacgaacaacaatccgatgtcctgatcgagagcgatggagttaatgtttgaacttgtgtgtttgaacttgtgaactaaaaatgtgaactatgtatgtgaacttgtgtgaatttgtgaacttatgtatttggacttatgtgaatttgtgaacttatatatttggacttgtgtgagtttgtgatatgaacatatatcaatgtgtttgaaatctgtattgtatgtgatatattgtgttgcatgtgatattatgtgtctaatttttcatttttgtattttt

SEQ ID NO: 16353 - DNA, 3220 bp, Zea Mays
cacgctctcatcccctccacgccgccgccacccgacccgcgccgccggaccgcgtcgacgctccctcgccgctggggttaaggcgatcatcgatcgatcgagtttctgtgcacaatcgtggcgctgctgtacttcaccttcggcgaggtggacctctgccacatctcgctcccgtccttacccgtctccggctcgtcccccttccgcgcggctgccgtggcggcgcccttcgtggagcggcgcggggcttctttctattatctagcatgccctccgccacatcgagtttcagtgaagatttgttctcaagttgatctgtgcaatccagtaagtaaccgctgggcttctttctattgtctagcatgccgcatccctgaagaattcggcagggatttgtggcgggcactgtttcttcgcaacaaatttgtactggtgaggaaggaagacatatattagtactaacggaccaacgctggaaaggcggtgcagtgtctttacacactcgctcaactcggacggcttgtactgcgtgtagtgagcaagcgtggagttctacttccagatgtaacgagtgtcgtcagccaccaagacagcatcattctcatcaggcaacaactgctacacaaagaagatatgatgccaacctacccaaggatacttcgttggctggagtacaaatctcgccaagaaaatagctgaggcagcgattagtgatggagagtaagacagaagactgtactccagcagggatagctcagcgatgtaattggccaggaactccagatgcagagcaggatcctgtacaaacaaagagtaggggcattatcacagaatccctgcctgccacatatacatgtaattcctggcagcagtacctcatcacacgcctgcatccgtgtccaagactccaactatcatacgcctgcatcctgtacaaaaaaattgttggatacttgaatacttgaatccaagctgccaagttggatacttgaatccaagctgtattcttacacctgcaaaagactccaactatcattcttgtgtcaaaaaaattgttgaaccggacacccatgtccacatccaagcagcactggtttagcatccttgtcctctacaactccatttggacaacattcatttatggtaaattacaaattaatatggatgtgggtggacacagctgctatgtatttattttgttcagctatatttgtatataatattcatgtttcttgcatatttataccctgtgctgcactttaatttacttaggtacagataaccaaataaacatgatagatagggtcttcatgagtgcttgagattgacattgagttacgtagctattatttctttgtgtcagggatgatggttcgtttcattatgatcaagatttatttaacaggtagaactctaaacttgattagcttctatggcctatacttgtttccgtgtctccttcccaacactatcacttcctatcaatctcaattaatgttttaccctgtcttggcaattatgagaacatactgaaactgctgtgcttttcttgtaataatgcacaactctcttacatgtccaagaaaataaaacatgctgaaactgaaataactatataccctcatggactgctgttcttacacttgtttgcttatttgtggcccagcaaaattacagtatattgaatgaagttgatatcaagcggcgccaagaggatgacataaatagggtttcaactgttctttcaatttccaaaccagaggcatgtgtcttctccgcaactataactggagtgttagtaaggtgcatgacgaatggtttgctgatgaagagcgtgttcggaaggtggttggtttaccagagaagcatattgaaatgccaaatgacagagaagtattcccatgcttcattagtttcacttgttcttccagttgcctaagcatgtttgctctagagatagaatcacagctcctaattcgaatctataatcctagtatataagttataagttgtggtgatctgctggagatgaatacagtattatcatcctcaaacttgtttctttcaatatcctcaccccacttataggatgggtattggatgatggaaaaaagcccgtctgtatagtacatcagtaccacagtgcataaaatatagacacatgtattgcatttgtagacctgtagtcactcatattatttgacccatgcgtatttttagtggacaatcattaaattagcaacaatctatgtctggacaatcattcgtttatttcagaatatgcaccagggctatcccaaagaaacactggtgcatttccttaaggctagagagtggaatgtagcaaaggctcataaaatggtaacgtttcatacaagtttctcaacagtgggtgaagtgaccacgaatttgattaataatatgtttgtttctatagattgtagaatgtttgaattggaggattcaaaatgaaattgatagtgtgctggaggtgagtcatcctgtctagaatttaatccttccagatattactgtatatgttaatcagaaagctaatgaaggttcccttaaagttctacgattctggtcttctcctaatcatttctcattttgattgtttattttattattgcagcaataccactctcaataatctgcctatttgtgtctgtttatatagcaaaattcattttctttttctgatcaatgtttgcactgtccatctgcagaggcctatagccccagtagatttatacagatcaatatgtgattcacaacttattggcctgtcaggatacacaaaggaggctacaactacagccaaaatcataaaagtgtctggtttgaagctatcagcactaagccaaataaaggattccggctctcatcaagtgactccccctcacgttgactttgcggatgtctcaattctagtggtggagctacgaacaacaatccgatgtcctgatcgagagcgatggagttaatgtttgaacttgtgtgtttgaacttgtgaactaaaaatgtgaactatgtatgtgaacttgtgtgaatttgtgaacttatgtatttggacttatgtgaatttgtgaacttatatatttggacttgtgtgagtttgtgatatgaacatatatcaatgtgtttgaaatctgtattgtatgtgatatattgtgttgcatgtgatattatgtgtctaatttttcatttttgtattttt

SEQ ID NO: 16354 - DNA, 1997 bp, Zea Mays
cacgctctcatcccctccacgccgccgccacccgacccgcgccgccggaccgcgtcgacgctccctcgccgctggggttaaggcgatcatcgatcgatcgagtttctgtgcacaatcgtggcgctgctgtacttcaccttcggcgagcatgccgcatccctgaagaattcggcagggatttgtggcgggcactgtttcttcgcaacaaatttgtactggtgaggaaggaagacatatattagtactaacggaccaacgctggaaaggcggtgcagtgtctttacacactcgctcaactcggacggcttgtactgcgtgtagtgagcaagcgtggagttctacttccagatgtaacgagtgtcgtcagccaccaagacagcatcattctcatcaggcaacaactgctacacaaagaagatatgatgccaacctacccaaggatacttcgttggctggagtacaaatctcgccaagaaaatagctgaggcagcgattagtgatggagagtaagacagaagactgtactccagcagggatagctcagcgatgtaattggccaggaactccagatgcagagcaggatcctgtacaaacaaagagtaggggcattatcacagaatccctgcctgccacatatacatgtaattcctggcagcagtacctcatcacacgcctgcatccgtgtccaagactccaactatcatacgcctgcatcctgtacaaaaaaattgttggatacttgaatacttgaatccaagctgccaagttggatacttgaatccaagctgtattcttacacctgcaaaagactccaactatcattcttgtgtcaaaaaaattgttgaaccggacacccatgtccacatccaagcagcactggtttagcatccttgtcctctacaactccatttggacaacattcatttatggtaaattacaaattaatatggatgtgggtggacacagctgctatgtatttattttgttcagctatatttgtatataatattcatgtttcttgcatatttataccctgtgctgcactttaatttacttaggtacagataaccaaataaacatgatagatagggtcttcatgagtgcttgagattgacattgagttacgtagctattatttctttgtgtcagggatgatggttcgtttcattatgatcaagatttatttaacagcaaaattacagtatattgaatgaagttgatatcaagcggcgccaagaggatgacataaatagggtttcaactgttctttcaatttccaaaccagaggcatgtgtcttctccgcaactataactggagtgttagtaaggtgcatgacgaatggtttgctgatgaagagcgtgttcggaaggtggttggtttaccagagaagcatattgaaatgccaaatgacagagaaaggcctatagccccagtagatttatacagatcaatatgtgattcacaacttattggcctgtcaggatacacaaaggagggtctcccaatttttggcattggtgttgggcatagcacatatgacaaagcttcggtaattactctgatgcttgctatttgtttggtaggctacaactacagccaaaatcataaaagtgtctggtttgaagctatcagcactaagccaaataaaggattccggctctcatcaagtgactccccctcacgttgactttgcggatgtctcaattctagtggtggagctacgaacaacaatccgatgtcctgatcgagagcgatggagttaatgtttgaacttgtgtgtttgaacttgtgaactaaaaatgtgaactatgtatgtgaacttgtgtgaatttgtgaacttatgtatttggacttatgtgaatttgtgaacttatatatttggacttgtgtgagtttgtgatatgaacatatatcaatgtgtttgaaatctgtattgtatgtgatatattgtgttgcatgtgatattatgtgtctaatttttcatttttgtattttt

SEQ ID NO: 16355 - DNA, 2222 bp, Zea Mays
cacgctctcatcccctccacgccgccgccacccgacccgcgccgccggaccgcgtcgacgctccctcgccgctggggttaaggcgatcatcgatcgatcgagtttctgtgcacaatcgtggcgctgctgtacttcaccttcggcgaggtggacctctgccacatctcgctcccgtccttacccgtctccggctcgtcccccttccgcgcggctgccgtggcggcgcccttcgtggagcggcgcggggcttctttctattatctagcatgccctccgccacatcgagtttcagtgaagatttgttctcaagttgatctgtgcaatccagaccaacgctggaaaggcggtgcagtgtctttacacactcgctcaactcggacggcttgtactgcgtgtagtgagcaagcgtggagttctacttccagatgtaacgagtgtcgtcagccaccaagacagcatcattctcatcaggcaacaactgctacacaaagaagatatgatgccaacctacccaaggatacttcgttggctggagtacaaatctcgccaagaaaatagctgaggcagcgattagtgatggagagtaagacagaagactgtactccagcagggatagctcagcgatgtaattggccaggaactccagatgcagagcaggatcctgtacaaacaaagagtaggggcattatcacagaatccctgcctgccacatatacatgtaattcctggcagcagtacctcatcacacgcctgcatccgtgtccaagactccaactatcatacgcctgcatcctgtacaaaaaaattgttggatacttgaatacttgaatccaagctgccaagttggatacttgaatccaagctgtattcttacacctgcaaaagactccaactatcattcttgtgtcaaaaaaattgttgaaccggacacccatgtccacatccaagcagcactggtttagcatccttgtcctctacaactccatttggacaacattcatttatgggatgatggttcgtttcattatgatcaagatttatttaacagcaaaattacagtatattgaatgaagttgatatcaagcggcgccaagaggatgacataaatagggtttcaactgttctttcaatttccaaaccagaggcatgtgtcttctccgcaactataactggagtgttagtaaggtgcatgacgaatggtttgctgatgaagagcgtgttcggaaggtggttggtttaccagagaagcatattgaaatgccaaatgacagagaagtattcccatgcttcattagtttcacttgttcttccagttgcctaagcatgtttgctctagagatagaatcacagctcctaattcgaatctataatcctagtatataagttataagttgtggtgatctgctggagatgaatacagtattatcatcctcaaacttgtttctttcaatatcctcaccccacttataggatgggtattggatgatggaaaaaagcccgtctgtatagtacatcagtaccacagtgcataaaatatagacacatgtattgcatttgtagacctgtagtcactcatattatttgacccatgcgtatttttagtggacaatcattaaattagcaacaatctatgtctggacaatcattcgtttatttcagaatatgcaccagggctatcccaaagaaacactggtgcatttccttaaggctagagagtggaatgtagcaaaggctcataaaatgattgtagaatgtttgaattggaggattcaaaatgaaattgatagtgtgctggagaggcctatagccccagtagatttatacagatcaatatgtgattcacaacttattggcctgtcaggatacacaaaggaggattccggctctcatcaagtgactccccctcacgttgactttgcggatgtctcaattctagtggtggagctacgaacaacaatccgatgtcctgatcgagagcgatggagttaatgtttgaacttgtgtgtttgaacttgtgaactaaaaatgtgaactatgtatgtgaacttgtgtgaatttgtgaacttatgtatttggacttatgtgaatttgtgaacttatatatttggacttgtgtgagtttgtgatatgaacatatatcaatgtgtttgaaatctgtattgtatgtgatatattgtgttgcatgtgatattatgtgtctaatttttcatttttgtattttt

SEQ ID NO: 16356 - DNA, 2226 bp, Zea Mays
ctcaccgtctctcacacgctctcatcccctccacgccgccgccacccgacccgcgccgccggaccgcgtcgacgctccctcgccgctggggttaaggcgatcatcgatcgatcgagtttctgtgcacaatcgtggcgctgctgtacttcaccttcggcgaggtggacctctgccacatctcgctcccgtccttacccgtctccggctcgtcccccttccgcgcggctgccgtggcggcgcccttcgtggagcggcgcggggcttctttctattatctagcatgccctccgccacatcgagtttcagtgaagatttgttctcaagttgatctgtgcaatccagaccaacgctggaaaggcggtgcagtgtctttacacactcgctcaactcggacggcttgtactgcgtgtagtgagcaagcgtggagttctacttccagatgtaacgagtgtcgtcagccaccaagacagcatcattctcatcaggcaacaactgctacacaaagaagatatgatgccaacctacccaaggatacttcgttggctggagtacaaatctcgccaagaaaatagctgaggcagcgattagtgatggagagtaagacagaagactgtactccagcagggatagctcagcgatgtaattggccaggaactccagatgcagagcaggatcctgtacaaacaaagagtaggggcattatcacagaatccctgcctgccacatatacatgtaattcctggcagcagtacctcatcacacgcctgcatccgtgtccaagactccaactatcatacgcctgcatcctgtacaaaaaaattgttggatacttgaatacttgaatccaagctgccaagttggatacttgaatccaagctgtattcttacacctgcaaaagactccaactatcattcttgtgtcaaaaaaattgttgaaccggacacccatgtccacatccaagcagcactggtttagcatccttgtcctctacaactccatttggacaacattcatttatggtaaattacaaattaatatggatgtgggtggacacagctgctatgtatttattttgttcagctatatttgtatataatattcatgtttcttgcatatttataccctgtgctgcactttaatttacttaggtacagataaccaaataaacatgatagatagggtcttcatgagtgcttgagattgacattgagttacgtagctattatttctttgtgtcagggatgatggttcgtttcattatgatcaagatttatttaacagcaaaattacagtatattgaatgaagttgatatcaagcggcgccaagaggatgacataaatagggtttcaactgttctttcaatttccaaaccagaggcatgtgtcttctccgcaactataactggagtgttagtaaggtgcatgacgaatggtttgctgatgaagagcgtgttcggaaggtggttggtttaccagagaagcatattgaaatgccaaatgacagagaaaatatgcaccagggctatcccaaagaaacactggtgcatttccttaaggctagagagtggaatgtagcaaaggctcataaaatgattgtagaatgtttgaattggaggattcaaaatgaaattgatagtgtgctggagaggcctatagccccagtagatttatacagatcaatatgtgattcacaacttattggcctgtcaggatacacaaaggagggtctcccaatttttggcattggtgttgggcatagcacatatgacaaagcttcggtaattactctgatgcttgctatttgtttggtaggctacaactacagccaaaatcataaaagtgtctggtttgaagctatcagcactaagccaaataaaggattccggctctcatcaagtgactccccctcacgttgactttgcggatgtctcaattctagtggtggagctacgaacaacaatccgatgtcctgatcgagagcgatggagttaatgtttgaacttgtgtgtttgaacttgtgaactaaaaatgtgaactatgtatgtgaacttgtgtgaatttgtgaacttatgtatttggacttatgtgaatttgtgaacttatatatttggacttgtgtgagtttgtgatatgaacatatatcaatgtgtttgaaatctgtattgtatgtgatatattgtgttgcatgtgatattatgtgtctaatttttcatttttgtattttt

SEQ ID NO: 16357 - DNA, 2753 bp, Zea Mays
gtctatctcaccgtctctcacacgctctcatcccctccacgccgccgccacccgacccgcgccgccggaccgcgtcgacgctccctcgccgctggggttaaggcgatcatcgatcgatcgagtttctgtgcacaatcgtggcgctgctgtacttcaccttcggcgaggtggacctctgccacatctcgctcccgtccttacccgtctccggctcgtcccccttccgcgcggctgccgtggcggcgcccttcgtggagcggcgcggggcttctttctattatctagcatgccctccgccacatcgagtttcagtgaagatttgttctcaagttgatctgtgcaatccagtaagtaaccgctgggcttctttctattgtctagcatgccgcatccctgaagaattcggcagggatttgtggcgggcactgtttcttcgcaacaaatttgtactggtgaggaaggaagacatatattagtactaacggaccaacgctggaaaggcggtgcagtgtctttacacactcgctcaactcggacggcttgtactgcgtgtagtgagcaagcgtggagttctacttccagatgtaacgagtgtcgtcagccaccaagacagcatcattctcatcaggcaacaactgctacacaaagaagatatgatgccaacctacccaaggatacttcgttggctggagtacaaatctcgccaagaaaatagctgaggcagcgattagtgatggagagtaagacagaagactgtactccagcagggatagctcagcgatgtaattggccaggaactccagatgcagagcaggatcctgtacaaacaaagagtaggggcattatcacagaatccctgcctgccacatatacatgtaattcctggcagcagtacctcatcacacgcctgcatccgtgtccaagactccaactatcatacgcctgcatcctgtacaaaaaaattgttggatacttgaatacttgaatccaagctgccaagttggatacttgaatccaagctgtattcttacacctgcaaaagactccaactatcattcttgtgtcaaaaaaattgttgaaccggacacccatgtccacatccaagcagcactggtttagcatccttgtcctctacaactccatttggacaacattcatttatggtaaattacaaattaatatggatgtgggtggacacagctgctatgtatttattttgttcagctatatttgtatataatattcatgtttcttgcatatttataccctgtgctgcactttaatttacttaggtacagataaccaaataaacatgatagatagggtcttcatgagtgcttgagattgacattgagttacgtagctattatttctttgtgtcagggatgatggttcgtttcattatgatcaagatttatttaacagcaaaattacagtatattgaatgaagttgatatcaagcggcgccaagaggatgacataaatagggtttcaactgttctttcaatttccaaaccagaggcatgtgtcttctccgcaactataactggagtgttagtaaggtgcatgacgaatggtttgctgatgaagagcgtgttcggaaggtggttggtttaccagagaagcatattgaaatgccaaatgacagagaagtattcccatgcttcattagtttcacttgttcttccagttgcctaagcatgtttgctctagagatagaatcacagctcctaattcgaatctataatcctagtatataagttataagttgtggtgatctgctggagatgaatacagtattatcatcctcaaacttgtttctttcaatatcctcaccccacttataggatgggtattggatgatggaaaaaagcccgtctgtatagtacatcagtaccacagtgcataaaatatagacacatgtattgcatttgtagacctgtagtcactcatattatttgacccatgcgtatttttagtggacaatcattaaattagcaacaatctatgtctggacaatcattcgtttatttcagaatatgcaccagggctatcccaaagaaacactggtgcatttccttaaggctagagagtggaatgtagcaaaggctcataaaatgattgtagaatgtttgaattggaggattcaaaatgaaattgatagtgtgctggagaggcctatagccccagtagatttatacagatcaatatgtgattcacaacttattggcctgtcaggatacacaaaggagggtctcccaatttttggcattggtgttgggcatagcacatatgacaaagcttcggtaattactctgatgcttgctatttgtttggtaggctacaactacagccaaaatcataaaagtgtctggtttgaagctatcagcactaagccaaataaaggattccggctctcatcaagtgactccccctcacgttgactttgcggatgtctcaattctagtggtggagctacgaacaacaatccgatgtcctgatcgagagcgatggagttaatgtttgaacttgtgtgtttgaacttgtgaactaaaaatgtgaactatgtatgtgaacttgtgtgaatttgtgaacttatgtatttggacttatgtgaatttgtgaacttatatatttggacttgtgtgagtttgtgatatgaacatatatcaatgtgtttgaaatctgtattgtatgtgatatattgtgttgcatgtgatattatgtgtctaatttttcatttttgtattttt

SEQ ID NO: 16358 - DNA, 2311 bp, Zea Mays
ctcgtctatctcaccgtctctcacacgctctcatcccctccacgccgccgccacccgacccgcgccgccggaccgcgtcgacgctccctcgccgctggggttaaggcgatcatcgatcgatcgagtttctgtgcacaatcgtggcgctgctgtacttcaccttcggcgaggtggacctctgccacatctcgctcccgtccttacccgtctccggctcgtcccccttccgcgcggctgccgtggcggcgcccttcgtggagcggcgcggggcttctttctattatctagcatgccctccgccacatcgagtttcagtgaagatttgttctcaagttgatctgtgcaatccagaccaacgctggaaaggcggtgcagtgtctttacacactcgctcaactcggacggcttgtactgcgtgtagtgagcaagcgtggagttctacttccagatgtaacgagtgtcgtcagccaccaagacagcatcattctcatcaggcaacaactgctacacaaagaagatatgatgccaacctacccaaggatacttcgttggctggagtacaaatctcgccaagaaaatagctgaggcagcgattagtgatggagagtaagacagaagactgtactccagcagggatagctcagcgatgtaattggccaggaactccagatgcagagcaggatcctgtacaaacaaagagtaggggcattatcacagaatccctgcctgccacatatacatgtaattcctggcagcagtacctcatcacacgcctgcatccgtgtccaagactccaactatcatacgcctgcatcctgtacaaaaaaattgttggatacttgaatacttgaatccaagctgccaagttggatacttgaatccaagctgtattcttacacctgcaaaagactccaactatcattcttgtgtcaaaaaaattgttgaaccggacacccatgtccacatccaagcagcactggtttagcatccttgtcctctacaactccatttggacaacattcatttatgggatgatggttcgtttcattatgatcaagatttatttaacagcaaaattacagtatattgaatgaagttgatatcaagcggcgccaagaggatgacataaatagggtttcaactgttctttcaatttccaaaccagaggcatgtgtcttctccgcaactataactggagtgttagtaaggtgcatgacgaatggtttgctgatgaagagcgtgttcggaaggtggttggtttaccagagaagcatattgaaatgccaaatgacagagaagtattcccatgcttcattagtttcacttgttcttccagttgcctaagcatgtttgctctagagatagaatcacagctcctaattcgaatctataatcctagtatataagttataagttgtggtgatctgctggagatgaatacagtattatcatcctcaaacttgtttctttcaatatcctcaccccacttataggatgggtattggatgatggaaaaaagcccgtctgtatagtacatcagtaccacagtgcataaaatatagacacatgtattgcatttgtagacctgtagtcactcatattatttgacccatgcgtatttttagtggacaatcattaaattagcaacaatctatgtctggacaatcattcgtttatttcagaatatgcaccagggctatcccaaagaaacactggtgcatttccttaaggctagagagtggaatgtagcaaaggctcataaaatgattgtagaatgtttgaattggaggattcaaaatgaaattgatagtgtgctggagaggcctatagccccagtagatttatacagatcaatatgtgattcacaacttattggcctgtcaggatacacaaaggaggctacaactacagccaaaatcataaaagtgtctggtttgaagctatcagcactaagccaaataaaggattccggctctcatcaagtgactccccctcacgttgactttgcggatgtctcaattctagtggtggagctacgaacaacaatccgatgtcctgatcgagagcgatggagttaatgtttgaacttgtgtgtttgaacttgtgaactaaaaatgtgaactatgtatgtgaacttgtgtgaatttgtgaacttatgtatttggacttatgtgaatttgtgaacttatatatttggacttgtgtgagtttgtgatatgaacatatatcaatgtgtttgaaatctgtattgtatgtgatatattgtgttgcatgtgatattatgtgtctaatttttcatttttgtattttt

SEQ ID NO: 16359 - DNA, 2272 bp, Zea Mays
ggactcgtctatctcaccgtctctcacacgctctcatcccctccacgccgccgccacccgacccgcgccgccggaccgcgtcgacgctccctcgccgctggggttaaggcgatcatcgatcgatcgagtttctgtgcacaatcgtggcgctgctgtacttcaccttcggcgaggtggacctctgccacatctcgctcccgtccttacccgtctccggctcgtcccccttccgcgcggctgccgtggcggcgcccttcgtggagcggcgcggggcttctttctattatctagcatgccctccgccacatcgagtttcagtgaagatttgttctcaagttgatctgtgcaatccagaccaacgctggaaaggcggtgcagtgtctttacacactcgctcaactcggacggcttgtactgcgtgtagtgagcaagcgtggagttctacttccagatgtaacgagtgtcgtcagccaccaagacagcatcattctcatcaggcaacaactgctacacaaagaagatatgatgccaacctacccaaggatacttcgttggctggagtacaaatctcgccaagaaaatagctgaggcagcgattagtgatggagagtaagacagaagactgtactccagcagggatagctcagcgatgtaattggccaggaactccagatgcagagcaggatcctgtacaaacaaagagtaggggcattatcacagaatccctgcctgccacatatacatgtaattcctggcagcagtacctcatcacacgcctgcatccgtgtccaagactccaactatcatacgcctgcatcctgtacaaaaaaattgttggatacttgaatacttgaatccaagctgccaagttggatacttgaatccaagctgtattcttacacctgcaaaagactccaactatcattcttgtgtcaaaaaaattgttgaaccggacacccatgtccacatccaagcagcactggtttagcatccttgtcctctacaactccatttggacaacattcatttatgcaaaattacagtatattgaatgaagttgatatcaagcggcgccaagaggatgacataaatagggtttcaactgttctttcaatttccaaaccagaggcatgtgtcttctccgcaactataactggagtgttagtaaggtgcatgacgaatggtttgctgatgaagagcgtgttcggaaggtggttggtttaccagagaagcatattgaaatgccaaatgacagagaagtattcccatgcttcattagtttcacttgttcttccagttgcctaagcatgtttgctctagagatagaatcacagctcctaattcgaatctataatcctagtatataagttataagttgtggtgatctgctggagatgaatacagtattatcatcctcaaacttgtttctttcaatatcctcaccccacttataggatgggtattggatgatggaaaaaagcccgtctgtatagtacatcagtaccacagtgcataaaatatagacacatgtattgcatttgtagacctgtagtcactcatattatttgacccatgcgtatttttagtggacaatcattaaattagcaacaatctatgtctggacaatcattcgtttatttcagaatatgcaccagggctatcccaaagaaacactggtgcatttccttaaggctagagagtggaatgtagcaaaggctcataaaatgattgtagaatgtttgaattggaggattcaaaatgaaattgatagtgtgctggagaggcctatagccccagtagatttatacagatcaatatgtgattcacaacttattggcctgtcaggatacacaaaggaggctacaactacagccaaaatcataaaagtgtctggtttgaagctatcagcactaagccaaataaaggattccggctctcatcaagtgactccccctcacgttgactttgcggatgtctcaattctagtggtggagctacgaacaacaatccgatgtcctgatcgagagcgatggagttaatgtttgaacttgtgtgtttgaacttgtgaactaaaaatgtgaactatgtatgtgaacttgtgtgaatttgtgaacttatgtatttggacttatgtgaatttgtgaacttatatatttggacttgtgtgagtttgtgatatgaacatatatcaatgtgtttgaaatctgtattgtatgtgatatattgtgttgcatgtgatattatgtgtctaatttttcatttttgtattttt

SEQ ID NO: 16360 - DNA, 2963 bp, Zea Mays
aaacccctaacccgcgggactcgtctatctcaccgtctctcacacgctctcatcccctccacgccgccgccacccgacccgcgccgccggaccgcgtcgacgctccctcgccgctggggttaaggcgatcatcgatcgatcgagtttctgtgcacaatcgtggcgctgctgtacttcaccttcggcgaggtggacctctgccacatctcgctcccgtccttacccgtctccggctcgtcccccttccgcgcggctgccgtggcggcgcccttcgtggagcggcgcggggcttctttctattatctagcatgccctccgccacatcgagtttcagtgaagatttgttctcaagttgatctgtgcaatccagtaagtaaccgctgggcttctttctattgtctagcatgccgcatccctgaagaattcggcagggatttgtggcgggcactgtttcttcgcaacaaatttgtactggtgaggaaggaagacatatattagtactaacggtcggtagagctgttttaaactgaagaataatatcttgatcacctactttgtgctggctgtacttttctctgattgatgggaggttgctcccaggaccaacgctggaaaggcggtgcagtgtctttacacactcgctcaactcggacggcttgtactgcgtgtagtgagcaagcgtggagttctacttccagatgtaacgagtgtcgtcagccaccaagacagcatcattctcatcaggcaacaactgctacacaaagaagatatgatgccaacctacccaaggatacttcgttggctggagtacaaatctcgccaagaaaatagctgaggcagcgattagtgatggagagtaagacagaagactgtactccagcagggatagctcagcgatgtaattggccaggaactccagatgcagagcaggatcctgtacaaacaaagagtaggggcattatcacagaatccctgcctgccacatatacatgtaattcctggcagcagtacctcatcacacgcctgcatccgtgtccaagactccaactatcatacgcctgcatcctgtacaaaaaaattgttggatacttgaatacttgaatccaagctgccaagttggatacttgaatccaagctgtattcttacacctgcaaaagactccaactatcattcttgtgtcaaaaaaattgttgaaccggacacccatgtccacatccaagcagcactggtttagcatccttgtcctctacaactccatttggacaacattcatttatgggatgatggttcgtttcattatgatcaagatttatttaacagcaaaattacagtatattgaatgaagttgatatcaagcggcgccaagaggatgacataaatagggtttcaactgttctttcaatttccaaaccagaggcatgtgtcttctccgcaactataactggagtgttagtaaggtgcatgacgaatggtttgctgatgaagagcgtgttcggaaggtggttggtttaccagagaagcatattgaaatgccaaatgacagagaagtattcccatgcttcattagtttcacttgttcttccagttgcctaagcatgtttgctctagagatagaatcacagctcctaattcgaatctataatcctagtatataagttataagttgtggtgatctgctggagatgaatacagtattatcatcctcaaacttgtttctttcaatatcctcaccccacttataggatgggtattggatgatggaaaaaagcccgtctgtatagtacatcagtaccacagtgcataaaatatagacacatgtattgcatttgtagacctgtagtcactcatattatttgacccatgcgtatttttagtggacaatcattaaattagcaacaatctatgtctggacaatcattcgtttatttcagaatatgcaccagggctatcccaaagaaacactggtgcatttccttaaggctagagagtggaatgtagcaaaggctcataaaatggtaacgtttcatacaagtttctcaacagtgggtgaagtgaccacgaatttgattaataatatgtttgtttctatagattgtagaatgtttgaattggaggattcaaaatgaaattgatagtgtgctggaggtgagtcatcctgtctagaatttaatccttccagatattactgtatatgttaatcagaaagctaatgaaggttcccttaaagttctacgattctggtcttctcctaatcatttctcattttgattgtttattttattattgcagcaataccactctcaataatctgcctatttgtgtctgtttatatagcaaaattcattttctttttctgatcaatgtttgcactgtccatctgcagaggcctatagccccagtagatttatacagatcaatatgtgattcacaacttattggcctgtcaggatacacaaaggagggtctcccaatttttggcattggtgttgggcatagcacatatgacaaagcttcggtaattactctgatgcttgctatttgtttggtaggctacaactacagccaaaatcataaaagtgtctggtttgaagctatcagcactaagccaaataaaggattccggctctcatcaagtgactccccctcacgttgactttgcggatgtctcaattctagtggtggagctacgaacaacaatccgatgtcctgatcgagagcgatggagttaatgtttgaacttgtgtgtttgaacttgtgaactaaaaatgtgaactatgtatgtgaacttgtgtgaatttgtgaacttatgtatttggacttatgtgaatttgtgaacttatatatttggacttgtgtgagtttgtgatatgaacatatatcaatgtgtttgaaatctgtattgtatgtgatatattgtgttgcatgtgatattatgtgtctaatttttcatttttgtattttt

SEQ ID NO: 16361 - DNA, 2066 bp, Zea Mays
cacgctctcatcccctccacgccgccgccacccgacccgcgccgccggaccgcgtcgacgctccctcgccgctggggttaaggcgatcatcgatcgatcgagtttctgtgcacaatcgtggcgctgctgtacttcaccttcggcgaggtggacctctgccacatctcgctcccgtccttacccgtctccggctcgtcccccttccgcgcggctgccgtggcggcgcccttcgtggagcggcgcggggcttctttctattatctagcatgccctccgccacatcgagtttcagtgaagatttgttctcaagttgatctgtgcaatccagaccaacgctggaaaggcggtgcagtgtctttacacactcgctcaactcggacggcttgtactgcgtgtagtgagcaagcgtggagttctacttccagatgtaacgagtgtcgtcagccaccaagacagcatcattctcatcaggcaacaactgctacacaaagaagatatgatgccaacctacccaaggatacttcgttggctggagtacaaatctcgccaagaaaatagctgaggcagcgattagtgatggagagtaagacagaagactgtactccagcagggatagctcagcgatgtaattggccaggaactccagatgcagagcaggatcctgtacaaacaaagagtaggggcattatcacagaatccctgcctgccacatatacatggatgatggttcgtttcattatgatcaagatttatttaacagcaaaattacagtatattgaatgaagttgatatcaagcggcgccaagaggatgacataaatagggtttcaactgttctttcaatttccaaaccagaggcatgtgtcttctccgcaactataactggagtgttagtaaggtgcatgacgaatggtttgctgatgaagagcgtgttcggaaggtggttggtttaccagagaagcatattgaaatgccaaatgacagagaagtattcccatgcttcattagtttcacttgttcttccagttgcctaagcatgtttgctctagagatagaatcacagctcctaattcgaatctataatcctagtatataagttataagttgtggtgatctgctggagatgaatacagtattatcatcctcaaacttgtttctttcaatatcctcaccccacttataggatgggtattggatgatggaaaaaagcccgtctgtatagtacatcagtaccacagtgcataaaatatagacacatgtattgcatttgtagacctgtagtcactcatattatttgacccatgcgtatttttagtggacaatcattaaattagcaacaatctatgtctggacaatcattcgtttatttcagaatatgcaccagggctatcccaaagaaacactggtgcatttccttaaggctagagagtggaatgtagcaaaggctcataaaatggtaacgtttcatacaagtttctcaacagtgggtgaagtgaccacgaatttgattaataatatgtttgtttctatagattgtagaatgtttgaattggaggattcaaaatgaaattgatagtgtgctggaggtgagtcatcctgtctagaatttaatccttccagatattactgtatatgttaatcagaaagctaatgaaggttcccttaaagttctacgattctggtcttctcctaatcatttctcattttgattgtttattttattattgcagcaataccactctcaataatctgcctatttgtgtctgtttatatagcaaaattcattttctttttctgatcaatgtttgcactgtccatctgcagaggcctatagccccagtagatttatacagatcaatatgtgattcacaacttattggcctgtcaggatacacaaaggagggtctcccaatttttggcattggtgttgggcatagcacatatgacaaagcttcggtaattactctgatgcttgctatttgtttggtaggctacaactacagccaaaatcataaaagtgtctggtttgaagctatcagcactaagccaaataaaggtacatgctat

SEQ ID NO: 16362 - DNA, 598 bp, Zea Mays
ctgatttgttattttggaccttcggccagaggcctccccagcaatggtgatctaggttcatgatgaaagagagatggaacgtgtgctgaagataaatggagttaagcttattggtatcaataaccgaagccttgagacatttgttgttgatacttcgaacaccaagatgttgctcgagaaacatggggatatcatcagggagaagggaattttggttgttggtgaatcaggtctgtttactccggatgatgttgcttatgttcagaatgctggcgtttctgctgttttggttggggaatccctggtgaagcaagagtgccctggacgagccattgttgggttatttggcaaagaactgctgcactgaatgagaggacaaagattgtagtagtacatggtttggtggtgaggtgttagtgctaggctgctagctgttagccatagcatcatttgcagtaatagcattggttttattaataataccaccgaatgtgacatgcagaataaaaataatgttcaataagttccattcagtgattttctttagttcagtgacaaacgaatgcgatctgttcatgacagagggggatctcccaag

SEQ ID NO: 16363 - DNA, 1320 bp, Zea Mays
gttcgatcgatgccctctgcctgacactcccagctccttttgtagctgcacacttcactaatctgagcttaactggcagctcagtccatggactcaatccttgaggtgctggcacaggacgatatgctgaacgcaaaggagctggtccaatgggagaatggcttgtcattcaatgacatagcggctaggcaggggattcgcatccgcagacactgccgccccactgcctccttgaaggagatagaggaggagctgggagccccccttaacatcctagagaagatcatttgggacaaggagattgaagtagctgaggggcatgctaagaagcctcttgaggaggtgattcaggctgcaacgaaagcccctccttcaagagacttctatggcgctttagaagctgcctacaagcgtaatggggtgcctgcattgattgctgaggtcaagaaagcatccccgagtaggggtgtgctcagggagaactttaatcctgttgaaattgctcaagcttatgaaaagaatggagctgcatgtttgagcattttgacagatgagaagtactttcagggaagctttgataatcttgaaaaggtgcgcagctcaggagtgaagtgccctcttctctgcaaggagtttgtcattgacaagtggcaaatctataatgctcgctctaagggtgctgatgcaattctactaattgctgctgtgctaccagatcttgacataaggaaatttcttcagatttgcgaagagttgggaatgacagctcttattgaggttcatgatgaaagagagatggaacgtgtgctgaagataaatggagttaagcttattggtatcaataaccgaagccttgagacatttgttgttgatacttcgaacaccaagatgttgctcgagaaacatggggatatcatcagggagaagggaattttggttgttggtgaatcaggtctgtttactccggatgatgttgcttatgttcagaatgctggcgtttctgctgttttggttggggaatccctggtgaagcaagagtgccctggacgagccattgttgggttatttggcaaagaactgctgcactgaatgagaggacaaagattgtagtagtacatggtttggtggtgaggtgttagtgctaggctgctagctgttagccatagcatcatttgcagtaatagcattggttttattaataataccaccgaatgtgacatgcagaataaaaataatgttcaataagttccattcagtgattttctttagttcagtgacaaacgaatgcgatctgttcatgacagagggggatctcccaag

SEQ ID NO: 16364 - DNA, 1362 bp, Zea Mays
ctaaaatggaataaaatggagagataaaccaaacacccccgaagatgggctcggcagttctcttgttctgttcgatcgatgccctctgcctgacactcccagctccttttgtagctgcacacttcactaatctgagcttaactggcagctcagtccatggacgatatgctgaacgcaaaggagctggtccaatgggagaatggcttgtcattcaatgacatagcggctaggcaggggattcgcatccgcagacactgccgccccactgcctccttgaaggagatagaggaggagctgggagccccccttaacatcctagagaagatcatttgggacaaggagattgaagtagctgaggggcatgctaagaagcctcttgaggaggtgattcaggctgcaacgaaagcccctccttcaagagacttctatggcgctttagaagctgcctacaagcgtaatggggtgcctgcattgattgctgaggtcaagaaagcatccccgagtaggggtgtgctcagggagaactttaatcctgttgaaattgctcaagcttatgaaaagaatggagctgcatgtttgagcattttgacagatgagaagtactttcagggaagctttgataatcttgaaaaggtgcgcagctcaggagtgaagtgccctcttctctgcaaggagtttgtcattgacaagtggcaaatctataatgctcgctctaagggtgctgatgcaattctactaattgctgctgtgctaccagatcttgacataaggaaatttcttcagatttgcgaagagttgggaatgacagctcttattgaggttcatgatgaaagagagatggaacgtgtgctgaagataaatggagttaagcttattggtatcaataaccgaagccttgagacatttgttgttgatacttcgaacaccaagatgttgctcgagaaacatggggatatcatcagggagaagggaattttggttgttggtgaatcaggtctgtttactccggatgatgttgcttatgttcagaatgctggcgtttctgctgttttggttggggaatccctggtgaagcaagagtgccctggacgagccattgttgggttatttggcaaagaactgctgcactgaatgagaggacaaagattgtagtagtacatggtttggtggtgaggtgttagtgctaggctgctagctgttagccatagcatcatttgcagtaatagcattggttttattaataataccaccgaatgtgacatgcagaataaaaataatgttcaataagttccattcagtgattttctttagttcagtgacaaacgaatgcgatctgttcatgacagagggggatctcccaag

SEQ ID NO: 16365 - DNA, 1117 bp, Zea Mays
ttggaaggtcgaaattgtcgatggaagatcagaaagtcgtgacgatgacatgatgacaacacatggcactaaagatagatttgtggtcatgggactgtgggacgatacaaaatagtggccgaaatatggttttcgtgatgaatttagaatcaacattgatttagggagtcccaataagaattctaaatgcaggaatgaaattggattttgtagggagtttgtaaatttaaggacaaatgttttatatagctgttgggaagagtttttctaaaaactttttaaattcatatctagacagagatgatttaagcagggagagatagtcacttgatagaagactcgtcgattcgtctcaggtagcggccgaaccagagccctgtcccaacccgaccacctctcttctctacggcgcgaggaagggcagcgcccaccgcagcgtcggcgggaaccgggcctcgctctccccatctcttcggctttctggaatcacatttcttaagaactatctgttggagagctaaactaggctcttgttcatattatggatcagcaagctatgattgatgctgattttcttgaaccaactgtactcttagatgagacacattaccaggaggggtacagaaatggctacaatgatggtttggcatctggaaaggaagaggggaggcaggttggtttaaagatgggtttccaggtcggtgaagaactgggtttctttcacggctgtctggatgtgtggacgtctgcaattctcattgatcagaatgccttcacagctcgggtcaggaagaatattgagcaactggctgcactggtgggcagctatccgctgtccgatccggagaatgaacaaattcaagacgtgatggagaagataaggctgaaattcagggtcatcactgcaagcttaggggtgaagttagagtatgaagggcaccccaaatcatctaaacaggatgctgaggatctgtgagcggtgattgaaattacattttagtttctccgcccttgctgtttaaagctcttcaactcattggcatcatggggaactgtcgtgagacatcaatgcaattggtttggaaatcttgcaagttctatctaccaccaactttat

SEQ ID NO: 16366 - DNA, 4047 bp, Zea Mays
gccaccactgcctggcacatgatccacggtgtccaggtgatatcctgtcagatgaattgtggttcaaaacatataagtcctgcctgagcagatgccagggcagtgaaaaggtatcatacatttcataaatttcaagcttttccttaaaatctcagcatatcgtacatgaaaaggctaattaccaacgataggcggaaaggtgggtacgatatacggagtacttcatagctattgagcccaaacacagcctcaaatgttgtgaagacaaaacacaaatgttgtgaagacaaaacagtccatgtactatttgtgtcttttgctttgggaccttggcaatatccgcttaaaatttcattcgtcagacaaacagcagacaaataggttgggttttaatctaatggctagtttgggaacccaatttttcgaaaggattcatatttttctaagaaaaattagtttatttttcttgaaaaaatagtaaccctagaaaaatggagttcacaaactaaccctaaaaaattaagaaatgatatatatactctataaaactactgcaccttttaggaattgttttaaaggttttaccaacaaaataaagaaaacagggctcaaatgcaagaggacggcaaatcgttgtgttaaactaaaaggaatgttattggagatgacgcttagctttgcataactaattcaaaaaagtgtctacattcatttccattgcaaagtgtaactccaaaatgaagcataaatgaacaaaataaggtggtgtgaagcataaatgaacaaaataagctggggccaaaaatgaagaaaaaacaccagagatgaaacaatccaatggacggctggggcctgggaacaaaaacagtagagcgtgcatatgtatagactgcactgtttactaagattataaacagaagcgggtccagacatttgagattgggtattcaaaaaatcaaaagattaaagaaattaatgctctaacattattttgtgtaatatattattgagaaattactataaatcagcaaaaatttgggtattcaattgaatatccatgataccccaattgaatatccatgatacccctgggaccgctgctgagtataagactgccttcagcgatcacataaaataggggacgcgacactgtagatgacattgttgcttgaggcagcctaagactgtctccagcaacgtcctctatatacatcctatatatccgtcatttacagtcttctctaaaagattttatcccctatatttatttcctctccaacaacgtcctctaaatcacgtcccctatatgtaaatacatatattaaagacattttttattttttattttttgtacatacgtgtttgtcatactttcaaatgtattgtacatattttagttttactaaaccggttgtttaaagtattcaaatagatagagaaccgtttagagaaattctatatatagaggatccagcaacgtcctctaaatttagaagaccgtttagatgatgctcctagagggatcgtcctctaattttagagtacaggaccctttagagctccttgttggagctagtcatagaggtgggatagggaggctgtcgaaaataatctaaataaagatgcaaaatctcatcggtccaacaagaatatgcgcgtcataaaaaacgttggtatgagtcatagcttttaagaaacttcctgcagatgagtaacgcagctttcacttggctcacgtcgttggtttccccaggatgggtccatcagggacaggatatggattctgtacaacattatggtaaaaaatcttccaagcttgcacagttccagtgctcctatggcgttccgcgttcgtatccaaggcacaagatatttaaagccagcacgtggacccaaggcgacattcaacgcaaggcagcagcggccatggtctacctgtgtgtggcgctagaggtcaatggtagcaggggcttatatgtcaaggcggcatcatgcggcgtgtgtactctgtgggtactgggtaggcacttcctagttccgttgtgctgaagaaaaaagcaccagaaatgaaacaatccaatggacggttggggacaaaaaaaatgtcatcctaattcctaaatcagggcatatttggattcgaggattaaaaaaagtgactaaagtttagtcacttatgaactaaaagatctaaacaagaagatctaaaaatgactaaattgttattttgttatcattttagtcacttttagctttttatttaaatctttatcttctaagtaactaaactttagtcactttttctttaactcttgtgatctaaatatgacctaaagatgtaaaatctcatccgtccaacaagaatatgtgcgtaataaaataagaaaggtcggtatggtaatacttccttcgtcttaaaatatactaccttagttgtcgtcccctactttatttttaactaaaccacaacaaataaaaacaaacggaaagagtagttctttataatcctcttttgtcccatccaccatcgaatgaatgataatgaatatagacatacatacaaactataattataatctaaaacgaattatataacaaattatattttggaatggagtgagtagattttaagaaacttcccccatgagtaatcatgctcttgggccatccgcagcttcactgccgaggtacggtgcccatttgtacggagtagctttttgaactgtggtcacgacggtcagcttatccgtttggttttaatcagtttttattgtttttacggtattttatctctataaattatataaattatagttgtagtagttcgaacaactggatttaatctggagctcagtttggttggtttccaaaggatgggtccatctagaatttctcatagtatctcgctcggggcaggatgtggattgtggacagaattatggtaaatctttcaagcttacacagttccggtgctccaatggtgtggtacgtatctaaaggcacaagatatttaagccagcacatggaccgatggcgacattcaacgcaaaggcagcggcggccatggtccacctgtgtgtggcgctagaggtcaatggtagcagggcttatatgtcaaggcagcatcatgcggcgtgtgtatgtgggcctgtggggacaggggagggtacgccccgcgtgcctcgtggtgaggccacgcggcgcggcggccattcaagtcgatatcgtccagatttcgtgctgctgctaagcaacaagatcccggggacagggaggggattgccgtgccgtcctctgttctgttgccctgcaattgagagcgccagtgccctgcaggcccctgttttatggcctcctctgtactctgtagtacccatcaccaataaccccttcggttgtttttaatactcctaagtaatagtaacgtgtaataaactctattacgacgcgacagtcgcacggagctcggggcgcgcgacccagcggtcggtccattgccaggggcagagggcctcgggcggcggccggaccggcggcggcggtgggttgaggagcggagagcgaggcgatcgggagcgctgccgagccgacggaggaagacatccggttgggcgggcgggcagagtgctcgacgtcttgctcctccggtcgaggttaggggaggacaaacggcgtgacattggccgattttcaaggagaacagcatgggtcctactaacggcgacagagctgtaaaaactgaatcgctgaaagggaattctagagacgagcacgctctaattctcgaaccatgcgtgtatatgtttggtggagatgaaacccctgtttcgatgaagagaataagaacagggtttaaaaccagcccacccacccccaaacagaaacagaacagacacgcgattccagagcaggacgatctcgccccgatcctcttcacgaccacgcatacgcagcagaacgaaacgacagggggggttaggcaagaggagggggcacggtaataactgaccaggcttacgcgcgcggagccgcgcggcgagggcggcc

SEQ ID NO: 16367 - DNA, 1232 bp, Zea Mays
ccggattctgccgaattcaagaaccggaacacagcatcggcaccttccttcttctccgtcgcgtcccttataaatatcctcgaccctttcccatttcctctcccatttatttcctccgcttcagctcccattctccgccaaataaacccccgaaaagcaggagaggcgagacccggaagtggaaggctagggttagggtcccagctccccgttgcctgggcgagccgagtgatggccgcccctgccccctccggcgcagctagtgccgccgcctcaccgtccccgctgatgcagctgccgtcgccgttcgcggagctcgtcaagggcccctccggcctcgagaaggtcgtgcttcgcggcgctcgcaactgctgtgccgagatttatctttatggaggtcaagtaacatcatggaagaatgacaatggggaagacttgcttttcctcagcagcaaggctattttcaaacctccaaaagctattcgtggtggtataccaatctgctttccccaatttggatcacatggaaatcttgaacaacatggattcgctaggaaccggttttggactattgacaacaatccacctcctttaccattaaaccctgctattaaagcttttgttgatctgattctgaagccttctgaagaggatttaaagatctggccccacagttttgaatttcgtttgagagttgctcttggaccttctggagatttgagtctcacatcacgaatcaggaacaacaacccagatggaagacctttctcttatacatttgcatatcacacatacttctctgtttctgacataagtgaggtgcgtgtcgaaggactggaaactatggactaccttgacaacttaaaggcaaaggaacgtttcacagagcaaggcgatgctattgtttttgaatcagaagttgacaaagtttaccttgctgcaccctccaaaattgctatcattgatcatgagaagaaaagaacatttgtcgtgacaaaagaagggcttcctgatgctgttgtttggaacccttgggacaagaaggcaaaagcaatgcaagattttggggatgcagaatacaagagcatgctgtgtgtggagcctgcatctgttgagaggcctattactctgaaacctggtgaagagtggaaaggaaggcttgtgctctcagctgttccctcgagttactgtagtggacagttagatccattgaaggagaagaacaggtggtt

SEQ ID NO: 16368 - DNA, 1303 bp, Zea Mays
tgccgaattcaagaaccggaacacagcatcggcaccttccttcttctccgtcgcgtcccttataaatatcctcgaccctttcccatttcctctcccatttatttcctccgcttcagctcccattctccgccaaataaacccccgaaaagcaggagaggcgagacccggaagtggaaggctagggttagggtcccagctccccgttgcctgggcgagccgagtgatggccgcccctgccccctccggcgcagctagtgccgccgcctcaccgtccccgctgatgcagctgccgtcgccgttcgcggagctcgtcaagggcccctccggcctcgagaaggtcgtgcttcgcggcgctcgcaactgctgtgccgagatttatctttatggaggtcaagtaacatcatggaagaatgacaatggggaagacttgcttttcctcagcagcaaggctattttcaaacctccaaaagctattcgtggtggtataccaatctgctttccccaatttggatcacatggaaatcttgaacaacatggattcgctaggaaccggttttggactattgacaacaatccacctcctttaccattaaaccctgctattaaagcttttgttgatctgattctgaagccttctgaagaggatttaaagatctggccccacagttttgaatttcgtttgagagttgctcttggaccttctggagatttgagtctcacatcacgaatcaggaacaacaacccagatggaagacctttctcttatacatttgcatatcacacatacttctctgtttctgacataagtgaggtgcgtgtcgaaggactggaaactatggactaccttgacaacttaaaggcaaaggaacgtttcacagagcaaggcgatgctattgtttttgaatcagaagttgacaaagtttaccttgctgcaccctccaaaattgctatcattgatcatgagaagaaaagaacatttgtcgtgacaaaagaagggcttcctgatgctgttgtttggaacccttgggacaagaaggcaaaagcaatgcaagattttggggatgcagaatacaagagcatgctgtgtgtggagcctgcatctgttgagaggcctattactctgaaacctggtgaagagtggaaaggaaggcttgtgctctcagctgttccctcgagttactgtagtggacagttagatccattgaaggtccttcagggctgaaaatccttactttctgcctcttgtacagaaaacaatggcctgtttggtttgatgcttgaaatttgcctagcgaagcatggc

SEQ ID NO: 16369 - DNA, 2457 bp, Zea Mays
atcgcccagttctctcttctctttctttcttccccttcctacaccgccgcaccccactcccagatcccactgctccccagatccgcgcccgagccctagtccccagatccgccgcggcgccggagatctactcctcgtcttggcgtccgcggcgccatggcgtgcctcgcgatctctctgcagccggtgaacggcccggacatcctactgcaaacgcggtcctggttccccgtctcccgcgccctcgccgccgtctccgcctttcgcctcgcgcgcctccaccttgcacgcggcaagcaacagtcctcctcatcctccgcctcctcggcctcgctcgacgccatcggcgacgacccgctcgccgccgcgtccgggcagctcgttgtcggcgtcgagtcacagtaccgcgtggtgtaccgccttgtcaactccatctacgttctgggtgtcaccaccgcaggctctgaccatgctgcccctgctgtcaacgccttcgccgtcgccgacgctgtcaaccagtccgtctccgtcgtcgttgcagcctgccgtggcgtcgacgtcacccctgagaaggtgcaccgcaagtaccctgaggtctatctcgctctcgacctcgtcctccacggcgttggctccgtccgcctctctcagatcctcgccaccatccatggcgacaacctcgcgcgcatggtcaactcctcgcccgacgccgaagcccgggcccgtggcgcggatccctggcccgtcgtcgaacacctcgcgcaggaccgccacgctgcgagggagggcttctcgggcgcctctttcgagcttccccaggagacgctcgcggctggtgacgaattctcgtctaacatcgcccccgcgaccactgttgctactggggatgaaccaccacctgaggaggcagcacctgtggaaaaggatcctttcgcagccagtgacctgattaacaacaaaccggaggaggcattggtgggtgggttcaaaaagaacaaagagactgcccttgtggttgctgatcctgcagctgcgctagctggattggaggttacgactttgccaccagctgaggcgactaagccgacatttattggagttgaagggtttgagggtgattatggtggcattgagtttggcaacgatgagacttcacttgctgaggcatttgaagggctcaatgcgccatttggtggtggcctggatgcttctgagtttgttacaacaacgaagaaggatcacaaggacaggaccgtcactgggcttgagttgctagtagcaagtgggcagccaccgaatgcagctgctggtactccattggagaatctcttgctgactaagcgcgcagaaatgaccgctcctgagttgtttattgctgaggagatcaatgcagaattcaaggagtctattcttgtgcgtgttggattgaagggtacaatcttcctgcggaccttgccactgaataaggcagcgggtaaggagacagagttctcatttcgtcttgagggcacatcaggaatgaagagggctgcattgcagagtaatgtcttgagtaacctacaaaatggactgttccatgtcaggaccgtgtcgaaagaagaacccattcccctcatgaagtacagcttcctgccgaagcactcacctctccctttgaggatgcgcctagtgaagcgccatagtggaacgttactctcagtgatgatacagtacgcatccaatccaatgctgccccagcctctgagcaatgttacattcgttgttaagcttcctgtggatcctactctgctcaatgtttcacccaaggctgtgctaaaccgggcagagaaagagtttagatggcatatttcagacattcccctgaaaggtccagccggcaggctcagggcgcggatgcctgttgaccaagactccaaagatggtgagctagaggttgttgggatggtgaagtttgcttaccaaggtccattcacattgtctggcattaaactatgcccagccactgatggcattgcccaatttaatgaagttggccataccttctccagtgggagttacctgtgcatttgataggttttagttcagaatatattaaccggaagtagtagctgctgcttccattcatttctgaagtagcccaactaatgtcatctattccctgaaggtgctgctgcgcagaagcaggccgcttgctgttgactgtcaggaggatgcaggtgacaattgagctgtggccggtagcatggcctagtaaaaatgtggtctgttggagcatgcaacatggtttatgtaaaacttgttttcttatagaaacgagtaaaagttgttttgtccaacactcggaacttctgggctttccgggtacttgtttttcttgaacacgaatttgttaagaggatatgagcaaagttattattggttaggctaaaatgataatcaagaaatttggttttcctc

SEQ ID NO: 16370 - DNA, 2112 bp, Zea Mays
atcgcccagttctctcttctctttctttcttccccttcctacaccgccgcaccccactcccagatcccactgctccccagatccgcgcccgagccctagtccccagatccgccgcggcgccggagatctactcctcgtcttggcgtccgcggcgccatggcgtgcctcgcgatctctctgcagccggtgaacggcccggacatcctactgcaaacgcggtcctggttccccgtctcccgcgccctcgccgccgtctccgcctttcgcctcgcgcgcctccaccttgcacgcggcaagcaacagtcctcctcatcctccgcctcctcggcctcgctcgacgccatcggcgacgacccgctcgccgccgcgtccgggcagctcgttgtcggcgtcgagtcacagtaccgcgtggtgtaccgccttgtcaactccatctacgttctgggtgtcaccaccgcaggctctgaccatgctgcccctgctgtcaacgccttcgccgtcgccgacgctgtcaaccagtccgtctccgtcgtcgttgcagcctgccgtggcgtcgacgtcacccctgagaaggtgcaccgcaagtaccctgaggtctatctcgctctcgacctcgtcctccacggcgttggctccgtccgcctctctcagatcctcgccaccatccatggcgacaacctcgcgcgcatggtcaactcctcgcccgacgccgaagcccgggcccgtggcgcggatccctggcccgtcgtcgaacacctcgcgcaggaccgccacgctgcgagggagggcttctcgggcgcctctttcgagcttccccaggagacgctcgcggctggtgacgaattctcgtctaacatcgcccccgcgaccactgttgctactggggatgaaccaccacctgaggaggcagcacctgtggaaaaggatcctttcgcagccagtgacctgattaacaacaaaccggaggaggcattggtgggtgggttcaaaaagaacaaagagactgcccttgtggttgctgatcctgcagctgcgctagctggattggaggttacgactttgccaccagctgaggcgactaagccgacatttattggagttgaagggtttgagggtgattatggtggcattgagtttggcaacgatgagacttcacttgctgaggcatttgaagggctcaatgcgccatttggtggtggcctggatgcttctgagtttgttacaacaacgaagaaggatcacaaggacaggaccgtcactgggcttgagttgctagtagcaagtgggcagccaccgaatgcagctgctggtactccattggagaatctcttgctgactaagcgcgcagaaatgaccgctcctgagttgtttattgctgaggagatcaatgcagaattcaaggagtctattcttgtgcgtgttggattgaagggtacaatcttcctgcggaccttgccactgaataaggcagcgggtaaggagacagagttctcatttcgtcttgagggcacatcaggaatgaagagggctgcattgcagagtaatgtcttgagtaacctacaaaatggactgttccatgtcaggaccgtgtcgaaagaagaacccattcccctcatgaagtacagcttcctgccgaagcactcacctctccctttgaggatgcgcctagtgaagcgccatagtggaacgttactctcagtgatgatacagtacgcatccaatccaatgctgccccagcctctgagcaatgttacattcgttgttaagcttcctgtggatcctactctgctcaatgtttcacccaaggctgtgctaaaccgggcagagaaagagtttagatggcatatttcagacattcccctgaaaggtccagccggcaggctcagggcgcggatgcctgttgaccaagactccaaagatggtgagctagaggttgttgggatggtgaagtttgcttaccaaggtccattcacattgtctggcattaaactatgcccagccactgatggcattgcccaatttaatgaagttggccataccttctccagtgggagttacctgtgcatttgataggatgtttgagatggtgtgtaatgtggatagagatgaatt

SEQ ID NO: 16371 - DNA, 2026 bp, Zea Mays
ccagaatgaggaaccaaaaccaaacaacaccaatgggcggcgcggcgatatagctagggtagagtagttcacttccccatcaccctctctcggtctcggtctctcctcccctcctacgccaattgctacccgtcgtcgcgtcgcccccctcctaccgtcctacgtcttccacctctccccgcttcctcttcctccctgctgagcggaagcgcgcaagcaatcgctgccttttcttggcgtgcgcagctcctggtcggcacggcagccccccgcgggatctcgcttgctggcctggccgcgcgacattgaggcggggcgcctggagctcggagccgccgtagctggtgttggtgcctcggagccgatcgggtgtctggttcctgatttgatctgcagctgcagctgcggcggcggcggccgacatggcggcttcgggagggctcgagcagtggcagaaggacgggttcttccaggcggccgaggaggtgcaggagtccgcggacttttggagcagtttgagagggctgtaagttcaagcaacgataagtattcattggaagaaggtacagtagcacggcgtcggcagtttgttgtagccattgaggatcagatatctcgtgtagagaaagaaataaatggttctttaatggacaatggcgggcaagggctcaactgggtgaagttagatgacgaagagcgagatgatctagttgctttcctttcagcacctgcagagttctattcagaaatgaagagcacagacatcagtgaccgtgttctatctagacaaaagaatgtgccagttggcaggaacgatcagagtgatccacctttaatcattaaagacatatatgaagtggcacgcacagaaatttctactgttaagagtgatgtttgtggtctagctgaggagttacatggccttagaaggaatttgagttcagggaatgatcattggaagattgacattggtaacaagatggatgatgatagaaaattgtcaactggggttcaggccgcaagtcagacaactccttcatcaagcatccggagaagcgcagaatctataacaagagtgagatggttttggaatagcttgtggaaatccaagagggatgaacaacgcccattaagatatgatatgtcatataatcttgacctcagggttgtatccttattaacacagagatttaatgggctagcggagagaagcagaaattatttgacaagttggaaggaaaattccaggacttctggaaggacgggtgggcttcatatacaaggccaacaacagaacattcagtttggccgttctattcggatcaccctcttactggtgctgagtatctttctgattgtgccatttctcgcctcggcatgacaaggcatgtattgcttcaccggtgaggaacattggggcagcttaccatggtcctgctcgtactacatacagatcatgactggtggtgttctctcgccggcaaatgcagcaaaccaaccatgtctttcctgtgtggtgtggctgctgcatatgtgacaggaaaagaagcacggcggtgaaggtttcaactgtgcaatgcgtgatgctccgataccatgaactcctcaccgggcgcataaccatgctaagatttatcagggttatgataaatttgtgatggctgattgctgccaaaggaggtggctgttctcatctcactactctatatcccacgagtgaaagcaattgtaaaaagttctagagccactctatatcccacgaacgaaagcaactgtaaaaagttctagagctggtaggataagtcctgaatactgttattgataataatacatttaatactgtatttgccaaaccgttcgccgccgctcgtatggttttctgtttagaggtgctcttttgatccaggtttctgcacttgtcctcattttatggtatgcttgccattacccacgaactataattatatgtgccgtttggttaatgaaatgtaatgtaaatggtaatggtaatgattcatgctcaaat

SEQ ID NO: 16372 - DNA, 2485 bp, Zea Mays
ggaagaaagaggctgacatcctgaagccaccagaatgaggaaccaaaaccaaacaacaccaatgggcggcgcggcgatatagctagggtagagtagttcacttccccatcaccctctctcggtctcggtctctcctcccctcctacgccaattgctacccgtcgtcgcgtcgcccccctcctaccgtcctacgtcttccacctctccccgcttcctcttcctccctgctgagcggaagcgcgcaagcaatcgctgccttttcttggcgtgcgcagctcctggtcggcacggcagccccccgcgggatctcgcttgctggcctggccgcgcgacattgaggcggggcgcctggagctcggagccgccgtagctggtgttggtgcctcggagccgatcgggtgtctggttcctgatttgatctgcagctgcagctgcggcggcggcggccgacatggcggcttcgggagggctcgagcagtggcagaaggacgggttcttccaggcggccgaggaggtgcaggagtccgcggacttttggagcagtttgagagggctgtaagttcaagcaacgataagtattcattggaagaaggtacagtagcacggcgtcggcagtttgttgtagccattgaggatcagatatctcgtgtagagaaagaaataaatggttctttaatggacaatggcgggcaagggctcaactgggtgaagttagatgacgaagagcgagatgatctagttgctttcctttcagcacctgcagagttctattcagaaatgaagagcacagacatcagtgaccgtgttctatctagacaaaagaatgtgccagttggcaggaacgatcagagtgatccacctttaatcattaaagacatatatgaagtggcacgcacagaaatttctactgttaagagtgatgtttgtggtctagctgaggagttacatggccttagaaggaatttgagttcagggaatgatcattggaagattgacattggtaacaagatggatgatgatagaaaattgtcaactggggttcaggccgcaagtcagacaactccttcatcaagcatccggagaagcgcagaatctataacaagagtgagatggttttggaatagcttgtggaaatccaagagggatgaacaacgcccattaagatatgatatgtcatataatcttgacctcagggttgtatccttattaacacagagatttaatgggctagcggagagaagcagaaattatttgacaagttggaaggaaaattccaggacttctggaaggacgggtgggcttcatatacaaggccaacaacagaacattcagtttggccgttctattcggatcaccctcttactggtgctgagtatctttctgattggtcagtgcccaacttgccttgttttaaactgtgggaaaagtgataaattactcacatagtacactataaggaaaaaaacacagaaacctgtcatgcttttggattatataatctgccctatcctccgtggatatctcaatggcttgcagttcttgcctgcaggggtttgttttttctatcataaatagcttaaagcataacttcttgtatatccacgcttttggtgtggcattgttttgctatttcttcctctgtttgttatcggttaacatagtctaaaaaaaactacgaccgtgttgcatatactgatgtacagtgttatggcgtatgtttgaaaatttacatttggcaaggcaagtgcaacagatataggtcgaaaccgatgttctgttttcgtcaaatactaattgtcacattatgtgctctgcagtgccatttctcgcctcggcatgacaaggcatgtattgcttcaccggtgaggaacattggggcagcttaccatggtcctgctcgtactacatacagatcatgactggtggtgttctctcgccggcaaatgcagcaaaccaaccatgtctttcctgtgtggtgtggctgctgcatatgtgacaggaaaagaagcacggcggtgaaggtttcaactgtgcaatgcgtgatgctccgataccatgaactcctcaccgggcgcataaccatgctaagatttatcagggttatgataaatttgtgatggctgattgctgccaaaggaggtggctgttctcatctcactactctatatcccacgagtgaaagcaattgtaaaaagttctagagccactctatatcccacgaacgaaagcaactgtaaaaagttctagagctggtaggataagtcctgaatactgttattgataataatacatttaatactgtatttgccaaaccgttcgccgccgctcgtatggttttctgtttagaggtgctcttttgatccaggtttctgcacttgtcctcattttatggtatgcttgccattacccacgaactataattatatgtgccgtttggttaatgaaatgtaatgtaaatggtaatggtaatgattcatgctcaaat

SEQ ID NO: 16373 - DNA, 2179 bp, Zea Mays
aaatatagttgaggctagtagtggtggggaagaaagaggctgacatcctgaagccaccagaatgaggaaccaaaaccaaacaacaccaatgggcggcgcggcgatatagctagggtagagtagttcacttccccatcaccctctctcggtctcggtctctcctcccctcctacgccaattgctacccgtcgtcgcgtcgcccccctcctaccgtcctacgtcttccacctctccccgcttcctcttcctccctgctgagcggaagcgcgcaagcaatcgctgccttttcttggcgtgcgcagctcctggtcggcacggcagccccccgcgggatctcgcttgctggcctggccgcgcgacattgaggcggggcgcctggagctcggagccgccgtagctggtgttggtgcctcggagccgatcgggtgtctggttcctgatttgatctgcagctgcagctgcggcggcggcggccgacatggcggcttcgggagggctcgagcagtggcagaaggacgggttcttccaggcggccgaggaggtgcaggagtccgcggacttgatggaatcagtctatagaacttggatgcgtgagcgtagtaatggatctggctcagaggaggtagacgatttgcaaagggagcttcagacagctttaggaactgcaaaatggcagttggagcagtttgagagggctgtaagttcaagcaacgataagtattcattggaagaaggtacagtagcacggcgtcggcagtttgttgtagccattgaggatcagatatctcgtgtagagaaagaaataaatggttctttaatggacaatggcgggcaagggctcaactgggtgaagttagatgacgaagagcgagatgatctagttgctttcctttcagcacctgcagagttctattcagaaatgaagagcacagacatcagtgaccgtgttctatctagacaaaagaatgtgccagttggcaggaacgatcagagtgatccacctttaatcattaaagacatatatgaagtggcacgcacagaaatttctactgttaagagtgatgtttgtggtctagctgaggagttacatggccttagaaggaatttgagttcagggaatgatcattggaagattgacattggtaacaagatggatgatgatagaaaattgtcaactggggttcaggccgcaagtcagacaactccttcatcaagcatccggagaagcgcagaatctataacaagagtgagatggttttggaatagcttgtggaaatccaagagggatgaacaacgcccattaagatatgatatgtcatataatcttgacctcagggttagatttaatgggctagcggagagaagcagaaattatttgacaagttggaaggaaaattccaggacttctggaaggacgggtgggcttcatatacaaggccaacaacagaacattcagtttggccgttctattcggatcaccctcttactggtgctgagtatctttctgattgtgccatttctcgcctcggcatgacaaggcatgtattgcttcaccggtgaggaacattggggcagcttaccatggtcctgctcgtactacatacagatcatgactggtggtgttctctcgccggcaaatgcagcaaaccaaccatgtctttcctgtgtggtgtggctgctgcatatgtgacaggaaaagaagcacggcggtgaaggtttcaactgtgcaatgcgtgatgctccgataccatgaactcctcaccgggcgcataaccatgctaagatttatcagggttatgataaatttgtgatggctgattgctgccaaaggaggtggctgttctcatctcactactctatatcccacgagtgaaagcaattgtaaaaagttctagagccactctatatcccacgaacgaaagcaactgtaaaaagttctagagctggtaggataagtcctgaatactgttattgataataatacatttaatactgtatttgccaaaccgttcgccgccgctcgtatggttttctgtttagaggtgctcttttgatccaggtttctgcacttgtcctcattttatggtatgcttgccattacccacgaactataattatatgtgccgtttggttaatgaaatgtaatgtaaatggtaatggtaatgattcatgctcaaat

SEQ ID NO: 16374 - DNA, 2278 bp, Zea Mays
aaaatgcccacaaaactgtggaagcagaaaacttccctgctaaaaaaataatatatgaagtaacttgagtacttgacaactagtagtactgaaaatatagttgaggctagtagtggtggggaagaaagaggctgacatcctgaagccaccagaatgaggaaccaaaaccaaacaacaccaatgggcggcgcggcgatatagctagggtagagtagttcacttccccatcaccctctctcggtctcggtctctcctcccctcctacgccaattgctacccgtcgtcgcgtcgcccccctcctaccgtcctacgtcttccacctctccccgcttcctcttcctccctgctgagcggaagcgcgcaagcaatcgctgccttttcttggcgtgcgcagctcctggtcggcacggcagccccccgcgggatctcgcttgctggcctggccgcgcgacattgaggcggggcgcctggagctcggagccgccgtagctggtgttggtgcctcggagccgatcgggtgtctggttcctgatttgatctgcagctgcagctgcggcggcggcggccgacatggcggcttcgggagggctcgagcagtggcagaaggacgggttcttccaggcggccgaggaggtgcaggagtccgcggactttctatagaacttggatgcgtgagcgtagtaatggatctggctcagaggaggtagacgatttgcaaagggagcttcagacagctttaggaactgcaaaatggcagttggagcagtttgagagggctgtaagttcaagcaacgataagtattcattggaagaaggtacagtagcacggcgtcggcagtttgttgtagccattgaggatcagatatctcgtgtagagaaagaaataaatggttctttaatggacaatggcgggcaagggctcaactgggtgaagttagatgacgaagagcgagatgatctagttgctttcctttcagcacctgcagagttctattcagaaatgaagagcacagacatcagtgaccgtgttctatctagacaaaagaatgtgccagttggcaggaacgatcagagtgatccacctttaatcattaaagacatatatgaagtggcacgcacagaaatttctactgttaagagtgatgtttgtggtctagctgaggagttacatggccttagaaggaatttgagttcagggaatgatcattggaagattgacattggtaacaagatggatgatgatagaaaattgtcaactggggttcaggccgcaagtcagacaactccttcatcaagcatccggagaagcgcagaatctataacaagagtgagatggttttggaatagcttgtggaaatccaagagggatgaacaacgcccattaagatatgatatgtcatataatcttgacctcagggttgtatccttattaacacagagatttaatgggctagcggagagaagcagaaattatttgacaagttggaaggaaaattccaggacttctggaaggacgggtgggcttcatatacaaggccaacaacagaacattcagtttggccgttctattcggatcaccctcttactggtgctgagtatctttctgattgtgccatttctcgcctcggcatgacaaggcatgtattgcttcaccggtgaggaacattggggcagcttaccatggtcctgctcgtactacatacagatcatgactggtggtgttctctcgccggcaaatgcagcaaaccaaccatgtctttcctgtgtggtgtggctgctgcatatgtgacaggaaaagaagcacggcggtgaaggtttcaactgtgcaatgcgtgatgctccgataccatgaactcctcaccgggcgcataaccatgctaagatttatcagggttatgataaatttgtgatggctgattgctgccaaaggaggtggctgttctcatctcactactctatatcccacgagtgaaagcaattgtaaaaagttctagagccactctatatcccacgaacgaaagcaactgtaaaaagttctagagctggtaggataagtcctgaatactgttattgataataatacatttaatactgtatttgccaaaccgttcgccgccgctcgtatggttttctgtttagaggtgctcttttgatccaggtttctgcacttgtcctcattttatggtatgcttgccattacccacgaactataattatatgtgccgtttggttaatgaaatgtaatgtaaatggtaatggtaatgattcatgctcaaat

SEQ ID NO: 16375 - DNA, 893 bp, Zea Mays
cgaacagccatatctgagcaatgggaatagtcctgcctgtcagttaaaagggttaccaaagttaggaaccactaagcaacatgaaattactaagtcactggaaaatgtgtaaagggagaaatttcagagagtgtgaatagattgcaaggtacaatgacaagcttaagtgtatcgctattagccggcagtgcactaacagcgcagaacagaacaaacttggtacagtaggatgtgacactggcacactgcgtcccctatgcagcagccggctcaacccgtgaatagttggcagagactgtacttacagaggtcaatacatggagctaattagttggaaatgaaatagaagagctcccgagacgcaaatccacgtagtgactcactctgcgcccagaacaatacgaacatcactcccgacccagcacaggcacacaactcagcaccgcctagagaacgtccgttccacgtagcccgaagaggattcaacggcctccgaaggccacaacgaacatcggttgagtcgacaggaaataagagtgattcggcaccgcggcgactacctcctgcacccggaaatcgccagtggcggcgaggcgcggcggtgcagggagaagggcgacgaggcgcggcggcgaaggaggaagggcggcgacgacgacagccacgggggcgccgagccgtggcgccgcagcagtggcgccggcgtcacctgcgccgccaccatcgaccgtgcggaccgcctcaggttgtacccggctcctctcctccccgcagcgccgccggcggacaaggacaagcagaaaccgaggggcgccgttttctcgcggagcaggcgcgagcacggtcgcgcgggtgtgcaggtgcaggggacgctcgtccgcggcgcggcctag

SEQ ID NO: 16376 - DNA, 232 bp, Zea Mays
  misc_feature (1)..(2): n is a, c, g, or t
nnctcttgtactttgtagtgagcagtttaacaatgttcctagctgactcgatatcgtcaactaccaaaactttgtcgtagatgctagcaagtgcctcccgtgctttcaaagattcctcagagaaggccgctttagttgggaaaggtgaaaccaccttttttacaacagtttttttctttttgtcatcaccatcatgaactttatcctcaagctccaaaattacctctgtatt

SEQ ID NO: 16377 - DNA, 2964 bp, Zea Mays
ccccgcacttttagcgttctctcgcgcatttcgtttcttggtggggtgggtgggagtgggactggaagaggaagagcgcgtgcagcttctggttcctgtttcccgtttccgttccctcccgcttaaaatcttcaaaactgccgagattgaaggtttcctctttgtccccaagaagcgagaggggaaaggcgtttcatttgggggaaggacgaaggagggcggccgccggccagcgccaggccccaaccatggggaagcccccgggggccaggaatccggcggaggcggaggccgatggcgacgacgcggtgttcctcgagctgtcgcgggagctcaaggaggagggcacgcggctgttcaacaggcgggacttcgagggcgcggcgttcaagtacgacaaggcggtccagctgctccccgccgggcggcgcgtcgaggcggcgcacctccgggccagcatcgcgcactgctacatgcgcatgagccccgcggagttccaccacgccatccacgagtgcaacctcgcgctggaggcggtgcccaggtacagcagggcgttgctccgccgggccgcctgcttcgaggcgctgggcaggcccgacctggcgtggggggacatccggacggtgctgcgttgggagcccggcaaccgcgccgcgcgccagatctcggacagggtgcgtacggcattggaggataagggtatctcggttgccttggatgtgctgccagaggatgagaatgagattgctagcgccaaaggagaggagaggaagaaatctcgtaataagcgttttgattcggttgcgggggggcgggagggtgaaaatggtattgcgctactagaatctgcttccacggagaagcaggctggcccgagacaaacaaatggaacagggaatcatcaggatcatactgaagatagtgaatccaatggtctcgagaagctagaacaaagtactgagacgggagagaaggacatgggcaaaaagcgaggtgcacacgctgctggaaagaaaccgaggtgtggtgagagcaagcagcaaaagcattctgcagtgaatcattgtcaggacaacattggtgccaaggaggaagtcatgaaggatgtgaagctggtctttggagaggacatcaggtgtgctcagatgccagctaactgctctctgccacaattgagagaaatagttcagaacaaattcccgtcactgaaagcgtttctgatcaagtataaagacaaagaagaagacttggtgacgataaccttgtctgaggagctaagctgggcaagcaatctggcagtttcgcaagtgccaatccgattctatgttgtagaggttaatcatgttcaagagcttggtgtggatggggtcaggagacgtccttcctttgccacgttagagagaaatcgtgatatcatgttggataatgggaccattgggcatgatgttgagcataagcattacgctgatgactggatggtacagtttgcacagatatttaagaatcatgttggttttagttctgatgcatatctggatctccatgaccttggcctgagactgcactatgaggctatggaagacacaatacaaagagaagaggcacaggaaatatttgaggttgcagagtccaaatttaaggagatggcagcactggcattgtttaactgcggcaatgtccacatgtctcgtgcaagaagaaggccatgcttggctgaagatcctttacaggaatttatacttgagaaagtcaatgtttcatatgattgggcatgcacagaatatgccaaagctggtgcaatgtttgaagaagctgtcaaaactaaatctgacttttttgaaggacttattgctcttggccaacagaaattcgagcaggccaaactctcttggtattacgctcttgcatgcaagataaatatggaaactgaagttttggagttgttcaaccacgcagaggataatatggagaagggaatggatatgtgggaaagaatggagacattgcgcttgaagggactgtctaaaccaagtaaagagaaggttgtacttgagaagatggtcttagaaggttttgtgaaggatatatcagcagatgaagcatttgaacaggcttcaagcatacgatcacatataaatatcttgtggggaaccatcctctatgaacgttcagtagttgaattcaatctgggacttcccagctgggaggagtcactgactgttgccatggaaaaatttaagatcggaggtgcctctcaagctgacatcaatgtgattgtaaagaaccattgtgctaatgaaaccacccaagaagtttcaaggttgaggagatagttcaggcatggagtgaaatgcatgatgctaaaaattggagaagtggacccctgtatttccggcttcaaccagtattccgacgtagagctccaaagttgcatcatatactagagcatatgcactatgcataactcctaactactattgtatcagatttgttcatcttagaagctttgttgcacttactcatggaaaaaaggaataaacggaaaagaaaagcgataatctatgcattatcaagttatagatttgctcaatctaagaagaaaaaaaaaagattcgctgactcttgtggttggctgaccatgtagattgcattttgctgtaaagtttactgggttcctaatcatctatgtagtaggtggcgttatatatcctctctcaagggatattttgcatagtgctacacttccttctgttttacttgtggaagtgctaaaatagggtttgtactcttaggtcgctataggaatggtaggctcatgtattttacttggagggtttattagtaggtctcatctaaagtatgttacactttagcgacacgtggatacttgatgtgttcaaaacagttgttgtaacttgtagcacagatgctagagcatagtgctttttaaaattgttctta

SEQ ID NO: 16378 - DNA, 1750 bp, Zea Mays
caatcagtcatcaccgccgcccgacggactgtgtccccactccccagtgagccgccgtgacctcccagccgccccatgctcaccctccccggtaccctccgccgcgcgcgcgctcctcctggcctccctccccgccgccacctctcccgcctcctggaccgttacggcttcgtggccccggactccctcaccccggccccgcgagaacctcacagcgacaccgccgactccgccgccgctgcgaagaagcgccgcgcgaagaagccgccctaccgccctccgtcctcgctggaccgtggcggtcgcccgcccgcgcactccgacctccccttcgacttccgcttcagctacaccgagagcaccccggcctccaagcccatcgggctgcgcgagcccaggtactccccgttcgggcccgggcggctcgaccggccctggacggggctctgcgcgcccgccgtcgacgctaccctgcgggacgtcgaggcagaggacccccttcccgacgccgagagggggcttgaggaggcgcgccggcgagagcgggagcgggtactgggagagcctctcacccccgcggagcgtgcgttcttggtcgacaggtgccagaagaaccgcaccaagcgtcagatcaaccttgagatgggtttactcacaacatgctaagcgacgttcacaacaactggaagacctgcgaggccgtcaggataaaatgcctcggcgtgccaacggtcgatatgcaaaacgtgtgccatcagcttgaggataaaactggtggcctgatcatccaccggcatggtagcctgttgatactgtacaggggtaggcactataatccaaagaaaagacctgttgttccgttgatgctgtggaagcctgctgaacctgtttacccgaggctaatcaaaacgacaatagaagggctcacagttgaggagacaaagcaaatgaggaagaagggcctacatgttcctgttttgacaaaacttgccaagaatggatattatgctagtctcgtgccaatggtccgggatgcctttttgacggatgagctggttcgaatagactgcaaaggattgccaaaaagtgactataagaagattggagttaagctcagggaccttgttccttgcattcttgtctcatttgacaaggagcaaatcattgtttggaggggaaatgaagatgggagcctacaagatcgaacacagaagtcattcctttcatttatcgactcagatgttgcatcagtgaaggatgagactggtgatcaggaacaaataccaagtgatttgtcatatgatgggtgttctgagatgaagtgccaaattacaaaagtaatttaggacctagactcttttaggttgatctgacatatccagaatacacagttcacatagttgcaagctctacacatcaacaatggaattgacaagtcctcaatgtaaaagtttgtgtattctctaaccatgatagttgcattgtatcacatgtaagccatggtaatttctagagaaaattccactgcaattttgtccaagaccttacttgccatgccattgtaaatgttctaattccttatattaccactcggatgcaatttcttaccttttcatgccattgctagtggcatagaagggtaaaaaagctgcatgttctaatctcttatatatcactgatgatgacatagaagggtaaaaaaaaatgcttggcatggaagggattaagatatttgcgatggtaattaagg

SEQ ID NO: 16379 - DNA, 2444 bp, Zea Mays
cctggccctcgcggagccgtttctgcgtttggccaaacaaattcgaatttacttctgctctgccgcggattcgggtgtctggcaactggccgtgccgtccttctcctcgctgcaaatttcgtgctctccgagaccaaaacttagagagtgatgccttgcatagcttgaggactaacttaaatgatcctaataatgttctacaaagttgggatcccactctggtcaacccctgcacttggtttcatgttacctgcaataatgacaacagtgttatcagagttgatcttggaaatgctgcactatcaggaactttggttccgcaacttggccagctcaaaaacttgcagtacctggagctctacagtaataatatcagtggcactatacctagtgaacttgggaatcttacaaacttggtcagtttggatttgtacttgaacaacttcactggtcccataccagattcattggggaagctattgaagctgcggttcttgcgtcttaacaacaacagcctttctggttcaattccaaaatcgttaactgctatcactgcactccaagtcctggatctgtcaaataacaatttgtctggagaagttccatcaactggttccttttcgttattcacccctatcagttttgggaacaaccctaatttatgtggtcctggcaccacaaaaccttgtcctggtgctcctcccttttctccacctcctccatacaaccctacaacccctgtgcaatcaccaggaagtagctcttccagtactggagcaattgctggtggagtggctgctggtgcagccttgctatttgctattcctgcaattagttttgcctattggcggcgcaggaaaccacaagaacatttctttgatgtacctgccgaggaagatccagaggtgcatcttggccagcttaaaagattttcactacgagaattacaagttgcaacagatggcttcagcaataagaacattcttggaagaggtggatttggcaaagtctacaaaggacggctggcagatggatctttagttgctgttaagagactaaaggaggagcgcacgcctggtggagaattacagtttcaaacagaagttgagatgattagtatggctgtacacagaaatctattgcgtcttcgtggattctgtatgacaccaacagaaaggttgcttgtgtatccatacatggctaatggaagtgttgcgtcacgtttaagagaccgaccaccagctgaacctccgctagattggcaaacaagacaaaggattgcattgggttctgctaggggcctgtcttatttacatgatcattgtgatccaaagattattcatcgtgatgtcaaagctgcaaatattttgttagatgaagacttcgaagctgtggtgggggatttcggtttggccaaactaatggattacaaggatacccatgtaactactgctgttcgaggaacaattgggcacattgcacctgaatacctttcaacaggaaaatcctctgagaaaactgatgtatttggctatggaattactcttttagagcttattacaggacaacgtgccttcgatctagctcgtcttgctaatgatgatgatgtcatgcttcttgactgggtcaaggggttgctcaaggagaagaaactggagagtctggtcgacgaagatctagaccacaactacatcgatgtcgaggtggaatctctgatccaggtggcgctcctctgcactcagagcaaccccatggaacgtcctaagatgtcggaggttgtgaggatgcttgaaggcgatggtctcgccgagaggtgggaggagtggcagaaggtagaagtggtacggcaagaggttgagctaggccctcatcgaacctcggaatggattctcgactccaccgacaacctccacgctgaacagctgtcagggccgaggtgaaggcaagcttgagatcagactcccactaattctggtacggaggagtattttgcaagggcacaatagagatgtgtatcaatcatcctagtaaaaaaaaaatccaccaatttgttaatataccagtcagtgggtgaagcgaagattggcagccatggctttggatgtatattgcttgatgtggtcagccatgccttttgagttcttctatgccagggcagcagagctggaggagcttatgtcatgtgcagttgccgcatgcgccaatgctcctgtgtttgtaaaggtcggagctgaggtgctgcggctatcatctgggtccgcgataagttaattgtactgatagttgatatctaactactattttgtgtatcaaatgaaaatgttggaactaaaggatcggatagtataggtgtcttatgaacctgttctggctggcaaaattaaccagaaatatggatttgccacttcaactatgtcagcagatttgcgcatttgccactccat

SEQ ID NO: 16380 - DNA, 2449 bp, Zea Mays
gcgaaaaggagcccaggcgataaaaaagaaaaagggcgaggccgtcgaaaagggaagcgcagccgcagagtgggtgaaaggtggggggacgattcggagagatcgagaaagaggagagagagagggacgggggcggggccggcggaagcggagcctgcgcccgccggaccgaatcctcgccggatcgcccggcctgccggggcggcgctgcggactgcctgatccggctggaatggcggcgggccgacgagggatctagcggaggtgggtgtcgcgcggcaatggctgcggcggaggcgcggcgccggtcagcggtctgggccctgctgccgctgctgctgcggctgctccacccggccgcgctcgtgctggccaacaccgaaggtgatgccttgcatagcttgaggactaacttaaatgatcctaataatgttctacaaagttgggatcccactctggtcaacccctgcacttggtttcatgttacctgcaataatgacaacagtgttatcagagttgatcttggaaatgctgcactatcaggaactttggttccgcaacttggccagctcaaaaacttgcagtacctggagctctacagtaataatatcagtggcactatacctagtgaacttgggaatcttacaaacttggtcagtttggatttgtacttgaacaacttcactggtcccataccagattcattggggaagctattgaagctgcggttcttgcgtcttaacaacaacagcctttctggttcaattccaaaatcgttaactgctatcactgcactccaagtcctggatctgtcaaataacaatttgtctggagaagttccatcaactggttccttttcgttattcacccctatcagttttgggaacaaccctaatttatgtggtcctggcaccacaaaaccttgtcctggtgctcctcccttttctccacctcctccatacaaccctacaacccctgtgcaatcaccaggaagtagctcttccagtactggagcaattgctggtggagtggctgctggtgcagccttgctatttgctattcctgcaattagttttgcctattggcggcgcaggaaaccacaagaacatttctttgatgtacctgccgaggaagatccagaggtgcatcttggccagcttaaaagattttcactacgagaattacaagttgcaacagatggcttcagcaataagaacattcttggaagaggtggatttggcaaagtctacaaaggacggctggcagatggatctttagttgctgttaagagactaaaggaggagcgcacgcctggtggagaattacagtttcaaacagaagttgagatgattagtatggctgtacacagaaatctattgcgtcttcgtggattctgtatgacaccaacagaaaggttgcttgtgtatccatacatggctaatggaagtgttgcgtcacgtttaagagaccgaccaccagctgaacctccgctagattggcaaacaagacaaaggattgcattgggttctgctaggggcctgtcttatttacatgatcattgtgatccaaagattattcatcgtgatgtcaaagctgcaaatattttgttagatgaagacttcgaagctgtggtgggggatttcggtttggccaaactaatggattacaaggatacccatgtaactactgctgttcgaggaacaattgggcacattgcacctgaatacctttcaacaggaaaatcctctgagaaaactgatgtatttggctatggaattactcttttagagcttattacaggacaacgtgccttcgatctagctcgtcttgctaatgatgatgatgtcatgcttcttgactgggtcaaggggttgctcaaggagaagaaactggagagtctggtcgacgaagatctagaccacaactacatcgatgtcgaggtggaatctctgatccaggtggcactcccactaattctggtacggaggagtattttgcaagggcacaatagagatgtgtatcaatcatcctagtaaaaaaaaaatccaccaatttgttaatataccagtcagtgggtgaagcgaagattggcagccatggctttggatgtatattgcttgatgtggtcagccatgccttttgagttcttctatgccagggcagcagagctggaggagcttatgtcatgtgcagttgccgcatgcgccaatgctcctgtgtttgtaaaggtcggagctgaggtgctgcggctatcatctgggtccgcgataagttaattgtactgatagttgatatctaactactattttgtgtatcaaatgaaaatgttggaactaaaggatcggatagtataggtgtcttatgaacctgttctggctggcaaaattaaccagaaatatggatttgccacttcaactatgtcagcagatttgcgcatttgccactccat

SEQ ID NO: 16381 - DNA, 583 bp, Zea Mays
ctctaacattggccggatgttacaaattcaaatacgtactcactagtactgatatgtgtgatctctaacattggccggatgttacaaatttgcagcagcaccggtgatgaagcgtagaacgagaagccaaacaacacgaagcagggcatggggacacaaagggcggaagaacccagggatgaaaaaacaattccccgtgcgatctcccacccagcacacaaaaccaacatctttattatgatgcctgccatgcgagcgcacccaacatggcaaaggccttcaagatgtcacatctcacaattgttcaaccatgctttagaagcccgtcgacgcctcccatttgtccagtccgtcaagatccagattcccccggaacgtcatagctctgaaggtcggcagatatcaattcgacggatcagaaacctccaggcacaaaaacaaggcagccttgtctcgcttcgagcgttgttcgatcggaccaagcatctgatcctgaagccacgcggaggctcagatctagacgagaagaggatttcatcaggcaagaggaacgcggcgacttttcttcaccaaggtccaaggc

SEQ ID NO: 16382 - DNA, 6809 bp, Zea Mays
ctaatttgggggaagaatgtcttcaaagtggcggtcactgcagcatcggcaccggtacacctacacctccattgtgttcccgaagcattaccttgaggccctaactctcgtgccagctgagatctcctcatccaatttctttgtccgattgagcaacttgatttccctgacctccacttactcccaagttgttgtggtcaaggatcttgcctcggcatatgtgcagtttctgtccactacagggactcctgatgaagcagtgctcgctgccacaaagctttatttggagatcctctttcttgagaattccctccctctccaccggacactcatatcagtgcttgccaagtgcaagaaattctccacagtgatcagtgggtgttttgccttgctctgtgaggagtatggtggctctggtagtaaggcaaagaagagatttatggtatctcgagcagccttgtcgcttattgggtacccaaagttgggatttttggatgaggcagtagagaggtgtgcagagatcatggcactggatgttgttgatgggcttgatggagtgacaaaagacattggtgaagggtcacggccatctccagtcgtgatggagcagtgccaggaggccatgtcttgcatgtactacttgctgcagaggtacccgtataagtttattggccttgacaaggcgtcaagtgtcttcaagagtgctgtcaggacaatactatctgttcttaagtcatctgccttttcaagggattgcctggtggcctctggagtaagcttctgtgcggcaattcaggttttcatgagcacagaggagatttcctggttcatttctcaaggtctatttggcatctatgcaaatcatgaagatagaaaaaatcagtctgtgcacaatgtattttcggactttgatctgtgtgaacaaatcagagacctttcagtgttgagtagactttgtctactaagagggattttgacatctattccaaggacagtactcaacatgcaccaacttcattccagtggacctttatggactgttttatatgatggaattttacctgagctttgcaagcattgtgagaacccagttgatagccacttcaatttccatgctcttacagtgacacaaatatgtttgcagcagataaagacatcggtttcatctgatatcaccgacttctctggggactataagcctttttcaagagatgttgtcaaccgtatattgggaatcatatggcgcaacctggaagatcctttgagtcagacagtaaaacaggtgcatttgatctttgatctcctattagatattgaactatgtattgcatcagaagaccgtgaacataacaacaacttgttcctttgcaatgttgcaaatgatttacttcgcttaggtccacgatgcaaagggagatatgtccctttagcttctttgacaaagcgattgggtgccaaatctcttctaacattgaaatcaaatctgctttcagaaacagcttatgcgtacatagatgatgatgtttgttgtgctgtcaccacatttttaaaatccttcctggagactttaagaggtgaatgttggaatgacgatggtgttgagctaggatatgatgccttcagagctttgtgcttgcctcctttcatgcggggacttgtatctggaaattcaaaactacgttctaacttaaatacttatgctttacctgctctaattgaagttgatgcagagagcatattcacaatgcttggattcatctccattggccctagcacaaatgaaactaaactagatgttgttttgaaaaatgaccagtgtatagctgcactggtttctctgcttaaggtctcacggaatctggctcttgttgaaggggacattgatttagatcctgatgaattgtcacagattcagcagatggatagtaagggtgctgcagttatatctgttaaagggattaaagttacagttccttttaattggtttgctttggcactgacacacagtgatgaaagtctccgtatagatgcagctgaatccctctttctaaatccaaagacatcaagtcttccatcctccttggaactgagcttgctcaaagaagctgttccgttgaatatgcgttgtagctcaacggcatttcaaatgaaatggacaagtttatttcggaagttttttgctagggtgcgaactgcacttgacagacaggtaaaacaggggtcttggattccatcattaacgtctagtgttaaaggggctggctctattgatacttctaaggccactgttgtcaagagggctgaagatctcttccaattcatgaagtggctgagttcctttctgtttaattcttgttacccctctggcccttatgaaaggaaaacaattgcaatggagctcattcttacactactagatgtatggcctatttgccgctctgaagggaaaattgatctttatccttacaatgatagcataatattgccagactcaacaatttcatttgttgggtctataattgatagttgggacagattaagggaaaactcttttcgcattctactgcagttcccaacaccgcttcctgggatttccttgagtacatccataaatgatgttatcagatgggcaaaaaaacttgttctaagcccacgtgtccgggaaagtgatgctggtgctttaaccttccgccttatatttaggaagtatgttttgcagcttggatgtattcttgtattttctaaagaaagtgattgccttgaatgttatacacaatctatgaatggagatacagaagttactagtcaaaacccagttgcacagtatatatcttcactcattcaatggctctgtattgttgtcgaagagggtgagagggatctctctgaagcatgtaagaagagctttgttcatggagttcttcttactctgcgctacacatttgatgagatggattggaactctgaggtagtacaatcatgtatttctgaaatgaggtacctggtagaaaaactgcttcaactcataatgcgtgtaacttcggtggccctatgggtggtttcttcagacgcattgtctctgccatatgacatggatgacatgattgatgatggttccttcctctcagatatatatgatgatcaacctactaccacttcagaaagagaggagaagaatgcaaaaccagggagtaatggcaaaccagccgaacaagttgttatggttggttgctggcttgctatgaaggagtttactttttggaaccatcatcaggaagataccattgcctggctgttctcattcagcttcatctcagaatggcttgcctgacagtattgaagagacaagtatatctgaagaaattcttgatgtggggcagttaaagatgatgggtgaccattttttacaggttcttcttaaaatgaagcataacggtgcaatagataaaacaagggctgggtttactgccctttgcaaccggcttctttgctcaaatgattcaaggctgtgcaaaatgacagagtcatggatggtgctactaatggataggacaattgctaaagggcaaactgtggatgatttgataaggaggagtgcaggaattcctgctgcatttatcgccctgttcctggcagagccagaaggaacaccaaagaaactacttccaagggcattagaatggctgatagagtttgctaagaactctttagctaatttccagaaagactccaaccagaggtctggagtaatgaaagagctgttggaatcacagtcagaaactacaagtgtatattctaatggtaacctatctaaaggtcgagatgagggtgttgttcccactgtgcatgtgttcaatgtgcttaaagctgctttcaatgatgcaaatctggcaaccgacacttcgggtttcagtgctgaagcaacaatagttgctatacgagcattttcatctccctactgggaagtgcgcaatgcagcttgccttgcgtatactgcactagttcgtcgcatggttgggtttctgaatgtgcagaagcgtgaatcagcacgacgatctttaactggccttgaattcttccacaggcaacaattgagtatcttttacatgatacatggacaaattgaccagaatttttttagcatcgttgctgctttgaggtatccagcccttcatcctttcctttctagtgaactgcaaaccacaactgaacaactagctgatggagtgtccagcaatttggagtcacacattacaaaagcaatacaccctagcctgtgtccgattcttattcttttatcaagacttaagccttcacctataagctgtggaactgatgattctttggacccttttttgcttttgcctttcatccaaagatgtgctacccagagtaactaccgggtccgtatccttgcatcaagggcattaacttgtttggtatctaacgagagattgcagtacgttattagtgatatactggataatttacctcgtggaagtcacaaagcaatggctcacagtgttcagcatactgatcctgccatatcagctaatatgggaaaagcaaatgtacttctgctgtctaagtcattcaattcaatacatggccttttgctgcagctggcttctcttctggataacaactttagaggtttgacagacggtagcatgaaggatcagattattggcctattactggaggttctttcaagatgctcttggcttggctgcacgaaattatgctcatgccctatcgtaattacatcttacttgcgggtattggatctcatgcttgatgttgcaaggacagggaaaagcagacatactgaagtcattcaggcattgctgctagagttaacttcccagtgcttgagcaacacagcatcaacccagtacgcattccatgatccaacccgtattgaactaaaacaacaagcaactgaatcatttttgagctgtgttggtctttctaagaaaaccgatgaaactaacgatgatgatgtgcagttgcaaatactcggtgaaccaactttagagatgcctagagtggattactcccttcatgaagtacacaaggagatcctgtcatgtctcactgatccttcatatgatgttagaattacggtgctgaagaggattctttggctcacaaaatcaatcagacatggttatgcagataacattttgcaccagtgggcaggagttaatctgcagcctgctttaatggaacggttgtttgtggaagaacaccctaagtgcctttattataatctgaagatcatcttttcatggaacatggaattcccattcaacaatggagaagattctagcacacttttgtccttgtgggataggttagttcatttaaacagcaccatgtcacatgcaaaaacgagagaaatagttctatgttgcatgggtatgtgcatgaaattgttcactaaacaatctaggggtggtatttcaatggattgtcttaagaccagtgagatctctgcatcctttgtcagaatcaatgaaggggatggattatctgatgccatgcttagattaaacttgtttgtcacacttgtcaagaaccaaagtgaaccatcagaaagcatgaatgctcgacgggctgctgctgaggcaattgttgcttctggtcttcttgaagaagcaagctacgttgcttcatctgtgtccaacatgtactctccttcagaatttgatgaagaccataccaaagagaaatgcatggaagatagcgtttttgaatttgttagtctttatacatgcaagatacttgacttgtggtttgtatgtattcagttgctggaggatgaggatgcatatctgaggcaaaaacttgcgaaggatattcagaaaataatcgctaagggttcagctaataccttctgtgatgattccacaccactacaagttgatagagtcattgaattaagcttggactatttaacttctttgtttggcctctggctgaaatacgttgaattcttgttaaggatagtcttgggcactggaaacgctctgaactcccgtggcgatttggtccgtcagatatttgataaagaaattgataaccaccatgaggagaagctattgatatgtcaaatctgctgttcaaacattcagaaacttctgaattcaaaatgccagatggaagcaggagcagagactaaactgttcctgcagaattggagggagatatttctaaagcagctcacatcgctgactggtggctatattgagaaagaggggaagaacgattggattggcggcataggtaaccacaaggacgtgttcatatcagtgtatgcagtcctactcggtttatacgcgctcacgcagtctggctctctggatcaattggaggaccactgtgcagtttatttgcaggaatttgcaaaccttgaaaggtctatcacaccattcctcaagaacccgttgatttctaatctttacgctctggtaaaattgtcacacgagaggttcatatcatcagataagcctgaggaccaagtgggtgattcaggatcaagttttgacccatattttcttatcagatgattttcgctaatgtactagtaattcttcattgttattcctccgttgtaagactcaatactaattgcttttttatacaaattaccatactatagattctttacttgatgccccttctctgtgtatcagtgcattttaagtgccttgggttttctagcactcaaaaaatgtatgacaaggttgtgactaacgtccgaacaactgataatgatataaatatttttccgattaacataggac

SEQ ID NO: 16383 - DNA, 3691 bp, Zea Mays
agctaatttgggggaagaatgtcttcaaagtggcggtcactgcagcatcggcaccgatatatatgatgatcaacctactaccacttcagaaagagaggagaagaatgcaaaaccagggagtaatggcaaaccagccgaacaagttgttatggttggttgctggcttgctatgaaggagtttcacgctattgtggcattgcaggtcagtttactttttggaaccatcatcaggaagataccattgcctggctgttctcattcagcttcatctcagaatggcttgcctgacagtattgaagagacaagtatatctgaagaaattcttgatgtggggcagttaaagatgatgggtgaccattttttacaggttcttcttaaaatgaagcataacggtgcaatagataaaacaagggctgggtttactgccctttgcaaccggcttctttgctcaaatgattcaaggctgtgcaaaatgacagagtcatggatggtgctactaatggataggacaattgctaaagggcaaactgtggatgatttgataaggaggagtgcaggaattcctgctgcatttatcgccctgttcctggcagagccagaaggaacaccaaagaaactacttccaagggcattagaatggctgatagagtttgctaagaactctttagctaatttccagaaagactccaaccagaggtctggagtaatgaaagagctgttggaatcacagtcagaaactacaagtgtatattctaatggtaacctatctaaaggtcgagatgagggtgttgttcccactgtgcatgtgttcaatgtgcttaaagctgctttcaatgatgcaaatctggcaaccgacacttcgggtttcagtgctgaagcaacaatagttgctatacgagcattttcatctccctactgggaagtgcgcaatgcagcttgccttgcgtatactgcactagttcgtcgcatggttgggtttctgaatgtgcagaagcgtgaatcagcacgacgatctttaactggccttgaattcttccacaggtatccagcccttcatcctttcctttctagtgaactgcaaaccacaactgaacaactagctgatggagtgtccagcaatttggagtcacacattacaaaagcaatacaccctagcctgtgtccgattcttattcttttatcaagacttaagccttcacctataagctgtggaactgatgattctttggacccttttttgcttttgcctttcatccaaagatgtgctacccagagtaactaccgggtccgtatccttgcatcaagggcattaacttgtttggtatctaacgagagattgcagtacgttattagtgatatactggataatttacctcgtggaagtcacaaagcaatggctcacagtgttcagcatactgatcctgccatatcagctaatatgggaaaagcaaatgtacttctgctgtctaagtcattcaattcaatacatggccttttgctgcagctggcttctcttctggataacaactttagaggtttgacagacggtagcatgaaggatcagattattggcctattactggaggttctttcaagatgctcttggcttggctgcacgaaattatgctcatgccctatcgtaattacatcttacttgcgggtattggatctcatgcttgatgttgcaaggacagggaaaagcagacatactgaagtcattcaggcattgctgctagagttaacttcccagtgcttgagcaacacagcatcaacccagtacgcattccatgatccaacccgtattgaactaaaacaacaagcaactgaatcatttttgagctgtgttggtctttctaagaaaaccgatgaaactaacgatgatgatgtgcagttgcaaatactcggtgaaccaactttagagatgcctagagtggattactcccttcatgaagtacacaaggagatcctgtcatgtctcactgatccttcatatgatgttagaattacggtgctgaagaggattctttggctcacaaaatcaatcagacatggttatgcagataacattttgcaccagtgggcaggagttaatctgcagcctgctttaatggaacggttgtttgtggaagaacaccctaagtgcctttattataatctgaagatcatcttttcatggaacatggaattcccattcaacaatggagaagattctagcacacttttgtccttgtgggataggttagttcatttaaacagcaccatgtcacatgcaaaaacgagagaaatagttctatgttgcatgggtatgtgcatgaaattgttcactaaacaatctaggggtggtatttcaatggattgtcttaagaccagtgagatctctgcatcctttgtcagaatcaatgaaggggatggattatctgatgccatgcttagattaaacttgtttgtcacacttgtcaagaaccaaagtgaaccatcagaaagcatgaatgctcgacgggctgctgctgaggcaattgttgcttctggtcttcttgaagaagcaagctacgttgcttcatctgtgtccaacatgtactctccttcagaatttgatgaagaccataccaaagagaaatgcatggaagatagcgtttttgaatttgttagtctttatacatgcaagatacttgacttgtggtttgtatgtattcagttgctggaggatgaggatgcatatctgaggcaaaaacttgcgaaggatattcagaaaataatcgctaagggttcagctaataccttctgtgatgattccacaccactacaagttgatagagtcattgaattaagcttggactatttaacttctttgtttggcctctggctgaaatacgttgaattcttgttaaggatagtcttgggcactggaaacgctctgaactcccgtggcgatttggtccgtcagatatttgataaagaaattgataaccaccatgaggagaagctattgatatgtcaaatctgctgttcaaacattcagaaacttctgaattcaaaatgccagatggaagcaggagcagagactaaactgttcctgcagaattggagggagatatttctaaagcagctcacatcgctgactggtggctatattgagaaagaggggaagaacgattggattggcggcataggtaaccacaaggacgtgttcatatcagtgtatgcagtcctactcggtttatacgcgctcacgcagtctggctctctggatcaattggaggaccactgtgcagtttatttgcaggaatttgcaaaccttgaaaggtctatcacaccattcctcaagaacccgttgatttctaatctttacgctctggtaaaattgtcacacgagaggttcatatcatcagataagcctgaggaccaagtgggtgattcaggatcaagttttgacccatattttcttatcagatgattttcgctaatgtactagtaattcttcattgttattcctccgttgtaagactcaatactaattgcttttttatacaaattaccatactatagattctttacttgatgccccttctctgtgtatcagtgcattttaagtgccttgggttttctagcactcaaaaaatgtatgacaaggttgtgactaacgtccgaacaactgataatgatataaatatttttccgattaacataggac

SEQ ID NO: 16384 - DNA, 6851 bp, Zea Mays
cggaactgtactgacttcagagattgaagtcaaggagctaatttgggggaagaatgtcttcaaagtggcggtcactgcagcatcggcaccggtacacctacacctccattgtgttcccgaagcattaccttgaggccctaactctcgtgccagctgagatctcctcatccaatttctttgtccgattgagcaacttgatttccctgacctccacttactcccaagttgttgtggtcaaggatcttgcctcggcatatgtgcagtttctgtccactacagggactcctgatgaagcagtgctcgctgccacaaagctttatttggagatcctctttcttgagaattccctccctctccaccggacactcatatcagtgcttgccaagtgcaagaaattctccacagtgatcagtgggtgttttgccttgctctgtgaggagtatggtggctctggtagtaaggcaaagaagagatttatggtatctcgagcagccttgtcgcttattgggtacccaaagttgggatttttggatgaggcagtagagaggtgtgcagagatcatggcactggatgttgttgatgggcttgatggagtgacaaaagacattggtgaagggtcacggccatctccagtcgtgatggagcagtgccaggaggccatgtcttgcatgtactacttgctgcagaggtacccgtataagtttattggccttgacaaggcgtcaagtgtcttcaagagtgctgtcaggacaatactatctgttcttaagtcatctgccttttcaagggattgcctggtggcctctggagtaagcttctgtgcggcaattcaggttttcatgagcacagaggagatttcctggttcatttctcaaggtctatttggcatctatgcaaatcatgaagatagaaaaaatcagtctgtgcacaatgtattttcggactttgatctgtgtgaacaaatcagagacctttcagtgttgagtagactttgtctactaagagggattttgacatctattccaaggacagtactcaacatgcaccaacttcattccagtggacctttatggactgttttatatgatggaattttacctgagctttgcaagcattgtgagaacccagttgatagccacttcaatttccatgctcttacagtgacacaaatatgtttgcagcagataaagacatcggtttcatctgatatcaccgacttctctggggactataagcctttttcaagagatgttgtcaaccgtatattgggaatcatatggcgcaacctggaagatcctttgagtcagacagtaaaacaggtgcatttgatctttgatctcctattagatattgaactatgtattgcatcagaagaccgtgaacataacaacaacttgttcctttgcaatgttgcaaatgatttacttcgcttaggtccacgatgcaaagggagatatgtccctttagcttctttgacaaagcgattgggtgccaaatctcttctaacattgaaatcaaatctgctttcagaaacagcttatgcgtacatagatgatgatgtttgttgtgctgtcaccacatttttaaaatccttcctggagactttaagaggtgaatgttggaatgacgatggtgttgagctaggatatgatgccttcagagctttgtgcttgcctcctttcatgcggggacttgtatctggaaattcaaaactacgttctaacttaaatacttatgctttacctgctctaattgaagttgatgcagagagcatattcacaatgcttggattcatctccattggccctagcacaaatgaaactaaactagatgttgttttgaaaaatgaccagtgtatagctgcactggtttctctgcttaaggtctcacggaatctggctcttgttgaaggggacattgatttagatcctgatgaattgtcacagattcagcagatggatagtaagggtgctgcagttatatctgttaaagggattaaagttacagttccttttaattggtttgctttggcactgacacacagtgatgaaagtctccgtatagatgcagctgaatccctctttctaaatccaaagacatcaagtcttccatcctccttggaactgagcttgctcaaagaagctgttccgttgaatatgcgttgtagctcaacggcatttcaaatgaaatggacaagtttatttcggaagttttttgctagggtgcgaactgcacttgacagacaggtaaaacaggggtcttggattccatcattaacgtctagtgttaaaggggctggctctattgatacttctaaggccactgttgtcaagagggctgaagatctcttccaattcatgaagtggctgagttcctttctgtttaattcttgttacccctctggcccttatgaaaggaaaacaattgcaatggagctcattcttacactactagatgtatggcctatttgccgctctgaagggaaaattgatctttatccttacaatgatagcataatattgccagactcaacaatttcatttgttgggtctataattgatagttgggacagattaagggaaaactcttttcgcattctactgcagttcccaacaccgcttcctgggatttccttgagtacatccataaatgatgttatcagatgggcaaaaaaacttgttctaagcccacgtgtccgggaaagtgatgctggtgctttaaccttccgccttatatttaggaagtatgttttgcagcttggatgtattcttgtattttctaaagaaagtgattgccttgaatgttatacacaatctatgaatggagatacagaagttactagtcaaaacccagttgcacagtatatatcttcactcattcaatggctctgtattgttgtcgaagagggtgagagggatctctctgaagcatgtaagaagagctttgttcatggagttcttcttactctgcgctacacatttgatgagatggattggaactctgaggtagtacaatcatgtatttctgaaatgaggtacctggtagaaaaactgcttcaactcataatgcgtgtaacttcggtggccctatgggtggtttcttcagacgcattgtctctgccatatgacatggatgacatgattgatgatggttccttcctctcagatatatatgatgatcaacctactaccacttcagaaagagaggagaagaatgcaaaaccagggagtaatggcaaaccagccgaacaagttgttatggttggttgctggcttgctatgaaggaggtcagtttactttttggaaccatcatcaggaagataccattgcctggctgttctcattcagcttcatctcagaatggcttgcctgacagtattgaagagacaagtatatctgaagaaattcttgatgtggggcagttaaagatgatgggtgaccattttttacaggttcttcttaaaatgaagcataacggtgcaatagataaaacaagggctgggtttactgccctttgcaaccggcttctttgctcaaatgattcaaggctgtgcaaaatgacagagtcatggatggtgctactaatggataggacaattgctaaagggcaaactgtggatgatttgataaggaggagtgcaggaattcctgctgcatttatcgccctgttcctggcagagccagaaggaacaccaaagaaactacttccaagggcattagaatggctgatagagtttgctaagaactctttagctaatttccagaaagactccaaccagaggtctggagtaatgaaagagctgttggaatcacagtcagaaactacaagtgtatattctaatggtaacctatctaaaggtcgagatgagggtgttgttcccactgtgcatgtgttcaatgtgcttaaagctgctttcaatgatgcaaatctggcaaccgacacttcgggtttcagtgctgaagcaacaatagttgctatacgagcattttcatctccctactgggaagtgcgcaatgcagcttgccttgcgtatactgcactagttcgtcgcatggttgggtttctgaatgtgcagaagcgtgaatcagcacgacgatctttaactggccttgaattcttccacaggcaacaattgagtatcttttacatgatacatggacaaattgaccagaatttttttagcatcgttgctgctttgaggtatccagcccttcatcctttcctttctagtgaactgcaaaccacaactgaacaactagctgatggagtgtccagcaatttggagtcacacattacaaaagcaatacaccctagcctgtgtccgattcttattcttttatcaagacttaagccttcacctataagctgtggaactgatgattctttggacccttttttgcttttgcctttcatccaaagatgtgctacccagagtaactaccgggtccgtatccttgcatcaagggcattaacttgtttggtatctaacgagagattgcagtacgttattagtgatatactggataatttacctcgtggaagtcacaaagcaatggctcacagtgttcagcatactgatcctgccatatcagctaatatgggaaaagcaaatgtacttctgctgtctaagtcattcaattcaatacatggccttttgctgcagctggcttctcttctggataacaactttagaggtttgacagacggtagcatgaaggatcagattattggcctattactggaggttctttcaagatgctcttggcttggctgcacgaaattatgctcatgccctatcgtaattacatcttacttgcgggtattggatctcatgcttgatgttgcaaggacagggaaaagcagacatactgaagtcattcaggcattgctgctagagttaacttcccagtgcttgagcaacacagcatcaacccagtacgcattccatgatccaacccgtattgaactaaaacaacaagcaactgaatcatttttgagctgtgttggtctttctaagaaaaccgatgaaactaacgatgatgatgtgcagttgcaaatactcggtgaaccaactttagagatgcctagagtggattactcccttcatgaagtacacaaggagatcctgtcatgtctcactgatccttcatatgatgttagaattacggtgctgaagaggattctttggctcacaaaatcaatcagacatggttatgcagataacattttgcaccagtgggcaggagttaatctgcagcctgctttaatggaacggttgtttgtggaagaacaccctaagtgcctttattataatctgaagatcatcttttcatggaacatggaattcccattcaacaatggagaagattctagcacacttttgtccttgtgggataggttagttcatttaaacagcaccatgtcacatgcaaaaacgagagaaatagttctatgttgcatgggtatgtgcatgaaattgttcactaaacaatctaggggtggtatttcaatggattgtcttaagaccagtgagatctctgcatcctttgtcagaatcaatgaaggggatggattatctgatgccatgcttagattaaacttgtttgtcacacttgtcaagaaccaaagtgaaccatcagaaagcatgaatgctcgacgggctgctgctgaggcaattgttgcttctggtcttcttgaagaagcaagctacgttgcttcatctgtgtccaacatgtactctccttcagaatttgatgaagaccataccaaagagaaatgcatggaagatagcgtttttgaatttgttagtctttatacatgcaagatacttgacttgtggtttgtatgtattcagttgctggaggatgaggatgcatatctgaggcaaaaacttgcgaaggatattcagaaaataatcgctaagggttcagctaataccttctgtgatgattccacaccactacaagttgatagagtcattgaattaagcttggactatttaacttctttgtttggcctctggctgaaatacgttgaattcttgttaaggatagtcttgggcactggaaacgctctgaactcccgtggcgatttggtccgtcagatatttgataaagaaattgataaccaccatgaggagaagctattgatatgtcaaatctgctgttcaaacattcagaaacttctgaattcaaaatgccagatggaagcaggagcagagactaaactgttcctgcagaattggagggagatatttctaaagcagctcacatcgctgactggtggctatattgagaaagaggggaagaacgattggattggcggcataggtaaccacaaggacgtgttcatatcagtgtatgcagtcctactcggtttatacgcgctcacgcagtctggctctctggatcaattggaggaccactgtgcagtttatttgcaggaatttgcaaaccttgaaaggtctatcacaccattcctcaagaacccgttgatttctaatctttacgctctggtaaaattgtcacacgagaggttcatatcatcagataagcctgaggaccaagtgggtgattcaggatcaagttttgacccatattttcttatcagatgattttcgctaatgtactagtaattcttcattgttattcctccgttgtaagactcaatactaattgcttttttatacaaattaccatactatagattctttacttgatgccccttctctgtgtatcagtgcattttaagtgccttgggttttctagcactcaaaaaatgtatgacaaggttgtgactaacgtccgaacaactgataatgatataaatatttttccgattaacataggac

SEQ ID NO: 16385 - DNA, 6740 bp, Zea Mays
cggaggaagacttgtggcggaactgtactgacttcagttcagattgaagtcaaggagctaatttgggggaagaatgtcttcaaagtggcggtcactgcagcatcggcaccggtacacctacacctccattgtgttcccgaagcattaccttgaggccctaactctcgtgccagctgagatctcctcatccaatttctttgtccgattgagcaacttgatttccctgacctccacttactcccaagttgttgtggtcaaggatcttgcctcggcatatgtgcagtttctgtccactacagggactcctgatgaagcagtgctcgctgccacaaagctttatttggagatcctctttcttgagaattccctccctctccaccggacactcatatcagtgcttgccaagtgcaagaaattctccacagtgatcagtgggtgttttgccttgctctgtgaggagtatggtggctctggtagtaaggcaaagaagagatttatggtatctcgagcagccttgtcgcttattgggtacccaaagttgggatttttggatgaggcagtagagaggtgtgcagagatcatggcactggatgttgttgatgggcttgatggagtgacaaaagacattggtgaagggtcacggccatctccagtcgtgatggagcagtgccaggaggccatgtcttgcatgtactacttgctgcagaggtacccgtataagtttattggccttgacaaggcgtcaagtgtcttcaagagtgctgtcaggacaatactatctgttcttaagtcatctgccttttcaagggattgcctggtggcctctggagtaagcttctgtgcggcaattcaggttttcatgagcacagaggagatttcctggttcatttctcaaggtctatttggcatctatgcaaatcatgaagatagaaaaaatcagtctgtgcacaatgtattttcggactttgatctgtgtgaacaaatcagagacctttcagtgttgagtagactttgtctactaagagggattttgacatctattccaaggacagtactcaacatgcaccaacttcattccagtggacctttatggactgttttatatgatggaattttacctgagctttgcaagcattgtgagaacccagttgatagccacttcaatttccatgctcttacagtgacacaaatatgtttgcagcagataaagacatcggtttcatctgatatcaccgacttctctggggactataagcctttttcaagagatgttgtcaaccgtatattgggaatcatatggcgcaacctggaagatcctttgagtcagacagtaaaacaggtgcatttgatctttgatctcctattagatattgaactatgtattgcatcagaagaccgtgaacataacaacaacttgttcctttgcaatgttgcaaatgatttacttcgcttaggtccacgatgcaaagggagatatgtccctttagcttctttgacaaagcgattgggtgccaaatctcttctaacattgaaatcaaatctgctttcagaaacagcttatgcgtacatagatgatgatgtttgttgtgctgtcaccacatttttaaaatccttcctggagactttaagaggtgaatgttggaatgacgatggtgttgagctaggatatgatgccttcagagctttgtgcttgcctcctttcatgcggggacttgtatctggaaattcaaaactacgttctaacttaaatacttatgctttacctgctctaattgaagttgatgcagagagcatattcacaatgcttggattcatctccattggccctagcacaaatgaaactaaactagatgttgttttgaaaaatgaccagtgtatagctgcactggtttctctgcttaaggtctcacggaatctggctcttgttgaaggggacattgatttagatcctgatgaattgtcacagattcagcagatggatagtaagggtgctgcagttatatctgttaaagggattaaagttacagttccttttaattggtttgctttggcactgacacacagtgatgaaagtctccgtatagatgcagctgaatccctctttctaaatccaaagacatcaagtcttccatcctccttggaactgagcttgctcaaagaagctgttccgttgaatatgcgttgtagctcaacggcatttcaaatgaaatggacaagtttatttcggaagttttttgctagggtgcgaactgcacttgacagacaggtaaaacaggggtcttggattccatcattaacgtctagtgttaaaggggctggctctattgatacttctaaggccactgttgtcaagagggctgaagatctcttccaattcatgaagtggctgagttcctttctgtttaattcttgttacccctctggcccttatgaaaggaaaacaattgcaatggagctcattcttacactactagatgtatggcctatttgccgctctgaagggaaaattgatctttatccttacaatgatagcataatattgccagactcaacaatttcatttgttgggtctataattgatagttgggacagattaagggaaaactcttttcgcattctactgcagttcccaacaccgcttcctgggatttccttgagtacatccataaatgatgttatcagatgggcaaaaaaacttgttctaagcccacgtgtccgggaaagtgatgctggtgctttaaccttccgccttatatttaggaagtatgttttgcagcttggatgtattcttgtattttctaaagaaagtgattgccttgaatgttatacacaatctatgaatggagatacagaagttactagtcaaaacccagttgcacagtatatatcttcactcattcaatggctctgtattgttgtcgaagagggtgagagggatctctctgaagcatgtaagaagagctttgttcatggagttcttcttactctgcgctacacatttgatgagatggattggaactctgaggtagtacaatcatgtatttctgaaatgagatatatatgatgatcaacctactaccacttcagaaagagaggagaagaatgcaaaaccagggagtaatggcaaaccagccgaacaagttgttatggttggttgctggcttgctatgaaggaggtcagtttactttttggaaccatcatcaggaagataccattgcctggctgttctcattcagcttcatctcagaatggcttgcctgacagtattgaagagacaagtatatctgaagaaattcttgatgtggggcagttaaagatgatgggtgaccattttttacaggttcttcttaaaatgaagcataacggtgcaatagataaaacaagggctgggtttactgccctttgcaaccggcttctttgctcaaatgattcaaggctgtgcaaaatgacagagtcatggatggtgctactaatggataggacaattgctaaagggcaaactgtggatgatttgataaggaggagtgcaggaattcctgctgcatttatcgccctgttcctggcagagccagaaggaacaccaaagaaactacttccaagggcattagaatggctgatagagtttgctaagaactctttagctaatttccagaaagactccaaccagaggtctggagtaatgaaagagctgttggaatcacagtcagaaactacaagtgtatattctaatggtaacctatctaaaggtcgagatgagggtgttgttcccactgtgcatgtgttcaatgtgcttaaagctgctttcaatgatgcaaatctggcaaccgacacttcgggtttcagtgctgaagcaacaatagttgctatacgagcattttcatctccctactgggaagtgcgcaatgcagcttgccttgcgtatactgcactagttcgtcgcatggttgggtttctgaatgtgcagaagcgtgaatcagcacgacgatctttaactggccttgaattcttccacaggcaacaattgagtatcttttacatgatacatggacaaattgaccagaatttttttagcatcgttgctgctttgaggtatccagcccttcatcctttcctttctagtgaactgcaaaccacaactgaacaactagctgatggagtgtccagcaatttggagtcacacattacaaaagcaatacaccctagcctgtgtccgattcttattcttttatcaagacttaagccttcacctataagctgtggaactgatgattctttggacccttttttgcttttgcctttcatccaaagatgtgctacccagagtaactaccgggtccgtatccttgcatcaagggcattaacttgtttggtatctaacgagagattgcagtacgttattagtgatatactggataatttacctcgtggaagtcacaaagcaatggctcacagtgttcagcatactgatcctgccatatcagctaatatgggaaaagcaaatgtacttctgctgtctaagtcattcaattcaatacatggccttttgctgcagctggcttctcttctggataacaactttagaggtttgacagacggtagcatgaaggatcagattattggcctattactggaggttctttcaagatgctcttggcttggctgcacgaaattatgctcatgccctatcgtaattacatcttacttgcgggtattggatctcatgcttgatgttgcaaggacagggaaaagcagacatactgaagtcattcaggcattgctgctagagttaacttcccagtgcttgagcaacacagcatcaacccagtacgcattccatgatccaacccgtattgaactaaaacaacaagcaactgaatcatttttgagctgtgttggtctttctaagaaaaccgatgaaactaacgatgatgatgtgcagttgcaaatactcggtgaaccaactttagagatgcctagagtggattactcccttcatgaagtacacaaggagatcctgtcatgtctcactgatccttcatatgatgttagaattacggtgctgaagaggattctttggctcacaaaatcaatcagacatggttatgcagataacattttgcaccagtgggcaggagttaatctgcagcctgctttaatggaacggttgtttgtggaagaacaccctaagtgcctttattataatctgaagatcatcttttcatggaacatggaattcccattcaacaatggagaagattctagcacacttttgtccttgtgggataggttagttcatttaaacagcaccatgtcacatgcaaaaacgagagaaatagttctatgttgcatgggtatgtgcatgaaattgttcactaaacaatctaggggtggtatttcaatggattgtcttaagaccagtgagatctctgcatcctttgtcagaatcaatgaaggggatggattatctgatgccatgcttagattaaacttgtttgtcacacttgtcaagaaccaaagtgaaccatcagaaagcatgaatgctcgacgggctgctgctgaggcaattgttgcttctggtcttcttgaagaagcaagctacgttgcttcatctgtgtccaacatgtactctccttcagaatttgatgaagaccataccaaagagaaatgcatggaagatagcgtttttgaatttgttagtctttatacatgcaagatacttgacttgtggtttgtatgtattcagttgctggaggatgaggatgcatatctgaggcaaaaacttgcgaaggatattcagaaaataatcgctaagggttcagctaataccttctgtgatgattccacaccactacaagttgatagagtcattgaattaagcttggactatttaacttctttgtttggcctctggctgaaatacgttgaattcttgttaaggatagtcttgggcactggaaacgctctgaactcccgtggcgatttggtccgtcagatatttgataaagaaattgataaccaccatgaggagaagctattgatatgtcaaatctgctgttcaaacattcagaaacttctgaattcaaaatgccagatggaagcaggagcagagactaaactgttcctgcagaattggagggagatatttctaaagcagctcacatcgctgactggtggctatattgagaaagaggggaagaacgattggattggcggcataggtaaccacaaggacgtgttcatatcagtgtatgcagtcctactcggtttatacgcgctcacgcagtctggctctctggatcaattggaggaccactgtgcagtttatttgcaggaatttgcaaaccttgaaaggtctatcacaccattcctcaagaacccgttgatttctaatctttacgctctggtaaaattgtcacacgagaggttcatatcatcagataagcctgaggaccaagtgggtgattcaggatcaagttttgacccatattttcttatcagatgattttcgctaatgtactagtaattcttcattgttattcctccgttgtaagactcaatactaattgcttttttatacaaattaccatactatagattctttacttgatgccccttctctgtgtatcagtgcattttaagtgccttgggttttctagcactcaaaaaatgtatgacaaggttgtgactaacgtccgaacaactgataatgatataaatatttttccgattaacataggac

SEQ ID NO: 16386 - DNA, 6837 bp, Zea Mays
gtttgtggtttaagttcccggaggaagacttgtggcggaactgtactgacttcagattgaagtcaaggagctaatttgggggaagaatgtcttcaaagtggcggtcactgcagcatcggcaccggtacacctacacctccattgtgttcccgaagcattaccttgaggccctaactctcgtgccagctgagatctcctcatccaatttctttgtccgattgagcaacttgatttccctgacctccacttactcccaagttgttgtggtcaaggatcttgcctcggcatatgtgcagtttctgtccactacagggactcctgatgaagcagtgctcgctgccacaaagctttatttggagatcctctttcttgagaattccctccctctccaccggacactcatatcagtgcttgccaagtgcaagaaattctccacagtgatcagtgggtgttttgccttgctctgtgaggagtatggtggctctggtagtaaggcaaagaagagatttatggtatctcgagcagccttgtcgcttattgggtacccaaagttgggatttttggatgaggcagtagagaggtgtgcagagatcatggcactggatgttgttgatgggcttgatggagtgacaaaagacattggtgaagggtcacggccatctccagtcgtgatggagcagtgccaggaggccatgtcttgcatgtactacttgctgcagaggtacccgtataagtttattggccttgacaaggcgtcaagtgtcttcaagagtgctgtcaggacaatactatctgttcttaagtcatctgccttttcaagggattgcctggtggcctctggagtaagcttctgtgcggcaattcaggttttcatgagcacagaggagatttcctggttcatttctcaaggtctatttggcatctatgcaaatcatgaagatagaaaaaatcagtctgtgcacaatgtattttcggactttgatctgtgtgaacaaatcagagacctttcagtgttgagtagactttgtctactaagagggattttgacatctattccaaggacagtactcaacatgcaccaacttcattccagtggacctttatggactgttttatatgatggaattttacctgagctttgcaagcattgtgagaacccagttgatagccacttcaatttccatgctcttacagtgacacaaatatgtttgcagcagataaagacatcggtttcatctgatatcaccgacttctctggggactataagcctttttcaagagatgttgtcaaccgtatattgggaatcatatggcgcaacctggaagatcctttgagtcagacagtaaaacaggtgcatttgatctttgatctcctattagatattgaactatgtattgcatcagaagaccgtgaacataacaacaacttgttcctttgcaatgttgcaaatgatttacttcgcttaggtccacgatgcaaagggagatatgtccctttagcttctttgacaaagcgattgggtgccaaatctcttctaacattgaaatcaaatctgctttcagaaacagcttatgcgtacatagatgatgatgtttgttgtgctgtcaccacatttttaaaatccttcctggagactttaagaggtgaatgttggaatgacgatggtgttgagctaggatatgatgccttcagagctttgtgcttgcctcctttcatgcggggacttgtatctggaaattcaaaactacgttctaacttaaatacttatgctttacctgctctaattgaagttgatgcagagagcatattcacaatgcttggattcatctccattggccctagcacaaatgaaactaaactagatgttgttttgaaaaatgaccagtgtatagctgcactggtttctctgcttaaggtctcacggaatctggctcttgttgaaggggacattgatttagatcctgatgaattgtcacagattcagcagatggatagtaagggtgctgcagttatatctgttaaagggattaaagttacagttccttttaattggtttgctttggcactgacacacagtgatgaaagtctccgtatagatgcagctgaatccctctttctaaatccaaagacatcaagtcttccatcctccttggaactgagcttgctcaaagaagctgttccgttgaatatgcgttgtagctcaacggcatttcaaatgaaatggacaagtttatttcggaagttttttgctagggtgcgaactgcacttgacagacaggtaaaacaggggtcttggattccatcattaacgtctagtgttaaaggggctggctctattgatacttctaaggccactgttgtcaagagggctgaagatctcttccaattcatgaagtggctgagttcctttctgtttaattcttgttacccctctggcccttatgaaaggaaaacaattgcaatggagctcattcttacactactagatgtatggcctatttgccgctctgaagggaaaattgatctttatccttacaatgatagcataatattgccagactcaacaatttcatttgttgggtctataattgatagttgggacagattaagggaaaactcttttcgcattctactgcagttcccaacaccgcttcctgggatttccttgagtacatccataaatgatgttatcagatgggcaaaaaaacttgttctaagcccacgtgtccgggaaagtgatgctggtgctttaaccttccgccttatatttaggaagtatgttttgcagcttggatgtattcttgtattttctaaagaaagtgattgccttgaatgttatacacaatctatgaatggagatacagaagttactagtcaaaacccagttgcacagtatatatcttcactcattcaatggctctgtattgttgtcgaagagggtgagagggatctctctgaagcatgtaagaagagctttgttcatggagttcttcttactctgcgctacacatttgatgagatggattggaactctgaggtagtacaatcatgtatttctgaaatgaggtacctggtagaaaaactgcttcaactcataatgcgtgtaacttcggtggccctatgggtggtttcttcagacgcattgtctctgccatatgacatggatgacatgattgatgatggttccttcctctcagatatatatgatgatcaacctactaccacttcagaaagagaggagaagaatgcaaaaccagggagtaatggcaaaccagccgaacaagttgttatggttggttgctggcttgctatgaaggagtttcacgctattgtggcattgcaggtcagtttactttttggaaccatcatcaggaagataccattgcctggctgttctcattcagcttcatctcagaatggcttgcctgacagtattgaagagacaagtatatctgaagaaattcttgatgtggggcagttaaagatgatgggtgaccattttttacaggttcttcttaaaatgaagcataacggtgcaatagataaaacaagggctgggtttactgccctttgcaaccggcttctttgctcaaatgattcaaggctgtgcaaaatgacagagtcatggatggtgctactaatggataggacaattgctaaagggcaaactgtggatgatttgataaggaggagtgcaggaattcctgctgcatttatcgccctgttcctggcagagccagaaggaacaccaaagaaactacttccaagggcattagaatggctgatagagtttgctaagaactctttagctaatttccagaaagactccaaccagaggtctggagtaatgaaagagctgttggaatcacagtcagaaactacaagtgtatattctaatggtaacctatctaaaggtcgagatgagggtgttgttcccactgtgcatgtgttcaatgtgcttaaagctgctttcaatgatgcaaatctggcaaccgacacttcgggtttcagtgctgaagcaacaatagttgctatacgagcattttcatctccctactgggaagtgcgcaatgcagcttgccttgcgtatactgcactagttcgtcgcatggttgggtttctgaatgtgcagaagcgtgaatcagcacgacgatctttaactggccttgaattcttccacaggcaagtatccagcccttcatcctttcctttctagtgaactgcaaaccacaactgaacaactagctgatggagtgtccagcaatttggagtcacacattacaaaagcaatacaccctagcctgtgtccgattcttattcttttatcaagacttaagccttcacctataagctgtggaactgatgattctttggacccttttttgcttttgcctttcatccaaagatgtgctacccagagtaactaccgggtccgtatccttgcatcaagggcattaacttgtttggtatctaacgagagattgcagtacgttattagtgatatactggataatttacctcgtggaagtcacaaagcaatggctcacagtgttcagcatactgatcctgccatatcagctaatatgggaaaagcaaatgtacttctgctgtctaagtcattcaattcaatacatggccttttgctgcagctggcttctcttctggataacaactttagaggtttgacagacggtagcatgaaggatcagattattggcctattactggaggttctttcaagatgctcttggcttggctgcacgaaattatgctcatgccctatcgtaattacatcttacttgcgggtattggatctcatgcttgatgttgcaaggacagggaaaagcagacatactgaagtcattcaggcattgctgctagagttaacttcccagtgcttgagcaacacagcatcaacccagtacgcattccatgatccaacccgtattgaactaaaacaacaagcaactgaatcatttttgagctgtgttggtctttctaagaaaaccgatgaaactaacgatgatgatgtgcagttgcaaatactcggtgaaccaactttagagatgcctagagtggattactcccttcatgaagtacacaaggagatcctgtcatgtctcactgatccttcatatgatgttagaattacggtgctgaagaggattctttggctcacaaaatcaatcagacatggttatgcagataacattttgcaccagtgggcaggagttaatctgcagcctgctttaatggaacggttgtttgtggaagaacaccctaagtgcctttattataatctgaagatcatcttttcatggaacatggaattcccattcaacaatggagaagattctagcacacttttgtccttgtgggataggttagttcatttaaacagcaccatgtcacatgcaaaaacgagagaaatagttctatgttgcatgggtatgtgcatgaaattgttcactaaacaatctaggggtggtatttcaatggattgtcttaagaccagtgagatctctgcatcctttgtcagaatcaatgaaggggatggattatctgatgccatgcttagattaaacttgtttgtcacacttgtcaagaaccaaagtgaaccatcagaaagcatgaatgctcgacgggctgctgctgaggcaattgttgcttctggtcttcttgaagaagcaagctacgttgcttcatctgtgtccaacatgtactctccttcagaatttgatgaagaccataccaaagagaaatgcatggaagatagcgtttttgaatttgttagtctttatacatgcaagatacttgacttgtggtttgtatgtattcagttgctggaggatgaggatgcatatctgaggcaaaaacttgcgaaggatattcagaaaataatcgctaagggttcagctaataccttctgtgatgattccacaccactacaagttgatagagtcattgaattaagcttggactatttaacttctttgtttggcctctggctgaaatacgttgaattcttgttaaggatagtcttgggcactggaaacgctctgaactcccgtggcgatttggtccgtcagatatttgataaagaaattgataaccaccatgaggagaagctattgatatgtcaaatctgctgttcaaacattcagaaacttctgaattcaaaatgccagatggaagcaggagcagagactaaactgttcctgcagaattggagggagatatttctaaagcagctcacatcgctgactggtggctatattgagaaagaggggaagaacgattggattggcggcataggtaaccacaaggacgtgttcatatcagtgtatgcagtcctactcggtttatacgcgctcacgcagtctggctctctggatcaattggaggaccactgtgcagtttatttgcaggaatttgcaaaccttgaaaggtctatcacaccattcctcaagaacccgttgatttctaatctttacgctctggtaaaattgtcacacgagaggttcatatcatcagataagcctgaggaccaagtgggtgattcaggatcaagttttgacccatattttcttatcagatgattttcgctaatgtactagtaattcttcattgttattcctccgttgtaagactcaatactaattgcttttttatacaaattaccatactatagattctttacttgatgccccttctctgtgtatcagtgcattttaagtgccttgggttttctagcactcaaaaaatgtatgacaaggttgtgactaacgtccgaacaactgataatgatataaatatttttccgattaacataggac

SEQ ID NO: 16387 - DNA, 3760 bp, Zea Mays
caggaccaaaccctaaacccccgctcccgcctcctctcgctgctgcagcttgccgggagctcacgcggcctttgcttctcgcttctttcgctggccacctgatcccggttgttcttcgctgggctcccgagccgctgcactcgctgggtgctgccgcctgccaggaggagcggcacggccgtctacaggattaaaggtcagtttactttttggaaccatcatcaggaagataccattgcctggctgttctcattcagcttcatctcagaatggcttgcctgacagtattgaagagacaagtatatctgaagaaattcttgatgtggggcagttaaagatgatgggtgaccattttttacaggttcttcttaaaatgaagcataacggtgcaatagataaaacaagggctgggtttactgccctttgcaaccggcttctttgctcaaatgattcaaggctgtgcaaaatgacagagtcatggatggtgctactaatggataggacaattgctaaagggcaaactgtggatgatttgataaggaggagtgcaggaattcctgctgcatttatcgccctgttcctggcagagccagaaggaacaccaaagaaactacttccaagggcattagaatggctgatagagtttgctaagaactctttagctaatttccagaaagactccaaccagaggtctggagtaatgaaagagctgttggaatcacagtcagaaactacaagtgtatattctaatggtaacctatctaaaggtcgagatgagggtgttgttcccactgtgcatgtgttcaatgtgcttaaagctgctttcaatgatgcaaatctggcaaccgacacttcgggtttcagtgctgaagcaacaatagttgctatacgagcattttcatctccctactgggaagtgcgcaatgcagcttgccttgcgtatactgcactagttcgtcgcatggttgggtttctgaatgtgcagaagcgtgaatcagcacgacgatctttaactggccttgaattcttccacaggcaacaattgagtatcttttacatgatacatggacaaattgaccagaatttttttagcatcgttgctgctttgaggtatccagcccttcatcctttcctttctagtgaactgcaaaccacaactgaacaactagctgatggagtgtccagcaatttggagtcacacattacaaaagcaatacaccctagcctgtgtccgattcttattcttttatcaagacttaagccttcacctataagctgtggaactgatgattctttggacccttttttgcttttgcctttcatccaaagatgtgctacccagagtaactaccgggtccgtatccttgcatcaagggcattaacttgtttggtatctaacgagagattgcagtacgttattagtgatatactggataatttacctcgtggaagtcacaaagcaatggctcacagtgttcagcatactgatcctgccatatcagctaatatgggaaaagcaaatgtacttctgctgtctaagtcattcaattcaatacatggccttttgctgcagctggcttctcttctggataacaactttagaggtttgacagacggtagcatgaaggatcagattattggcctattactggaggttctttcaagatgctcttggcttggctgcacgaaattatgctcatgccctatcgtaattacatcttacttgcgggtattggatctcatgcttgatgttgcaaggacagggaaaagcagacatactgaagtcattcaggcattgctgctagagttaacttcccagtgcttgagcaacacagcatcaacccagtacgcattccatgatccaacccgtattgaactaaaacaacaagcaactgaatcatttttgagctgtgttggtctttctaagaaaaccgatgaaactaacgatgatgatgtgcagttgcaaatactcggtgaaccaactttagagatgcctagagtggattactcccttcatgaagtacacaaggagatcctgtcatgtctcactgatccttcatatgatgttagaattacggtgctgaagaggattctttggctcacaaaatcaatcagacatggttatgcagataacattttgcaccagtgggcaggagttaatctgcagcctgctttaatggaacggttgtttgtggaagaacaccctaagtgcctttattataatctgaagatcatcttttcatggaacatggaattcccattcaacaatggagaagattctagcacacttttgtccttgtgggataggttagttcatttaaacagcaccatgtcacatgcaaaaacgagagaaatagttctatgttgcatgggtatgtgcatgaaattgttcactaaacaatctaggggtggtatttcaatggattgtcttaagaccagtgagatctctgcatcctttgtcagaatcaatgaaggggatggattatctgatgccatgcttagattaaacttgtttgtcacacttgtcaagaaccaaagtgaaccatcagaaagcatgaatgctcgacgggctgctgctgaggcaattgttgcttctggtcttcttgaagaagcaagctacgttgcttcatctgtgtccaacatgtactctccttcagaatttgatgaagaccataccaaagagaaatgcatggaagatagcgtttttgaatttgttagtctttatacatgcaagatacttgacttgtggtttgtatgtattcagttgctggaggatgaggatgcatatctgaggcaaaaacttgcgaaggatattcagaaaataatcgctaagggttcagctaataccttctgtgatgattccacaccactacaagttgatagagtcattgaattaagcttggactatttaacttctttgtttggcctctggctgaaatacgttgaattcttgttaaggatagtcttgggcactggaaacgctctgaactcccgtggcgatttggtccgtcagatatttgataaagaaattgataaccaccatgaggagaagctattgatatgtcaaatctgctgttcaaacattcagaaacttctgaattcaaaatgccagatggaagcaggagcagagactaaactgttcctgcagaattggagggagatatttctaaagcagctcacatcgctgactggtggctatattgagaaagaggggaagaacgattggattggcggcataggtaaccacaaggacgtgttcatatcagtgtatgcagtcctactcggtttatacgcgctcacgcagtctggctctctggatcaattggaggaccactgtgcagtttatttgcaggaatttgcaaaccttgaaaggtctatcacaccattcctcaagaacccgttgatttctaatctttacgctctggtaaaattgtcacacgagaggttcatatcatcagataagcctgaggaccaagtgggtgattcaggatcaagttttgacccatattttcttatcagatgattttcgctaatgtactagtaattcttcattgttattcctccgttgtaagactcaatactaattgcttttttatacaaattaccatactatagattctttacttgatgccccttctctgtgtatcagtgcattttaagtgccttgggttttctagcactcaaaaaatgtatgacaaggttgtgactaacgtccgaacaactgataatgatataaatatttttccgattaacataggac

SEQ ID NO: 16388 - DNA, 7010 bp, Zea Mays
gcaggaccaaaccctaaacccccgctcccgcctcctctcgctgctgcagcttgccgggagctcacgcggcctttgcttctcgcttctttcgctggccacctgatcccggttgttcttcgctgggctcccgagccgctgcactcgctgggtgctgccgcctgccaggaggagcggcacggccgtctacaggattaaagggagggaaggtttgtggtttaagttcccggaggaagacttgtggcggaactgtactgacttcagattgaagtcaaggagctaatttgggggaagaatgtcttcaaagtggcggtcactgcagcatcggcaccggtacacctacacctccattgtgttcccgaagcattaccttgaggccctaactctcgtgccagctgagatctcctcatccaatttctttgtccgattgagcaacttgatttccctgacctccacttactcccaagttgttgtggtcaaggatcttgcctcggcatatgtgcagtttctgtccactacagggactcctgatgaagcagtgctcgctgccacaaagctttatttggagatcctctttcttgagaattccctccctctccaccggacactcatatcagtgcttgccaagtgcaagaaattctccacagtgatcagtgggtgttttgccttgctctgtgaggagtatggtggctctggtagtaaggcaaagaagagatttatggtatctcgagcagccttgtcgcttattgggtacccaaagttgggatttttggatgaggcagtagagaggtgtgcagagatcatggcactggatgttgttgatgggcttgatggagtgacaaaagacattggtgaagggtcacggccatctccagtcgtgatggagcagtgccaggaggccatgtcttgcatgtactacttgctgcagaggtacccgtataagtttattggccttgacaaggcgtcaagtgtcttcaagagtgctgtcaggacaatactatctgttcttaagtcatctgccttttcaagggattgcctggtggcctctggagtaagcttctgtgcggcaattcaggttttcatgagcacagaggagatttcctggttcatttctcaaggtctatttggcatctatgcaaatcatgaagatagaaaaaatcagtctgtgcacaatgtattttcggactttgatctgtgtgaacaaatcagagacctttcagtgttgagtagactttgtctactaagagggattttgacatctattccaaggacagtactcaacatgcaccaacttcattccagtggacctttatggactgttttatatgatggaattttacctgagctttgcaagcattgtgagaacccagttgatagccacttcaatttccatgctcttacagtgacacaaatatgtttgcagcagataaagacatcggtttcatctgatatcaccgacttctctggggactataagcctttttcaagagatgttgtcaaccgtatattgggaatcatatggcgcaacctggaagatcctttgagtcagacagtaaaacaggtgcatttgatctttgatctcctattagatattgaactatgtattgcatcagaagaccgtgaacataacaacaacttgttcctttgcaatgttgcaaatgatttacttcgcttaggtccacgatgcaaagggagatatgtccctttagcttctttgacaaagcgattgggtgccaaatctcttctaacattgaaatcaaatctgctttcagaaacagcttatgcgtacatagatgatgatgtttgttgtgctgtcaccacatttttaaaatccttcctggagactttaagaggtgaatgttggaatgacgatggtgttgagctaggatatgatgccttcagagctttgtgcttgcctcctttcatgcggggacttgtatctggaaattcaaaactacgttctaacttaaatacttatgctttacctgctctaattgaagttgatgcagagagcatattcacaatgcttggattcatctccattggccctagcacaaatgaaactaaactagatgttgttttgaaaaatgaccagtgtatagctgcactggtttctctgcttaaggtctcacggaatctggctcttgttgaaggggacattgatttagatcctgatgaattgtcacagattcagcagatggatagtaagggtgctgcagttatatctgttaaagggattaaagttacagttccttttaattggtttgctttggcactgacacacagtgatgaaagtctccgtatagatgcagctgaatccctctttctaaatccaaagacatcaagtcttccatcctccttggaactgagcttgctcaaagaagctgttccgttgaatatgcgttgtagctcaacggcatttcaaatgaaatggacaagtttatttcggaagttttttgctagggtgcgaactgcacttgacagacaggtaaaacaggggtcttggattccatcattaacgtctagtgttaaaggggctggctctattgatacttctaaggccactgttgtcaagagggctgaagatctcttccaattcatgaagtggctgagttcctttctgtttaattcttgttacccctctggcccttatgaaaggaaaacaattgcaatggagctcattcttacactactagatgtatggcctatttgccgctctgaagggaaaattgatctttatccttacaatgatagcataatattgccagactcaacaatttcatttgttgggtctataattgatagttgggacagattaagggaaaactcttttcgcattctactgcagttcccaacaccgcttcctgggatttccttgagtacatccataaatgatgttatcagatgggcaaaaaaacttgttctaagcccacgtgtccgggaaagtgatgctggtgctttaaccttccgccttatatttaggaagtatgttttgcagcttggatgtattcttgtattttctaaagaaagtgattgccttgaatgttatacacaatctatgaatggagatacagaagttactagtcaaaacccagttgcacagtatatatcttcactcattcaatggctctgtattgttgtcgaagagggtgagagggatctctctgaagcatgtaagaagagctttgttcatggagttcttcttactctgcgctacacatttgatgagatggattggaactctgaggtagtacaatcatgtatttctgaaatgaggtacctggtagaaaaactgcttcaactcataatgcgtgtaacttcggtggccctatgggtggtttcttcagacgcattgtctctgccatatgacatggatgacatgattgatgatggttccttcctctcagatatatatgatgatcaacctactaccacttcagaaagagaggagaagaatgcaaaaccagggagtaatggcaaaccagccgaacaagttgttatggttggttgctggcttgctatgaaggagtttactttttggaaccatcatcaggaagataccattgcctggctgttctcattcagcttcatctcagaatggcttgcctgacagtattgaagagacaagtatatctgaagaaattcttgatgtggggcagttaaagatgatgggtgaccattttttacaggttcttcttaaaatgaagcataacggtgcaatagataaaacaagggctgggtttactgccctttgcaaccggcttctttgctcaaatgattcaaggctgtgcaaaatgacagagtcatggatggtgctactaatggataggacaattgctaaagggcaaactgtggatgatttgataaggaggagtgcaggaattcctgctgcatttatcgccctgttcctggcagagccagaaggaacaccaaagaaactacttccaagggcattagaatggctgatagagtttgctaagaactctttagctaatttccagaaagactccaaccagaggtctggagtaatgaaagagctgttggaatcacagtcagaaactacaagtgtatattctaatggtaacctatctaaaggtcgagatgagggtgttgttcccactgtgcatgtgttcaatgtgcttaaagctgctttcaatgatgcaaatctggcaaccgacacttcgggtttcagtgctgaagcaacaatagttgctatacgagcattttcatctccctactgggaagtgcgcaatgcagcttgccttgcgtatactgcactagttcgtcgcatggttgggtttctgaatgtgcagaagcgtgaatcagcacgacgatctttaactggccttgaattcttccacaggtatccagcccttcatcctttcctttctagtgaactgcaaaccacaactgaacaactagctgatggagtgtccagcaatttggagtcacacattacaaaagcaatacaccctagcctgtgtccgattcttattcttttatcaagacttaagccttcacctataagctgtggaactgatgattctttggacccttttttgcttttgcctttcatccaaagatgtgctacccagagtaactaccgggtccgtatccttgcatcaagggcattaacttgtttggtatctaacgagagattgcagtacgttattagtgatatactggataatttacctcgtggaagtcacaaagcaatggctcacagtgttcagcatactgatcctgccatatcagctaatatgggaaaagcaaatgtacttctgctgtctaagtcattcaattcaatacatggccttttgctgcagctggcttctcttctggataacaactttagaggtttgacagacggtagcatgaaggatcagattattggcctattactggaggttctttcaagatgctcttggcttggctgcacgaaattatgctcatgccctatcgtaattacatcttacttgcgggtattggatctcatgcttgatgttgcaaggacagggaaaagcagacatactgaagtcattcaggcattgctgctagagttaacttcccagtgcttgagcaacacagcatcaacccagtacgcattccatgatccaacccgtattgaactaaaacaacaagcaactgaatcatttttgagctgtgttggtctttctaagaaaaccgatgaaactaacgatgatgatgtgcagttgcaaatactcggtgaaccaactttagagatgcctagagtggattactcccttcatgaagtacacaaggagatcctgtcatgtctcactgatccttcatatgatgttagaattacggtgctgaagaggattctttggctcacaaaatcaatcagacatggttatgcagataacattttgcaccagtgggcaggagttaatctgcagcctgctttaatggaacggttgtttgtggaagaacaccctaagtgcctttattataatctgaagatcatcttttcatggaacatggaattcccattcaacaatggagaagattctagcacacttttgtccttgtgggataggttagttcatttaaacagcaccatgtcacatgcaaaaacgagagaaatagttctatgttgcatgggtatgtgcatgaaattgttcactaaacaatctaggggtggtatttcaatggattgtcttaagaccagtgagatctctgcatcctttgtcagaatcaatgaaggggatggattatctgatgccatgcttagattaaacttgtttgtcacacttgtcaagaaccaaagtgaaccatcagaaagcatgaatgctcgacgggctgctgctgaggcaattgttgcttctggtcttcttgaagaagcaagctacgttgcttcatctgtgtccaacatgtactctccttcagaatttgatgaagaccataccaaagagaaatgcatggaagatagcgtttttgaatttgttagtctttatacatgcaagatacttgacttgtggtttgtatgtattcagttgctggaggatgaggatgcatatctgaggcaaaaacttgcgaaggatattcagaaaataatcgctaagggttcagctaataccttctgtgatgattccacaccactacaagttgatagagtcattgaattaagcttggactatttaacttctttgtttggcctctggctgaaatacgttgaattcttgttaaggatagtcttgggcactggaaacgctctgaactcccgtggcgatttggtccgtcagatatttgataaagaaattgataaccaccatgaggagaagctattgatatgtcaaatctgctgttcaaacattcagaaacttctgaattcaaaatgccagatggaagcaggagcagagactaaactgttcctgcagaattggagggagatatttctaaagcagctcacatcgctgactggtggctatattgagaaagaggggaagaacgattggattggcggcataggtaaccacaaggacgtgttcatatcagtgtatgcagtcctactcggtttatacgcgctcacgcagtctggctctctggatcaattggaggaccactgtgcagtttatttgcaggaatttgcaaaccttgaaaggtctatcacaccattcctcaagaacccgttgatttctaatctttacgctctggtaaaattgtcacacgagaggttcatatcatcagataagcctgaggaccaagtgggtgattcaggatcaagttttgacccatattttcttatcagatgattttcgctaatgtactagtaattcttcattgttattcctccgttgtaagactcaatactaattgcttttttatacaaattaccatactatagattctttacttgatgccccttctctgtgtatcagtgcattttaagtgccttgggttttctagcactcaaaaaatgtatgacaaggttgtgactaacgtccgaacaactgataatgatataaatatttttccgattaacataggac

SEQ ID NO: 16389 - DNA, 3898 bp, Zea Mays
aatcgcaggaccaaaccctaaacccccgctcccgcctcctctcgctgctgcagcttgccgggagctcacgcggcctttgcttctcgcttctttcgctggccacctgatcccggttgttcttcgctgggctcccgagccgctgcactcgctgggtgctgccgcctgccaggaggagcggcacggccgtctacaggattaaagggagggaaggtttgtggtttaagttcccggaggaagacttgtggcggaactgtactgacttcagattgaagtcaaggagctaatttgggggaagaatgtcttcaaagtggcggtcactgcagcatcggcaccggtcagtttactttttggaaccatcatcaggaagataccattgcctggctgttctcattcagcttcatctcagaatggcttgcctgacagtattgaagagacaagtatatctgaagaaattcttgatgtggggcagttaaagatgatgggtgaccattttttacaggttcttcttaaaatgaagcataacggtgcaatagataaaacaagggctgggtttactgccctttgcaaccggcttctttgctcaaatgattcaaggctgtgcaaaatgacagagtcatggatggtgctactaatggataggacaattgctaaagggcaaactgtggatgatttgataaggaggagtgcaggaattcctgctgcatttatcgccctgttcctggcagagccagaaggaacaccaaagaaactacttccaagggcattagaatggctgatagagtttgctaagaactctttagctaatttccagaaagactccaaccagaggtctggagtaatgaaagagctgttggaatcacagtcagaaactacaagtgtatattctaatggtaacctatctaaaggtcgagatgagggtgttgttcccactgtgcatgtgttcaatgtgcttaaagctgctttcaatgatgcaaatctggcaaccgacacttcgggtttcagtgctgaagcaacaatagttgctatacgagcattttcatctccctactgggaagtgcgcaatgcagcttgccttgcgtatactgcactagttcgtcgcatggttgggtttctgaatgtgcagaagcgtgaatcagcacgacgatctttaactggccttgaattcttccacaggcaacaattgagtatcttttacatgatacatggacaaattgaccagaatttttttagcatcgttgctgctttgaggtatccagcccttcatcctttcctttctagtgaactgcaaaccacaactgaacaactagctgatggagtgtccagcaatttggagtcacacattacaaaagcaatacaccctagcctgtgtccgattcttattcttttatcaagacttaagccttcacctataagctgtggaactgatgattctttggacccttttttgcttttgcctttcatccaaagatgtgctacccagagtaactaccgggtccgtatccttgcatcaagggcattaacttgtttggtatctaacgagagattgcagtacgttattagtgatatactggataatttacctcgtggaagtcacaaagcaatggctcacagtgttcagcatactgatcctgccatatcagctaatatgggaaaagcaaatgtacttctgctgtctaagtcattcaattcaatacatggccttttgctgcagctggcttctcttctggataacaactttagaggtttgacagacggtagcatgaaggatcagattattggcctattactggaggttctttcaagatgctcttggcttggctgcacgaaattatgctcatgccctatcgtaattacatcttacttgcgggtattggatctcatgcttgatgttgcaaggacagggaaaagcagacatactgaagtcattcaggcattgctgctagagttaacttcccagtgcttgagcaacacagcatcaacccagtacgcattccatgatccaacccgtattgaactaaaacaacaagcaactgaatcatttttgagctgtgttggtctttctaagaaaaccgatgaaactaacgatgatgatgtgcagttgcaaatactcggtgaaccaactttagagatgcctagagtggattactcccttcatgaagtacacaaggagatcctgtcatgtctcactgatccttcatatgatgttagaattacggtgctgaagaggattctttggctcacaaaatcaatcagacatggttatgcagataacattttgcaccagtgggcaggagttaatctgcagcctgctttaatggaacggttgtttgtggaagaacaccctaagtgcctttattataatctgaagatcatcttttcatggaacatggaattcccattcaacaatggagaagattctagcacacttttgtccttgtgggataggttagttcatttaaacagcaccatgtcacatgcaaaaacgagagaaatagttctatgttgcatgggtatgtgcatgaaattgttcactaaacaatctaggggtggtatttcaatggattgtcttaagaccagtgagatctctgcatcctttgtcagaatcaatgaaggggatggattatctgatgccatgcttagattaaacttgtttgtcacacttgtcaagaaccaaagtgaaccatcagaaagcatgaatgctcgacgggctgctgctgaggcaattgttgcttctggtcttcttgaagaagcaagctacgttgcttcatctgtgtccaacatgtactctccttcagaatttgatgaagaccataccaaagagaaatgcatggaagatagcgtttttgaatttgttagtctttatacatgcaagatacttgacttgtggtttgtatgtattcagttgctggaggatgaggatgcatatctgaggcaaaaacttgcgaaggatattcagaaaataatcgctaagggttcagctaataccttctgtgatgattccacaccactacaagttgatagagtcattgaattaagcttggactatttaacttctttgtttggcctctggctgaaatacgttgaattcttgttaaggatagtcttgggcactggaaacgctctgaactcccgtggcgatttggtccgtcagatatttgataaagaaattgataaccaccatgaggagaagctattgatatgtcaaatctgctgttcaaacattcagaaacttctgaattcaaaatgccagatggaagcaggagcagagactaaactgttcctgcagaattggagggagatatttctaaagcagctcacatcgctgactggtggctatattgagaaagaggggaagaacgattggattggcggcataggtaaccacaaggacgtgttcatatcagtgtatgcagtcctactcggtttatacgcgctcacgcagtctggctctctggatcaattggaggaccactgtgcagtttatttgcaggaatttgcaaaccttgaaaggtctatcacaccattcctcaagaacccgttgatttctaatctttacgctctggtaaaattgtcacacgagaggttcatatcatcagataagcctgaggaccaagtgggtgattcaggatcaagttttgacccatattttcttatcagatgattttcgctaatgtactagtaattcttcattgttattcctccgttgtaagactcaatactaattgcttttttatacaaattaccatactatagattctttacttgatgccccttctctgtgtatcagtgcattttaagtgccttgggttttctagcactcaaaaaatgtatgacaaggttgtgactaacgtccgaacaactgataatgatataaatatttttccgattaacataggac

SEQ ID NO: 16390 - DNA, 7025 bp, Zea Mays
gagagaatcgcaggaccaaaccctaaacccccgctcccgcctcctctcgctgctgcagcttgccgggagctcacgcggcctttgcttctcgcttctttcgctggccacctgatcccggttgttcttcgctgggctcccgagccgctgcactcgctgggtgctgccgcctgccaggaggagcggcacggccgtctacaggattaaaggggagggaaggtttgtggtttaagttcccggaggaagacttgtggcggaactgtactgacttcagattgaagtcaaggagctaatttgggggaagaatgtcttcaaagtggcggtcactgcagcatcggcaccggtacacctacacctccattgtgttcccgaagcattaccttgaggccctaactctcgtgccagctgagatctcctcatccaatttctttgtccgattgagcaacttgatttccctgacctccacttactcccaagttgttgtggtcaaggatcttgcctcggcatatgtgcagtttctgtccactacagggactcctgatgaagcagtgctcgctgccacaaagctttatttggagatcctctttcttgagaattccctccctctccaccggacactcatatcagtgcttgccaagtgcaagaaattctccacagtgatcagtgggtgttttgccttgctctgtgaggagtatggtggctctggtagtaaggcaaagaagagatttatggtatctcgagcagccttgtcgcttattgggtacccaaagttgggatttttggatgaggcagtagagaggtgtgcagagatcatggcactggatgttgttgatgggcttgatggagtgacaaaagacattggtgaagggtcacggccatctccagtcgtgatggagcagtgccaggaggccatgtcttgcatgtactacttgctgcagaggtacccgtataagtttattggccttgacaaggcgtcaagtgtcttcaagagtgctgtcaggacaatactatctgttcttaagtcatctgccttttcaagggattgcctggtggcctctggagtaagcttctgtgcggcaattcaggttttcatgagcacagaggagatttcctggttcatttctcaaggtctatttggcatctatgcaaatcatgaagatagaaaaaatcagtctgtgcacaatgtattttcggactttgatctgtgtgaacaaatcagagacctttcagtgttgagtagactttgtctactaagagggattttgacatctattccaaggacagtactcaacatgcaccaacttcattccagtggacctttatggactgttttatatgatggaattttacctgagctttgcaagcattgtgagaacccagttgatagccacttcaatttccatgctcttacagtgacacaaatatgtttgcagcagataaagacatcggtttcatctgatatcaccgacttctctggggactataagcctttttcaagagatgttgtcaaccgtatattgggaatcatatggcgcaacctggaagatcctttgagtcagacagtaaaacaggtgcatttgatctttgatctcctattagatattgaactatgtattgcatcagaagaccgtgaacataacaacaacttgttcctttgcaatgttgcaaatgatttacttcgcttaggtccacgatgcaaagggagatatgtccctttagcttctttgacaaagcgattgggtgccaaatctcttctaacattgaaatcaaatctgctttcagaaacagcttatgcgtacatagatgatgatgtttgttgtgctgtcaccacatttttaaaatccttcctggagactttaagaggtgaatgttggaatgacgatggtgttgagctaggatatgatgccttcagagctttgtgcttgcctcctttcatgcggggacttgtatctggaaattcaaaactacgttctaacttaaatacttatgctttacctgctctaattgaagttgatgcagagagcatattcacaatgcttggattcatctccattggccctagcacaaatgaaactaaactagatgttgttttgaaaaatgaccagtgtatagctgcactggtttctctgcttaaggtctcacggaatctggctcttgttgaaggggacattgatttagatcctgatgaattgtcacagattcagcagatggatagtaagggtgctgcagttatatctgttaaagggattaaagttacagttccttttaattggtttgctttggcactgacacacagtgatgaaagtctccgtatagatgcagctgaatccctctttctaaatccaaagacatcaagtcttccatcctccttggaactgagcttgctcaaagaagctgttccgttgaatatgcgttgtagctcaacggcatttcaaatgaaatggacaagtttatttcggaagttttttgctagggtgcgaactgcacttgacagacaggtaaaacaggggtcttggattccatcattaacgtctagtgttaaaggggctggctctattgatacttctaaggccactgttgtcaagagggctgaagatctcttccaattcatgaagtggctgagttcctttctgtttaattcttgttacccctctggcccttatgaaaggaaaacaattgcaatggagctcattcttacactactagatgtatggcctatttgccgctctgaagggaaaattgatctttatccttacaatgatagcataatattgccagactcaacaatttcatttgttgggtctataattgatagttgggacagattaagggaaaactcttttcgcattctactgcagttcccaacaccgcttcctgggatttccttgagtacatccataaatgatgttatcagatgggcaaaaaaacttgttctaagcccacgtgtccgggaaagtgatgctggtgctttaaccttccgccttatatttaggaagtatgttttgcagcttggatgtattcttgtattttctaaagaaagtgattgccttgaatgttatacacaatctatgaatggagatacagaagttactagtcaaaacccagttgcacagtatatatcttcactcattcaatggctctgtattgttgtcgaagagggtgagagggatctctctgaagcatgtaagaagagctttgttcatggagttcttcttactctgcgctacacatttgatgagatggattggaactctgaggtagtacaatcatgtatttctgaaatgaggtacctggtagaaaaactgcttcaactcataatgcgtgtaacttcggtggccctatgggtggtttcttcagacgcattgtctctgccatatgacatggatgacatgattgatgatggttccttcctctcagatatatatgatgatcaacctactaccacttcagaaagagaggagaagaatgcaaaaccagggagtaatggcaaaccagccgaacaagttgttatggttggttgctggcttgctatgaaggaggtcagtttactttttggaaccatcatcaggaagataccattgcctggctgttctcattcagcttcatctcagaatggcttgcctgacagtattgaagagacaagtatatctgaagaaattcttgatgtggggcagttaaagatgatgggtgaccattttttacaggttcttcttaaaatgaagcataacggtgcaatagataaaacaagggctgggtttactgccctttgcaaccggcttctttgctcaaatgattcaaggctgtgcaaaatgacagagtcatggatggtgctactaatggataggacaattgctaaagggcaaactgtggatgatttgataaggaggagtgcaggaattcctgctgcatttatcgccctgttcctggcagagccagaaggaacaccaaagaaactacttccaagggcattagaatggctgatagagtttgctaagaactctttagctaatttccagaaagactccaaccagaggtctggagtaatgaaagagctgttggaatcacagtcagaaactacaagtgtatattctaatggtaacctatctaaaggtcgagatgagggtgttgttcccactgtgcatgtgttcaatgtgcttaaagctgctttcaatgatgcaaatctggcaaccgacacttcgggtttcagtgctgaagcaacaatagttgctatacgagcattttcatctccctactgggaagtgcgcaatgcagcttgccttgcgtatactgcactagttcgtcgcatggttgggtttctgaatgtgcagaagcgtgaatcagcacgacgatctttaactggccttgaattcttccacaggtatccagcccttcatcctttcctttctagtgaactgcaaaccacaactgaacaactagctgatggagtgtccagcaatttggagtcacacattacaaaagcaatacaccctagcctgtgtccgattcttattcttttatcaagacttaagccttcacctataagctgtggaactgatgattctttggacccttttttgcttttgcctttcatccaaagatgtgctacccagagtaactaccgggtccgtatccttgcatcaagggcattaacttgtttggtatctaacgagagattgcagtacgttattagtgatatactggataatttacctcgtggaagtcacaaagcaatggctcacagtgttcagcatactgatcctgccatatcagctaatatgggaaaagcaaatgtacttctgctgtctaagtcattcaattcaatacatggccttttgctgcagctggcttctcttctggataacaactttagaggtttgacagacggtagcatgaaggatcagattattggcctattactggaggttctttcaagatgctcttggcttggctgcacgaaattatgctcatgccctatcgtaattacatcttacttgcgggtattggatctcatgcttgatgttgcaaggacagggaaaagcagacatactgaagtcattcaggcattgctgctagagttaacttcccagtgcttgagcaacacagcatcaacccagtacgcattccatgatccaacccgtattgaactaaaacaacaagcaactgaatcatttttgagctgtgttggtctttctaagaaaaccgatgaaactaacgatgatgatgtgcagttgcaaatactcggtgaaccaactttagagatgcctagagtggattactcccttcatgaagtacacaaggagatcctgtcatgtctcactgatccttcatatgatgttagaattacggtgctgaagaggattctttggctcacaaaatcaatcagacatggttatgcagataacattttgcaccagtgggcaggagttaatctgcagcctgctttaatggaacggttgtttgtggaagaacaccctaagtgcctttattataatctgaagatcatcttttcatggaacatggaattcccattcaacaatggagaagattctagcacacttttgtccttgtgggataggttagttcatttaaacagcaccatgtcacatgcaaaaacgagagaaatagttctatgttgcatgggtatgtgcatgaaattgttcactaaacaatctaggggtggtatttcaatggattgtcttaagaccagtgagatctctgcatcctttgtcagaatcaatgaaggggatggattatctgatgccatgcttagattaaacttgtttgtcacacttgtcaagaaccaaagtgaaccatcagaaagcatgaatgctcgacgggctgctgctgaggcaattgttgcttctggtcttcttgaagaagcaagctacgttgcttcatctgtgtccaacatgtactctccttcagaatttgatgaagaccataccaaagagaaatgcatggaagatagcgtttttgaatttgttagtctttatacatgcaagatacttgacttgtggtttgtatgtattcagttgctggaggatgaggatgcatatctgaggcaaaaacttgcgaaggatattcagaaaataatcgctaagggttcagctaataccttctgtgatgattccacaccactacaagttgatagagtcattgaattaagcttggactatttaacttctttgtttggcctctggctgaaatacgttgaattcttgttaaggatagtcttgggcactggaaacgctctgaactcccgtggcgatttggtccgtcagatatttgataaagaaattgataaccaccatgaggagaagctattgatatgtcaaatctgctgttcaaacattcagaaacttctgaattcaaaatgccagatggaagcaggagcagagactaaactgttcctgcagaattggagggagatatttctaaagcagctcacatcgctgactggtggctatattgagaaagaggggaagaacgattggattggcggcataggtaaccacaaggacgtgttcatatcagtgtatgcagtcctactcggtttatacgcgctcacgcagtctggctctctggatcaattggaggaccactgtgcagtttatttgcaggaatttgcaaaccttgaaaggtctatcacaccattcctcaagaacccgttgatttctaatctttacgctctggtaaaattgtcacacgagaggttcatatcatcagataagcctgaggaccaagtgggtgattcaggatcaagttttgacccatattttcttatcagatgattttcgctaatgtactagtaattcttcattgttattcctccgttgtaagactcaatactaattgcttttttatacaaattaccatactatagattctttacttgatgccccttctctgtgtatcagtgcattttaagtgccttgggttttctagcactcaaaaaatgtatgacaaggttgtgactaacgtccgaacaactgataatgatataaatatttttccgattaacataggac

SEQ ID NO: 16391 - DNA, 7033 bp, Zea Mays
ggaagagagagaatcgcaggaccaaaccctaaacccccgctcccgcctcctctcgctgctgcagcttgccgggagctcacgcggcctttgcttctcgcttctttcgctggccacctgatcccggttgttcttcgctgggctcccgagccgctgcactcgctgggtgctgccgcctgccaggaggagcggcacggccgtctacaggattaaagggagggaaggtttgtggtttaagttcccggaggaagacttgtggcggaactgtactgacttcagcagattgaagtcaaggagctaatttgggggaagaatgtcttcaaagtggcggtcactgcagcatcggcaccggtacacctacacctccattgtgttcccgaagcattaccttgaggccctaactctcgtgccagctgagatctcctcatccaatttctttgtccgattgagcaacttgatttccctgacctccacttactcccaagttgttgtggtcaaggatcttgcctcggcatatgtgcagtttctgtccactacagggactcctgatgaagcagtgctcgctgccacaaagctttatttggagatcctctttcttgagaattccctccctctccaccggacactcatatcagtgcttgccaagtgcaagaaattctccacagtgatcagtgggtgttttgccttgctctgtgaggagtatggtggctctggtagtaaggcaaagaagagatttatggtatctcgagcagccttgtcgcttattgggtacccaaagttgggatttttggatgaggcagtagagaggtgtgcagagatcatggcactggatgttgttgatgggcttgatggagtgacaaaagacattggtgaagggtcacggccatctccagtcgtgatggagcagtgccaggaggccatgtcttgcatgtactacttgctgcagaggtacccgtataagtttattggccttgacaaggcgtcaagtgtcttcaagagtgctgtcaggacaatactatctgttcttaagtcatctgccttttcaagggattgcctggtggcctctggagtaagcttctgtgcggcaattcaggttttcatgagcacagaggagatttcctggttcatttctcaaggtctatttggcatctatgcaaatcatgaagatagaaaaaatcagtctgtgcacaatgtattttcggactttgatctgtgtgaacaaatcagagacctttcagtgttgagtagactttgtctactaagagggattttgacatctattccaaggacagtactcaacatgcaccaacttcattccagtggacctttatggactgttttatatgatggaattttacctgagctttgcaagcattgtgagaacccagttgatagccacttcaatttccatgctcttacagtgacacaaatatgtttgcagcagataaagacatcggtttcatctgatatcaccgacttctctggggactataagcctttttcaagagatgttgtcaaccgtatattgggaatcatatggcgcaacctggaagatcctttgagtcagacagtaaaacaggtgcatttgatctttgatctcctattagatattgaactatgtattgcatcagaagaccgtgaacataacaacaacttgttcctttgcaatgttgcaaatgatttacttcgcttaggtccacgatgcaaagggagatatgtccctttagcttctttgacaaagcgattgggtgccaaatctcttctaacattgaaatcaaatctgctttcagaaacagcttatgcgtacatagatgatgatgtttgttgtgctgtcaccacatttttaaaatccttcctggagactttaagaggtgaatgttggaatgacgatggtgttgagctaggatatgatgccttcagagctttgtgcttgcctcctttcatgcggggacttgtatctggaaattcaaaactacgttctaacttaaatacttatgctttacctgctctaattgaagttgatgcagagagcatattcacaatgcttggattcatctccattggccctagcacaaatgaaactaaactagatgttgttttgaaaaatgaccagtgtatagctgcactggtttctctgcttaaggtctcacggaatctggctcttgttgaaggggacattgatttagatcctgatgaattgtcacagattcagcagatggatagtaagggtgctgcagttatatctgttaaagggattaaagttacagttccttttaattggtttgctttggcactgacacacagtgatgaaagtctccgtatagatgcagctgaatccctctttctaaatccaaagacatcaagtcttccatcctccttggaactgagcttgctcaaagaagctgttccgttgaatatgcgttgtagctcaacggcatttcaaatgaaatggacaagtttatttcggaagttttttgctagggtgcgaactgcacttgacagacaggtaaaacaggggtcttggattccatcattaacgtctagtgttaaaggggctggctctattgatacttctaaggccactgttgtcaagagggctgaagatctcttccaattcatgaagtggctgagttcctttctgtttaattcttgttacccctctggcccttatgaaaggaaaacaattgcaatggagctcattcttacactactagatgtatggcctatttgccgctctgaagggaaaattgatctttatccttacaatgatagcataatattgccagactcaacaatttcatttgttgggtctataattgatagttgggacagattaagggaaaactcttttcgcattctactgcagttcccaacaccgcttcctgggatttccttgagtacatccataaatgatgttatcagatgggcaaaaaaacttgttctaagcccacgtgtccgggaaagtgatgctggtgctttaaccttccgccttatatttaggaagtatgttttgcagcttggatgtattcttgtattttctaaagaaagtgattgccttgaatgttatacacaatctatgaatggagatacagaagttactagtcaaaacccagttgcacagtatatatcttcactcattcaatggctctgtattgttgtcgaagagggtgagagggatctctctgaagcatgtaagaagagctttgttcatggagttcttcttactctgcgctacacatttgatgagatggattggaactctgaggtagtacaatcatgtatttctgaaatgaggtacctggtagaaaaactgcttcaactcataatgcgtgtaacttcggtggccctatgggtggtttcttcagacgcattgtctctgccatatgacatggatgacatgattgatgatggttccttcctctcagatatatatgatgatcaacctactaccacttcagaaagagaggagaagaatgcaaaaccagggagtaatggcaaaccagccgaacaagttgttatggttggttgctggcttgctatgaaggaggtcagtttactttttggaaccatcatcaggaagataccattgcctggctgttctcattcagcttcatctcagaatggcttgcctgacagtattgaagagacaagtatatctgaagaaattcttgatgtggggcagttaaagatgatgggtgaccattttttacaggttcttcttaaaatgaagcataacggtgcaatagataaaacaagggctgggtttactgccctttgcaaccggcttctttgctcaaatgattcaaggctgtgcaaaatgacagagtcatggatggtgctactaatggataggacaattgctaaagggcaaactgtggatgatttgataaggaggagtgcaggaattcctgctgcatttatcgccctgttcctggcagagccagaaggaacaccaaagaaactacttccaagggcattagaatggctgatagagtttgctaagaactctttagctaatttccagaaagactccaaccagaggtctggagtaatgaaagagctgttggaatcacagtcagaaactacaagtgtatattctaatggtaacctatctaaaggtcgagatgagggtgttgttcccactgtgcatgtgttcaatgtgcttaaagctgctttcaatgatgcaaatctggcaaccgacacttcgggtttcagtgctgaagcaacaatagttgctatacgagcattttcatctccctactgggaagtgcgcaatgcagcttgccttgcgtatactgcactagttcgtcgcatggttgggtttctgaatgtgcagaagcgtgaatcagcacgacgatctttaactggccttgaattcttccacaggtatccagcccttcatcctttcctttctagtgaactgcaaaccacaactgaacaactagctgatggagtgtccagcaatttggagtcacacattacaaaagcaatacaccctagcctgtgtccgattcttattcttttatcaagacttaagccttcacctataagctgtggaactgatgattctttggacccttttttgcttttgcctttcatccaaagatgtgctacccagagtaactaccgggtccgtatccttgcatcaagggcattaacttgtttggtatctaacgagagattgcagtacgttattagtgatatactggataatttacctcgtggaagtcacaaagcaatggctcacagtgttcagcatactgatcctgccatatcagctaatatgggaaaagcaaatgtacttctgctgtctaagtcattcaattcaatacatggccttttgctgcagctggcttctcttctggataacaactttagaggtttgacagacggtagcatgaaggatcagattattggcctattactggaggttctttcaagatgctcttggcttggctgcacgaaattatgctcatgccctatcgtaattacatcttacttgcgggtattggatctcatgcttgatgttgcaaggacagggaaaagcagacatactgaagtcattcaggcattgctgctagagttaacttcccagtgcttgagcaacacagcatcaacccagtacgcattccatgatccaacccgtattgaactaaaacaacaagcaactgaatcatttttgagctgtgttggtctttctaagaaaaccgatgaaactaacgatgatgatgtgcagttgcaaatactcggtgaaccaactttagagatgcctagagtggattactcccttcatgaagtacacaaggagatcctgtcatgtctcactgatccttcatatgatgttagaattacggtgctgaagaggattctttggctcacaaaatcaatcagacatggttatgcagataacattttgcaccagtgggcaggagttaatctgcagcctgctttaatggaacggttgtttgtggaagaacaccctaagtgcctttattataatctgaagatcatcttttcatggaacatggaattcccattcaacaatggagaagattctagcacacttttgtccttgtgggataggttagttcatttaaacagcaccatgtcacatgcaaaaacgagagaaatagttctatgttgcatgggtatgtgcatgaaattgttcactaaacaatctaggggtggtatttcaatggattgtcttaagaccagtgagatctctgcatcctttgtcagaatcaatgaaggggatggattatctgatgccatgcttagattaaacttgtttgtcacacttgtcaagaaccaaagtgaaccatcagaaagcatgaatgctcgacgggctgctgctgaggcaattgttgcttctggtcttcttgaagaagcaagctacgttgcttcatctgtgtccaacatgtactctccttcagaatttgatgaagaccataccaaagagaaatgcatggaagatagcgtttttgaatttgttagtctttatacatgcaagatacttgacttgtggtttgtatgtattcagttgctggaggatgaggatgcatatctgaggcaaaaacttgcgaaggatattcagaaaataatcgctaagggttcagctaataccttctgtgatgattccacaccactacaagttgatagagtcattgaattaagcttggactatttaacttctttgtttggcctctggctgaaatacgttgaattcttgttaaggatagtcttgggcactggaaacgctctgaactcccgtggcgatttggtccgtcagatatttgataaagaaattgataaccaccatgaggagaagctattgatatgtcaaatctgctgttcaaacattcagaaacttctgaattcaaaatgccagatggaagcaggagcagagactaaactgttcctgcagaattggagggagatatttctaaagcagctcacatcgctgactggtggctatattgagaaagaggggaagaacgattggattggcggcataggtaaccacaaggacgtgttcatatcagtgtatgcagtcctactcggtttatacgcgctcacgcagtctggctctctggatcaattggaggaccactgtgcagtttatttgcaggaatttgcaaaccttgaaaggtctatcacaccattcctcaagaacccgttgatttctaatctttacgctctggtaaaattgtcacacgagaggttcatatcatcagataagcctgaggaccaagtgggtgattcaggatcaagttttgacccatattttcttatcagatgattttcgctaatgtactagtaattcttcattgttattcctccgttgtaagactcaatactaattgcttttttatacaaattaccatactatagattctttacttgatgccccttctctgtgtatcagtgcattttaagtgccttgggttttctagcactcaaaaaatgtatgacaaggttgtgactaacgtccgaacaactgataatgatataaatatttttccgattaacataggac

SEQ ID NO: 16392 - DNA, 3727 bp, Zea Mays
actcatcaggcatgggacccgagccctgtgccagatcgcggaccgtccgcgcctgggcaaagaacaccgtcaccaccacctcgccggaaccccggcgcctcgcccggagcacgtggttatcgccccccgtcggccgcggctgcggtgtagcggagaaagatgatgaacggcggcggcggccagaagaggcggaactcgaaaatcattccctacgagtaccgcgttgagtccgaccccaagttcttcgacaagtcgtggcggaagctccatgatgccatccgactgcttataacttggtattgaacaagtttgctcctgagctctatgagaaattcacagaaaacatgaaagcgcatcttgaagagatgcggacatgtatagaggctgctcaaggtggtttgttcctggaagagatgcaacgaaaatggaatgactataacaaggcattgaaaatgattagagacatcctgatgtatatggacaggacatatattcccactaataaaaaggcacctgtctttgatcatgggatagagctttggagggataccatagttcggtctcctacgattcaggggaggttgtctgacatgctcgtcgaactcatacatatagaaaggaccggtgatgtgataaacagaggcttgatgaggactacaactaaaatgttgatggatctagggctgtctgtttaccaggacgattttgaaaggccatttcttgaggtctctgctagtttctatagtggtgagtcacagcaactcattgagtgctgtgcttgtggtgagtatctgaagcaggctgagaggcgcctctctgaagaatcagagcgtgtgtcacagtacttggatgttaaaaccaatgagaaaattactgctgtcgtggtaaaagagatgctagcaaatcacatgcagaggttgattcttatggagaactcagggcttgtgaatatgcttgttgaagacaggtatgaagacctgacaaggatgtacgctttgtttaatcatgttcctgatgggctcacagcaattagatctgtgatgacgtctcatattaaggatactggcaaaagtttggtaacagatccagagagactaaaggacccggttgattttgttcagcggcttcttaacatgaaggataagtatgacaatatcatcaatgtgtcattcagcaacgacaagagtttcctgaatgctctcaatttctcatttgagcacgttataaacttaaacaacagatcccctgagttcatatcactgtttgttgatgacaaactgcggaaggtggtgaaagaggccaatgaggaggatcttgaaactgtccttgacaaggtgatgacgttgtttaggtatttgcaagaaaaagatctatttgagaaatattacaagcaacacttggcaaagcgtcttctttgtgggaaggctgctcctgaggattctgagcgaagcatgcttgtgaagctgaagacggaatgtggctaccagttcacttcaaagttggagggcatgatcactgatttgaatacctctcaggatactacacaagggttttatgcatctacttcttcgcggctgctggcagatgcccccacaatatctgtccagatactcaccactgggtcatggccaacacaaacctgcaatacctgtaaccttccccctgaaattgtctctgtctcagagaagtttcgggcttattaccttggcacacataatggcaggaggctaacatggcaaacaaacatggggaatgctgacatcaaagcaacatttggaaatggcaacaagcatgaactgaacgtctcaacataccagatgtgtgttctcatgctgtttaattcatcaaatgtcttgacttaccgtgaaattgagcagtctacagcaataccaactgctgacttgaagcgatgcctcctgtcgctagctcttgtgaagggtagacaagtcctgcgaaaagagcccatgagcaaggatattgccgatgatgacagcttctgcgtgaacgacaagttcaccagcaagcttttcaaggtgaagattaaccctgtggtgacgcagaaggagaccgaccctgagaagctagagacacggcagcgggtcgaggaggataggaagccacagatcgaggcggccatcgtgcggatcatgaagtcaaggagggttctagaccacaacagcataatgacggaggtgacaaagcagttgcagccccgtttcatgccaaaccccgtggtgatcaagaagcggatcgagtcgctcatcgagcgcgagttcctggagcgggacaaggtggacaggaagatgtaccgctatcttgcctaaaacaacctcccttgccttaggaattagatcattatacgttacccatgtcatataaacagaccttgatccatgtacttacgcatagaaggaaatgagtctgcatgccgtgatacttttaggtgaaactgtttttttgttgggtttgtccagttagttgataatttagcttctataacatcctgcgctgggttgcatgctaatgctgtagatagatcttgctggctgcgacgcagtgctctcttttggttgctgcttcagaaaggcgatctgattgcagccaaggttgactttttgtggcttgaatgatgattgatgtcactgaaatgatgcttggatcggatggtaatctactgaattgctctatccagtttgcaatgctatgatgtgcgtggcttcaagcatgtcacatgtggtagcatgtttgtcctgtattgcgatttgtgagcaaagttgatgacgctttagcgtaaaatctccttagttttgttgattgtatatctgatccatgttttatcaaaatttgagaagagactattcatggctgggttattggggatttagggtttgggatcatggtttcaaatattctgttggggtgccaggtgaggtggacatgggcgaggaatggcttggctccgtctccgacgctggcgacgcgtgcaagcttcgctggacacataagcaaattcttttctctttcgttaccttttatatgtgaatacagatccgttttgtgatgacgatgtttgtgtgattaatttgttgcatttgatgtgctaatctatctatgttgtaggcagctcacgtactcacaaatggagcacgacaagtattttaaagtcgccgtgcatgcacagatgttgccatggctttcagtctctcgtgaaccatcgcggggacgcgacgcgtcagcgcccgacccaacacaacccaatcatgcaatgctgctcacgctgtcacgcaggcgggagggcctgtacaaataaatatatggacacgatggtgctcgctgggctccaagaaagaagcgttggatcgtcttcggctagcttccggcgcgatggcggggtcgcgctcaagcgcggcgtttccgtcgccactgcggagagcatgctggagaacggcgacagggacgaggaggatatcatcttttgagtctgtggagtcctatgagtagagcgtgcagtggctgtgctacacctgcgggctgcggcgccaaacagcaaccttctgtacacacagctatacatgtccaataagcacgaggcccgtgagcccggcacgaagcccgcttttttggcccggtccgagcccggcacggcccggttatatgcgggcccgggccggcccggcacgaataaacgggccgggctcggacaggaaattaggcacggtgggctagc

SEQ ID NO: 16393 - DNA, 3779 bp, Zea Mays
actcatcaggcatgggacccgagccctgtgccagatcgcggaccgtccgcgcctgggcaaagaacaccgtcaccaccacctcgccggaaccccggcgcctcgcccggagcacgtggttatcgccccccgtcggccgcggctgcggtgtagcggagaaagatgatgaacggcggcggcggccagaagaggcggaactcgaaaatcattccctacgagtaccgcgttgagtccgaccccaagttcttcgacaagtcgtggcggaagctccatgatgccatccgtgagatctacaaccacaactccatgagcctctccttcgaggagctctacaggactgcttataacttggtattgaacaagtttgctcctgagctctatgagaaattcacagaaaacatgaaagcgcatcttgaagagatgcggacatgtatagaggctgctcaaggtggtttgttcctggaagagatgcaacgaaaatggaatgactataacaaggcattgaaaatgattagagacatcctgatgtatatggacaggacatatattcccactaataaaaaggcacctgtctttgatcatgggatagagctttggagggataccatagttcggtctcctacgattcaggggaggttgtctgacatgctcgtcgaactcatacatatagaaaggaccggtgatgtgataaacagaggcttgatgaggactacaactaaaatgttgatggatctagggctgtctgtttaccaggacgattttgaaaggccatttcttgaggtctctgctagtttctatagtggtgagtcacagcaactcattgagtgctgtgcttgtggtgagtatctgaagcaggctgagaggcgcctctctgaagaatcagagcgtgtgtcacagtacttggatgttaaaaccaatgagaaaattactgctgtcgtggtaaaagagatgctagcaaatcacatgcagaggttgattcttatggagaactcagggcttgtgaatatgcttgttgaagacaggtatgaagacctgacaaggatgtacgctttgtttaatcatgttcctgatgggctcacagcaattagatctgtgatgacgtctcatattaaggatactggcaaaagtttggtaacagatccagagagactaaaggacccggttgattttgttcagcggcttcttaacatgaaggataagtatgacaatatcatcaatgtgtcattcagcaacgacaagagtttcctgaatgctctcaatttctcatttgagcacgttataaacttaaacaacagatcccctgagttcatatcactgtttgttgatgacaaactgcggaaggtggtgaaagaggccaatgaggaggatcttgaaactgtccttgacaaggtgatgacgttgtttaggtatttgcaagaaaaagatctatttgagaaatattacaagcaacacttggcaaagcgtcttctttgtgggaaggctgctcctgaggattctgagcgaagcatgcttgtgaagctgaagacggaatgtggctaccagttcacttcaaagttggagggcatgatcactgatttgaatacctctcaggatactacacaagggttttatgcatctacttcttcgcggctgctggcagatgcccccacaatatctgtccagatactcaccactgggtcatggccaacacaaacctgcaatacctgtaaccttccccctgaaattgtctctgtctcagagaagtttcgggcttattaccttggcacacataatggcaggaggctaacatggcaaacaaacatggggaatgctgacatcaaagcaacatttggaaatggcaacaagcatgaactgaacgtctcaacataccagatgtgtgttctcatgctgtttaattcatcaaatgtcttgacttaccgtgaaattgagcagtctacagcaataccaactgctgacttgaagcgatgcctcctgtcgctagctcttgtgaagggtagacaagtcctgcgaaaagagcccatgagcaaggatattgccgatgatgacagcttctgcgtgaacgacaagttcaccagcaagcttttcaaggtgaagattaaccctgtggtgacgcagaaggagaccgaccctgagaagctagagacacggcagcgggtcgaggaggataggaagccacagatcgaggcggccatcgtgcggatcatgaagtcaaggagggttctagaccacaacagcataatgacggaggtgacaaagcagttgcagccccgtttcatgccaaaccccgtggtgatcaagaagcggatcgagtcgctcatcgagcgcgagttcctggagcgggacaaggtggacaggaagatgtaccgctatcttgcctaaaacaacctcccttgccttaggaattagatcattatacgttacccatgtcatataaacagaccttgatccatgtacttacgcatagaaggaaatgagtctgcatgccgtgatacttttaggtgaaactgtttttttgttgggtttgtccagttagttgataatttagcttctataacatcctgcgctgggttgcatgctaatgctgtagatagatcttgctggctgcgacgcagtgctctcttttggttgctgcttcagaaaggcgatctgattgcagccaaggttgactttttgtggcttgaatgatgattgatgtcactgaaatgatgcttggatcggatggtaatctactgaattgctctatccagtttgcaatgctatgatgtgcgtggcttcaagcatgtcacatgtggtagcatgtttgtcctgtattgcgatttgtgagcaaagttgatgacgctttagcgtaaaatctccttagttttgttgattgtatatctgatccatgttttatcaaaatttgagaagagactattcatggctgggttattggggatttagggtttgggatcatggtttcaaatattctgttggggtgccaggtgaggtggacatgggcgaggaatggcttggctccgtctccgacgctggcgacgcgtgcaagcttcgctggacacataagcaaattcttttctctttcgttaccttttatatgtgaatacagatccgttttgtgatgacgatgtttgtgtgattaatttgttgcatttgatgtgctaatctatctatgttgtaggcagctcacgtactcacaaatggagcacgacaagtattttaaagtcgccgtgcatgcacagatgttgccatggctttcagtctctcgtgaaccatcgcggggacgcgacgcgtcagcgcccgacccaacacaacccaatcatgcaatgctgctcacgctgtcacgcaggcgggagggcctgtacaaataaatatatggacacgatggtgctcgctgggctccaagaaagaagcgttggatcgtcttcggctagcttccggcgcgatggcggggtcgcgctcaagcgcggcgtttccgtcgccactgcggagagcatgctggagaacggcgacagggacgaggaggatatcatcttttgagtctgtggagtcctatgagtagagcgtgcagtggctgtgctacacctgcgggctgcggcgccaaacagcaaccttctgtacacacagctatacatgtccaataagcacgaggcccgtgagcccggcacgaagcccgcttttttggcccggtccgagcccggcacggcccggttatatgcgggcccgggccggcccggcacgaataaacgggccgggctcggacaggaaattaggcacggtgggctagc

SEQ ID NO: 16394 - DNA, 517 bp, Zea Mays
tccctaaagaggcgacgatatcagagctatggtatgtcgaagagtacgatgttcttgcattggcactgaatggaaagatgaaggtgcggaggctccaccttggctgcaatcgtcagggcatctgaagctagagaggtcatggaaacgggaaaggattaggagatgcacagccaccaaacagacttttttcgcttgcatgtctcgccgaaagggccaccttggtactgcccagctgagcgagatgtgctacaatctgcctttacataccgagaactgacaagttatattgacctagactatcttcagcagattatctatcatcatttctatattcaaatttcactttacgaacattagtctatagtacagaataaactgttggacacagactaatgtttatgtaggaacagtatgcatgttttaacaatatataatacaattatttgagcacaacaactattaaagtgatgtttggttcagacattgttaagggaatggtaatgaaatctcttactgg

SEQ ID NO: 16395 - DNA, 1490 bp, Zea Mays
acggatcaagcagcactcaccaaaccacatttgatggccacatcacccctgagctgcttctccgcgcgtcccagacccagatctccgggcaccgccgtctggttgcttccggccgccgttctcctcctcctcctcaaccggtggtcgcacatggcctcttacccttctgtctcccctcgtggctccggctcggtgcaggtcgggcgcgccgagctttactcgaagatggcgcgtgacctcgacgagcgcggcgcggcgttcctgaagggcggcgagacgtcgcagtcgctcacgctctcggacctcttcgacaccgcagatgacggcgccgtcgtacccaggctcaaggccgccgacccgccagtgcgcgcgaatgtgctctatatggaccccaagttcgccgctgtgatctcggagaagaactaagttagcccgtgattggtcagatggctgtataagttcctttgggaggtcaggtcagggcagtgctcattcagtatgttttgggcttgcaggaaagctgtaaaggacgtgtttcttccttattttgaccaagctatctggttccaaaatacgagcatgtatcacttcagcatgtttcatgcctcccatcacttggagcccattgtagcaactgaggatgagattgaagccgaagtggaggcagtaaaaggtgtcaccaagaatttgtgtccgcttaaaattgtattggacagagtggttttgacctcaaccggtgtgcttcttggcctgtggcaggttgaatctggtactgatcctgcagaaatccgctcaagattgagagaagctcttcctcgtgcacctcaaaagcaactgtatgaccctgttctgcttcacacctcgtttgcacgaattctgggacatcccaggctccctaaagagcaaagtgcatcatcgtttgataatgtcaagttcttccatgagctagttgctcaaattaatgagaagatctgtggctttcaggcgacgatatcagagctatggtatgtcgaagagtacgatgttcttgcattggcactgaatggaaagatgaaggtgcggaggctccaccttggctgcaatcgtcagggcatctgaagctagagaggtcatggaaacgggaaaggattaggagatgcacagccaccaaacagacttttttcgcttgcatgtctcgccgaaagggccaccttggtactgcccagctgagcgagatgtgctacaatctgcctttacataccgagaactgacaagttatattgacctagactatcttcagcagattatctatcatcatttctatattcaaatttcactttacgaacattagtctatagtacagaataaactgttggacacagactaatgtttatgtaggaacagtatgcatgttttaacaatatataatacaattatttgagcacaacaactattaaagtgatgtttggttcagacattgttaagggaatggtaatgaaatctcttactgg

SEQ ID NO: 16396 - DNA, 1407 bp, Zea Mays
acggatcaagcagcactcaccaaaccacatttgatggccacatcacccctgagctgcttctccgcgcgtcccagacccagatctccgggcaccgccgtctggttgcttccggccgccgttctcctcctcctcctcaaccggtggtcgcacatggcctcttacccttctgtctcccctcgtggctccggctcggtgcaggtcgggcgcgccgagctttactcgaagatggcgcgtgacctcgacgagcgcggcgcggcgttcctgaagggcggcgagacgtcgcagtcgctcacgctctcggacctcttcgacaccgcagatgacggcgccgtcgtacccaggctcaaggccgccgacccgccagtgcgcgcgaatgtgctctatatggaccccaagttcgccgctgtgatctcgaaagctgtaaaggacgtgtttcttccttattttgaccaagctatctggttccaaaatacgagcatgtatcacttcagcatgtttcatgcctcccatcacttggagcccattgtagcaactgaggatgagccgaagtggaggcagtaaaaggtgtcaccaagaatttgtgtccgcttaaaattgtattggacagagtggttttgacctcaaccggtgtgcttcttggcctgtggcaggttttgatctcaagagaccctgttctgttgaatctggtactgatcctgcagaaatccgctcaagattgagagaagctcttcctcgtgcacctcaaaagcaactgtatgaccctgttctgcttcacacctcgtttgcacgaattctgggacatcccaggctccctaaagagcaaagtgcatcatcgtttgataatgtcaagttcttccatgagctagttgctcaaattaatgagaagatctgtggctttcaggcgacgatatcagagctatggtatgtcgaagagtacgatgttcttgcattggcactgaatggaaagatgaaggtgcggaggctccaccttggctgcaatcgtcagggcatctgaagctagagaggtcatggaaacgggaaaggattaggagatgcacagccaccaaacagacttttttcgcttgcatgtctcgccgaaagggccaccttggtactgcccagctgagcgagatgtgctacaatctgcctttacataccgagaactgacaagttatattgacctagactatcttcagcagattatctatcatcatttctatattcaaatttcactttacgaacattagtctatagtacagaataaactgttggacacagactaatgtttatgtaggaacagtatgcatgttttaacaatatataatacaattatttgagcacaacaactattaaagtgatgtttggttcagacattgttaagggaatggtaatgaaatctcttactgg

SEQ ID NO: 16397 - DNA, 1439 bp, Zea Mays
cagaatctctcgattcggcagtatgccaatagaattgacaaagcttaatgatagccacacggatcaagcagcactcaccaaaccacatttgatggccacatcacccctgagctgcttctccgcgcgtcccagacccagatctccgggcaccgccgtctggttgcttccggccgccgttctcctcctcctcctcaaccggtggtcgcacatggcctcttacccttctgtctcccctcgtggctccggctcggtgcaggtcgggcgcgccgagctttactcgaagatggcgcgtgacctcgacgagcgcggcgcggcgttcctgaagggcggcgagacgtcgcagtcgctcacgctctcggacctcttcgacaccgcagatgacggcgccgtcgtacccaggctcaaggccgccgacccgccagtgcgcgcgaatgtgctctatatggaccccaagttcgccgctgtgatctcgaaagctgtaaaggacgtgtttcttccttattttgaccaagctatctggttccaaaatacgagcatgtatcacttcagcatgtttcatgcctcccatcacttggagcccattgtagcaactgaggatgagccgaagtggaggcagtaaaaggtgtcaccaagaatttgtgtccgcttaaaattgtattggacagagtggttttgacctcaaccggtgtgcttcttggcctgtggcaggttgaatctggtactgatcctgcagaaatccgctcaagattgagagaagctcttcctcgtgcacctcaaaagcaactgtatgaccctgttctgcttcacacctcgtttgcacgaattctgggacatcccaggctccctaaagagcaaagtgcatcatcgtttgataatgtcaagttcttccatgagctagttgctcaaattaatgagaagatctgtggctttcaggcgacgatatcagagctatggtatgtcgaagagtacgatgttcttgcattggcactgaatggaaagatgaaggtgcggaggctccaccttggctgcaatcgtcagggcatctgaagctagagaggtcatggaaacgggaaaggattaggagatgcacagccaccaaacagacttttttcgcttgcatgtctcgccgaaagggccaccttggtactgcccagctgagcgagatgtgctacaatctgcctttacataccgagaactgacaagttatattgacctagactatcttcagcagattatctatcatcatttctatattcaaatttcactttacgaacattagtctatagtacagaataaactgttggacacagactaatgtttatgtaggaacagtatgcatgttttaacaatatataatacaattatttgagcacaacaactattaaagtgatgtttggttcagacattgttaagggaatggtaatgaaatctcttactgg

SEQ ID NO: 16398 - DNA, 4135 bp, Zea Mays
ctcatgggcctgcactgccaggactggatcgctagctcgcggcatgggctggaagggattttgttgacgccgagtgccagatgccaattgtttagccatggggaaaccacaaaccgatggtgaccagtcacctgtaaactcagatactgatgtgatggattgcctgaacttcgatggccatggagatgttgaagacccccacaaggaggttgcaaaaggggagcagcagccttctggcgaagttgatgaacagcagtctgttatggatgttgatttgacatgtataacatctgtgggagatgaagggaatgaaaagcagaatgctatggatgtggatttgaaagaaatactatctgaggaagatggaggggaaggaaaggcttcttcagatctaccctcacaagtaccagtggatttcaacgttgcaagcctcgagaagttctgtaaagaagcagcaagatcgtttttcagtgaaactggactggttagccatcagataaactcgtacgatcattttgtctcccatggactccaagagctctttgattctcttggggaaatcactgtggaacctgattatgacccttcaaataaacatggtgcttggaaacatgcaactgtcaaatttggtagggttaagcttgatgagccagtgtttatgcttgaaaattctgaccttgaagagcaagatctcaaatttaagcctagacatgctcgcctccagaagatgacatatgcgtctaggatgaatgtggaaatgactgttcaggtttatatattcgacacaagtgacaaagccaaaactggcaaggatacacatgttcataaaagagagataatgacagaaactaaacaaatcaacattggattgttacctgtaatggtgaagtcgaatttgtgctggctgcataaatctcaaaaaggtgactgcccgtttgattttggtggctactttttgatcaaaggaacagaaaaggtattcattgctgaagagcaaaggtttttatcaaggatttgggtcacagaccaccccagctgggatgcaagttacctatctcagatcagacgagaaaagatcaatataaaacttgttccgtccaaaagcaatgaaagctgcaaagtcataaacatttgcttcatgggtacgattatgccaatttgggtagcattttttgcacttggtgtatcgtcagacaaggaagcttttgatatgattgatatcctagactgtgatgctgacatagttaacataatatcattaactattaaagaatctcatgaagaatttgaaggcttccgcactccaggtagagcccgtcaatatgttgatgagctgatcagaaaatcaaagtttccgcccaaagaatcctttgatgagtatgtttgtaggtatatgtttcctggtgtcaatgggtttaggagcaaggcacttttcttgggttacatggtcaaatgtctgctaatggcatactctggcaatcgaaaatgtgataataaggatgatctccgtaacaaaaggctagatctttcctgccaattgcttcggagagaactctggactcatattaaaagagcagaaaggcgcatggttaagctcatgcagagagatttgagcaatgatggcaacttgcaagaccttaggcgttatgtggatgcatcaattattaccaatggattgaaccgggccttctccactggttcttggcggcatccttataaaaaagaaaggtgttcaggggttgtagcaacccttcggagaacaaatccacttcaaatgatgtctgatgttaggaagacgcgacagtggtttgcatatgctggaacggctggagatgcaagatacccgaatccatcctactggggaaaattgtgttttttgtccaccccggatgctgaaaaatgtggatttgtgaaaaaccttgctgttactgctgtggttagttctgtagtgaggaaaccgttgattgatacatttgtttcttgtggaatgaagaaactggatgatatttctctacaagatatttctgggaaggacaggattttcttgaatggaagcttgctaggagtatgtgcagacccacacgaattgactttgcgtttaagaagcttgaggcgtagcaagctaattgatcctcaggttgaaatcaaaagggacaagcaccataaagaagttcgtgtattttctgatccaggcagaattatgagaccacttcttgtagttgaaaatctaagaagaatcacaagaccaaaagatggactatactcttttcaggaacttatagatcaaaacatagttgagctgattggtgttgaagaagaggaggatatccaatgtgcgtacggaattagacatctattctccagcagggagaaagaagactggtcttcttctggctatactcattgtgaacttgatccttctttcttgctagggctgagctgcagtctcattccctttggcaaccatgataacgctaggagggttcagatgcaagctgaaaaaatatcacagcaggctatcggctactcccctacaaattctcagtacagactggacaccctttcacatcaaatgttctatccacaaagacccttgtttagaactgtggtgtcctacggtcttggagaggcgaagacagactgcagctccggacgaaaagacgacttcaacacaccagaatatttcaacggacaaaacgcgatagtctcagtgaacgttcatcagggattcaaccaagaagactctctggtgatgaatagggcctccttagagcgtggcatgtttcgcacgctacatttcaagagctacaaagcacaggtcgagaacaaagagatcacaaggcgtctcaagcacagggaaaacatcaatttcggtaaagtgcagagcaagagggggaaggtcgacagtctggacagtgatggcttaccatacgtcggagcaagtcttcagagtggtgacattgtcattggtaaggtcacggagtctggtgaagatcatagcgccaaactgatgcatactgagaaagggatggtggacaaggttgttctttcggcgaacgatgatggggttaactttgcaactgttactctaagacagtctcgctcgccatgcgtcggagacaagtttgccagcatgcatggacagaaaggagttgttggcctgttggattctcaggagaatttcccattcacttcccaagggattgttccagacatggtcataaacccacatggttttccaactcgtcaaactcctggacagctgcttgaggctgctctggggaagggcatcgcccttggtgggaaggtcaggtacgcaacgccgttcaccactccgaccgtggaggtgatcgccgaacagctgcacaaggccgggttttgcaggtggggtgaggagagcgtgctgaacgggcagaccggcgagcggatgaagtcgctggtgttcatggggccgaccttctaccagcggctggtccacatggcggaggacaaggtgaagttccggaacacgggtccggtgcacccgctcacgcggcagccggtggaggacaagaagcggttcggcggcgtcaagttcggggagatggagcgcgactgcatgctggcgcacggcgccgccgccaacctccacgagcggctcttcaccctcagcgacttctcgcggatgcacatctgccaggcctgcgagcgggtggccaacgtcatcgtgcgggccgccgagggcggcggcggcaagaaggtgcgcgggccctactgcttgttctgccgctccgcggagcgcgtcgtccgggtcgacgtgccgtacggctccaagctgctgtaccaggagctcttcagcatgggcatctgcctcaagtttgaaaccgaggtccgctagaacgaacgccatggcagttcaccagtgagactccctcgatgcatatgcaagtatgcaactgcactgcctaggatcttggtgctttatgggctggtgttgaaacctgcagttttggcggcacgattttctgggcatgcattcagtagcaggcactggttgatactgtgattctggacggattttctgctgatactgtgatctagggggggcatggttttttgtttgtgaattgtgatgtggcgaggcaggaattttctg

SEQ ID NO: 16399 - DNA, 4211 bp, Zea Mays
cggctctcccgtcctcggtcgcaacgcggcgtggaaaaccccaaccggcgccggtgcggtgcctgcaccgcgccgtagggtttccgcctcgcctcgcctcgcaaccggcgatcgccggcgcgcaaaggaagggattttgttgacgccgagtgccagatgccaattgtttagccatggggaaaccacaaaccgatggtgaccagtcacctgtaaactcagatactgatgtgatggattgcctgaacttcgatggccatggagatgttgaagacccccacaaggaggttgcaaaaggggagcagcagccttctggcgaagttgatgaacagcagtctgttatggatgttgatttgacatgtataacatctgtgggagatgaagggaatgaaaagcagaatgctatggatgtggatttgaaagaaatactatctgaggaagatggaggggaaggaaaggcttcttcagatctaccctcacaagtaccagtggatttcaacgttgcaagcctcgagaagttctgtaaagaagcagcaagatcgtttttcagtgaaactggactggttagccatcagataaactcgtacgatcattttgtctcccatggactccaagagctctttgattctcttggggaaatcactgtggaacctgattatgacccttcaaataaacatggtgcttggaaacatgcaactgtcaaatttggtagggttaagcttgatgagccagtgtttatgcttgaaaattctgaccttgaagagcaagatctcaaatttaagcctagacatgctcgcctccagaagatgacatatgcgtctaggatgaatgtggaaatgactgttcaggtttatatattcgacacaagtgacaaagccaaaactggcaaggatacacatgttcataaaagagagataatgacagaaactaaacaaatcaacattggattgttacctgtaatggtgaagtcgaatttgtgctggctgcataaatctcaaaaaggtgactgcccgtttgattttggtggctactttttgatcaaaggaacagaaaaggtattcattgctgaagagcaaaggtttttatcaaggatttgggtcacagaccaccccagctgggatgcaagttacctatctcagatcagacgagaaaagatcaatataaaacttgttccgtccaaaagcaatgaaagctgcaaagtcataaacatttgcttcatgggtacgattatgccaatttgggtagcattttttgcacttggtgtatcgtcagacaaggaagcttttgatatgattgatatcctagactgtgatgctgacatagttaacataatatcattaactattaaagaatctcatgaagaatttgaaggcttccgcactccaggtagagcccgtcaatatgttgatgagctgatcagaaaatcaaagtttccgcccaaagaatcctttgatgagtatgtttgtaggtatatgtttcctggtgtcaatgggtttaggagcaaggcacttttcttgggttacatggtcaaatgtctgctaatggcatactctggcaatcgaaaatgtgataataaggatgatctccgtaacaaaaggctagatctttcctgccaattgcttcggagagaactctggactcatattaaaagagcagaaaggcgcatggttaagctcatgcagagagatttgagcaatgatggcaacttgcaagaccttaggcgttatgtggatgcatcaattattaccaatggattgaaccgggccttctccactggttcttggcggcatccttataaaaaagaaaggtgttcaggggttgtagcaacccttcggagaacaaatccacttcaaatgatgtctgatgttaggaagacgcgacagtggtttgcatatgctggaacggctggagatgcaagatacccgaatccatcctactggggaaaattgtgttttttgtccaccccggatgctgaaaaatgtggatttgtgaaaaaccttgctgttactgctgtggttagttctgtagtgaggaaaccgttgattgatacatttgtttcttgtggaatgaagaaactggatgatatttctctacaagatatttctgggaaggacaggattttcttgaatggaagcttgctaggagtatgtgcagacccacacgaattgactttgcgtttaagaagcttgaggcgtagcaagctaattgatcctcaggttgaaatcaaaagggacaagcaccataaagaagttcgtgtattttctgatccaggcagaattatgagaccacttcttgtagttgaaaatctaagaagaatcacaagaccaaaagatggactatactcttttcaggaacttatagatcaaaacatagttgagctgattggtgttgaagaagaggaggatatccaatgtgcgtacggaattagacatctattctccagcagggagaaagaagactggtcttcttctggctatactcattgtgaacttgatccttctttcttgctagggctgagctgcagtctcattccctttggcaaccatgataacgctaggagggttcagatgcaagctgaaaaaatatcacagcaggctatcggctactcccctacaaattctcagtacagactggacaccctttcacatcaaatgttctatccacaaagacccttgtttagaactgtggtgtcctacggtcttggagaggcgaagacagactgcagctccggacgaaaagacgacttcaacacaccagaatatttcaacggacaaaacgcgatagtctcagtgaacgttcatcagggattcaaccaagaagactctctggtgatgaatagggcctccttagagcgtggcatgtttcgcacgctacatttcaagagctacaaagcacaggtcgagaacaaagagatcacaaggcgtctcaagcacagggaaaacatcaatttcggtaaagtgcagagcaagagggggaaggtcgacagtctggacagtgatggcttaccatacgtcggagcaagtcttcagagtggtgacattgtcattggtaaggtcacggagtctggtgaagatcatagcgccaaactgatgcatactgagaaagggatggtggacaaggttgttctttcggcgaacgatgatggggttaactttgcaactgttactctaagacagtctcgctcgccatgcgtcggagacaagtttgccagcatgcatggacagaaaggagttgttggcctgttggattctcaggagaatttcccattcacttcccaagggattgttccagacatggtcataaacccacatggttttccaactcgtcaaactcctggacagctgcttgaggctgctctggggaagggcatcgcccttggtgggaaggtcaggtacgcaacgccgttcaccactccgaccgtggaggtgatcgccgaacagctgcacaaggccgggttttgcaggtggggtgaggagagcgtgctgaacgggcagaccggcgagcggatgaagtcgctggtgttcatggggccgaccttctaccagcggctggtccacatggcggaggacaaggtgaagttccggaacacgggtccggtgcacccgctcacgcggcagccggtggaggacaagaagcggttcggcggcgtcaagttcggggagatggagcgcgactgcatgctggcgcacggcgccgccgccaacctccacgagcggctcttcaccctcagcgacttctcgcggatgcacatctgccaggcctgcgagcgggtggccaacgtcatcgtgcgggccgccgagggcggcggcggcaagaaggtgcgcgggccctactgcttgttctgccgctccgcggagcgcgtcgtccgggtcgacgtgccgtacggctccaagctgctgtaccaggagctcttcagcatgggcatctgcctcaagtttgaaaccgaggtccgctagaacgaacgccatggcagttcaccagtgagactccctcgatgcatatgcaagtatgcaactgcactgcctaggatcttggtgctttatgggctggtgttgaaacctgcagttttggcggcacgattttctgggcatgcattcagtagcaggcactggttgatactgtgattctggacggattttctgctgatactgtgatctagggggggcatggttttttgtttgtgaattgtgatgtggcgaggcaggaattttctg

SEQ ID NO: 16400 - DNA, 839 bp, Zea Mays
gcactgctcagtacgcagccgctcccactactagattcaggtgagctcatcattagtgccccggcccttggtgcggtgcggccaacggccatggcgaagcttgccgcgcagctcaagagcaagttctttggcctcgtcggccgcatcaccagctgtggccgcgccggcgccacccacaaggatgccgctggtgcgacagaggccaagtcatcagtgggatcccaggttcctcgacctgtactctaataatctctgctatacagatattgttggctttattacgacttaccgagtttcgctggttatttttgttttgcttaattaattactcatgcataagctaaatatacagaagtgtcctgcatatatacacacacacgagtatatatatacttgtgccccactttaggtcaggagactcggtggatcataggaatgacatttgttgttgatgctgcttgttctttgcagcctgttgagatcaggtcaaggggaggtgctcctcccgttgatggaggggccaagggtcacatcaacagtgacaccatctagaggagagggagaggagaagagaagagatcgaagagaagagaagaagctcaccgatggtgcttggacttggacattatctgcagcttagttaccatgtttgaaagaactgaagctgtaaatcgcagtcgtcgttgcttgtgtgtgtgtgtttatagttcctccatggtttaccatcgttttcagcttttctagtatatctggtgcttgctatgtttcataatttcgggctatgttgtttcagtgtacggtatttctgttcattttcttccactattatataatctagc

SEQ ID NO: 16401 - DNA, 603 bp, Zea Mays
cattttctccaatggatgattcatcacttgctttcagaagaggtaacaagacacatatttttcttgtagttgtaggtgtgttcaagcagattataatagttaatcccttgcttcccaaaaacgaacacaaatgcaaaccctaacttgccatccaatctcgtatcacatgcataagcttaattaggaccaggatcgttaaacatagtgacaaaatccatattttaacaaccaaatagcatgtcaagtaaacatgcaggatccaagcaccaagcactatgaccaagtaatatgcctagcaagcaggaaacgataataaacaaggcagtaatattgtctacaacaaagcaactgatttctcatgatacatgtcgactctaactacagaataacgaagttctagacacaataacaagtcttataatagtagatagactttcataccttgatggcacatacttctcgatcaagaactaagaccatcaggaaggacctgatcaatcaaggccataacggtcgtcgccccgacagctaccgccatctcgactatgaccagagtattagtctttctcctcatcagaaccataacgacctccactgccacca

SEQ ID NO: 16402 - DNA, 899 bp, Zea Mays
ctttatttggataccctcttcttgtttataaagatcagcccacgtcataaaccaattcgtcgccctaaagagtacctgcaagtaggttaacatgggtttttttttgtcaaaactcaaatgctggggcaatctctccttgggacccatcaatgcagatccatgcttaggctgtctccagtaatattctctaaattccattctctaaaggaatattctctgtcctttacagcaccctctaaaagatttcgtcctctatatctttaccctctccagcagcgtcctctatatcaagtaaacgacctcttccctagtctgttctctcagacatttcatcgaacacgtggagtgcatagctcggggaggagctccgaacacaccccaattgcaaatcggtccaaacaaattatgatcgaacaaagacatccaaaactgtcattaacacttcgcttgacttgctatatacaacctgtgaatagcagtgacagaagcaatattcacatgcacacatctcacaagtacgtggcctgcctggagaactccggtggcggcgatgcacgcgtctaggaagcgccttatccggcctcctcgcggcgcatgtacatggtctaatctccgtcatggcagccggacccaataaccacgacgcgaccatatgatggcggacacggttgccgtggtacctggtgtaggaaacgggtgacgcctaagagggggggggtgaattaggacttctaaaactttcgctaaactaggccacaattaaatccctagagcaaaacctatgcaaataatcaaaactagaatgtgcaaactcggttttgtctaagtgttgctatctctaccgcaaaggctaagtttcaatctacactaaataagtatgacaataagattgaaactta

SEQ ID NO: 16403 - DNA, 1871 bp, Zea Mays
aagctgtagacgtactaccaaagatcgatctcaaaacaaagggtaataccattaccagctagaagatgtgcaggggctgctgcaaatggatgccaccgccttccacccaagtctgtggggcgatttcttcgtgaagtacaagcctccaaccgcgcccaagcgtggacacatgacggaaagagccgagctgttaaaagaagaggttcgcaaaacgctcaaggcggctgcaaaccagataacaaatgctttagatcttataatcacactgcagaggcttgggctggaccaccactacgagaatgagatcagcgagctgctgcgctttgtctacagcagttcggattacgacgataaagacctgtatgtagtctcgctgaggttttatcttctgcggaaacatggccattgtgtttcatcagcgtacgttaggactcacggggagaaagtactcgacgaagccattaccttcaccagacgccagcttgaagcttcattattagatccactggaaccagcattagcagatgaagtacatctcacccttcaaaccccactcttccgaaggcttaggatactggaagcaataaactatatcccaatatatgggaaagaagctggacgaaacgaggccatattagagcttgcaaagctgaatttcaaccttgctcagcttatttactgtgaggagttgaaagaggttacactatggtggaagcagcttaatgttgagacaaacttgagtttcattcgagacagaatcgtagaatgtcatttctggatgacaggcgcgtgctgtgaaccacagtattctctttcacgggtcatagctacgaagatgacagccttgatcaccgtattagatgacatgatggacacctacagcacaactgaggaggccatgctccttgctgaagcaatatacagatgggaagagaatgccgcagaactacttccaagatacatgaaagatttctatctctacttactgaagacaattgattcgtgtggggatgaactaggaccaaacagaagcttccggacattttatctcaaagagatgctaaaggtgttagtccgaggaagctctcaagagataaaatggcgtaatgaaaattacgtcccaaaaacaatcagtgaacacttagaacattcaggaccaacggtgggagcctttcaagtagcatgttcttcatttgttgggatgggtgacagcataacaaaggaaagttttgagtggcttttgacatatccagaacttgccaagtctttgatgaatatttcacgactcttgaatgatactgcatcaacaaagcgtgagcaaaatgcggggcagcatgtgtccacggtccaatgttatatgttgaagcatgggacaacaatggatgaagcatgtgagaagataaaagagttaactgaagactcatggaaggatatgatggaactctatcttacaccaacagaacatccaaaactcatcgcacaaacaatcgttgattttgcaaggacagcggactacatgtacaaggaaacagacggatttactttttcacacacaatcaaagatatgatagcaaaactctttgtggatccaatatcattattctagacactaaagagtgacaacgcctgcttcaacagctatttactccaattaaaatctccaatcgtttctagacaccaggttatagaagttacctatttaagatacaataagaaatattggaaatactaaagttagaaatgtctcatcaactgattaaatgtattgtacgtgtacctattcaagcaatagtatgtctctgtttcatccgttttcaatctttgtaacaattattggatgacaataagatacaatgaaagatgtgttaaaa

SEQ ID NO: 16404 - DNA, 266 bp, Zea Mays
aaaacttcctaaaacctaatgcttcctacacaccacttatcttgtccttaacatatctttcttaacctccatattcaaaacctcctgacaaatggacctgcgatgactaagttagaaaccgacatgctcttgtttgctggcttgtagtcttgcaagatcacatcaattatgtttgttgtgtgaccgccaccatgtactagagggaatgagacccacaacaattttgttggaagctagagagtgaagatgatggggagtggtctagg

SEQ ID NO: 16405 - DNA, 768 bp, Zea Mays
accactgaccaagcacattctcttcccccgtctccgaaccgcgtcaggacgcccgccccgatggcgagagcgacggcgccgtccagtcgtccgccgagcgccatggctgctgctgctgctgctgccgcggcgacggcggcgtccgcagcagcgtcgctcgtcccccagcgccgcgcgaccgcccgcggcgcctcctcgcggtcccagcctcaccagcaccggcgcgccacgctgcccgtcgtcgcgccggcacggccgaagcgggcgtcgtgcgcgtgctcgcccaccacgcacccgggctccttccgctgcgccctacacaggggtggccaaggcccgctcccggcctcggcctcggcggcgctggtgtccagcaggctcagcgccccgcggcgcgcgtccatggccaacccgctggtgcgcatcgccgcggtggagggcggcgaccacatcaggcgcgcgctggcggcgctcgtgcgcccgactccctcgcagacgcgccgccgcgccgacgccttccgccccacgcccagccgcctctccgccatgtcctcgacggccgcggcggcaccgtgacagcagcgtcagcaccgagacctcgtcgtcggatcgctcgcggttgcagcaacgttgccgcgacagttttgttggccacgttttttttgtttgattcgtcgattttttttcccttcccacttgtctctgcagagcgaggaactgcaattgtacatgtacgttacaaattttgcgggttaatgttcgtttggg

SEQ ID NO: 16406 - DNA, 825 bp, Zea Mays
ctaaaatgtgggtggttgtatagcttttggatgaggcagagtttgtttcttcacattgtcgatcaagttactgctgcaaacagattctttgttcaaaggataaatgccacaagtctatggacattatccctgccctctgcagtaagaagttgagcctcagtttgcctctctctaagctcagtccttctttgttaagtcaatatggtcgacatgttgtttctcacgtagctccatttcttttttggacgtctaatagctccctctgaatcttgatattctcatccttcctggttaaaatttccagcaattgttcatcttgcttcaccacattcttctcccagttttcttgcatacgttgaaggacatctactgctatactagaagcagatgtggcatccattgctctagacctcttcttttttgcactatcacggccttctcgtctctttagatggtcgtcctgtgtcttagactctccatggattggaatggcgtctgtgcttgatgttccttgcccagccttggtacaaaggagtgcttgcattgttcagctccaacatcctatcgttccactttggttcgtctcttaaaatttcccagcaatgcatgaaaacaaaggcctctttttcttcgaacaacttgacagcatcatctagctgcgaacaacatacatacacaccaaattaaggttgataagaatagtatggaacaacataagtgattttataaacacatatgcttatgcgatcacgttttgtcttcccactctcatttcttctgtcaactaaagatttgcacccaacaaaccaattaattgccttttgg

SEQ ID NO: 16407 - DNA, 2020 bp, Zea Mays
atcaactcaacatcatcagctcgcgttgcgtgctcggcccgcctaatcctctttctttagctcaagaccggcgactaaatttggcgccagccggcagcagggggtataagtagtcgccgccgccgtcttcctcgcacctccccgctccgctctcccttgtcgagttctcagcaccggccgatccatcctcctccgcctccctcggttcggcctctggcctgcacaccatgaactctcgcttccggagcctctggagagccatggctggggctttgcagccgccgtgccgcctcggagctgccgcgtgtagcttgctcgctaagcagcagctatagtagctgagcgagtgcgtccatcgatcggagtcgtccacctccgtctccctttgcgattcggcgtcgtgaactcgtgttcttgagcgtgggggcaaggggcagagcaacaaggagacacttcttcttcttctttacaacaaataagaaagcaacggcaatggagggagctggtctgcagtgacagtgacacgagccatggatcccgagccattcgtgcggctctcagttgggcagctcggtctgaagctccccggcgggaacgctagcaaggcggccggccggctctgcgactgcgagatccggctgggcgggttcccggtgcagaccgctccggtgccgctggtccactccccggcgttcaacctcgacccattcaccaacgcggcggttttctccctcgaggaatccgacctcaaggcgctggcggcgccggggtgcttccgggccccgcggtcgtcgtgccttgaggtcgcggtgtactacctggcccgcttcggcgcttcacgctgtggtgtcctcgcctgcgggaggaagcggctggttggcgtgttcagggtggagctcgcttcgtcggaatggcgggacggcaagcccgtgctgctgcaccatgggtgggcgggcatcggcaagggggcggccaggccggagctccacctcagggtgaagctggaggctgacccccgctacatcttccagtttgacgacgagatcgcgctcaacccgcaggttgtccagctccatggcagcatccggcagcccgtgttcagctgcaagttcatccgcgacaggcgagtgaccctttgggcggcgggcagtactggtcgagctccagcagcgaggagcaggacatggagatggtgaggcgggagaggaaggcctggaaggtggtgatccacgacctgtccggctcggccgtagccgcggcgtttatggccaccccgtttgtgccggcgccgggcggggacacggtggcacggtccaacccgggcgcctggctcatcgtgcgcgccgacaccacggggtcctcggacagttggcagccgtggggccggctggaggcgtggcgcgaggcggcggcggcggcggcgagcagcggcaaggacacggtgcgcctgcggctgcacctgctcccggaccgccacgacgactgcgtgctcgtgtcggaggcgcccctgagcagcgacaagggcggggagttcttcatcgacatggacaggcaggcgccctccgccacggcggcggagcactgcgcggcgagcctgggcgccgcgtgcgccggcggcggcttcgtcatgagctgcagggtggagggggaggcgaggagcagcaggccgttcgtgcagcttgccatgcggcatgtcacgtgcatggaggacgccgccatgttcgtcgcgctcgccgcggccgtcgacctcagcgtcaaggcgtgccgcccgttccgcaggaaaccgaacaagaaggccgcctcgccgtcgcccgaccacctcgagctcgacacctaggaacgcagaacaggaaggccccgccgactagcacccatggccgcccatggatccatctaactcgacctgtaaattcacttaatttcaagagctggactgaatcgtttgccacaatcaaaactctgttgtttgactggcctcagcagttagtacatgtttggaagtaaattaattttacagtca

SEQ ID NO: 16408 - DNA, 2023 bp, Zea Mays
atcaactcaacatcatcagctcgcgttgcgtgctcggcccgcctaatcctctttctttagctcaagaccggcgactaaatttggcgccagccggcagcagggggtataagtagtcgccgccgccgtcttcctcgcacctccccgctccgctctcccttgtcgagttctcagcaccggccgatccatcctcctccgcctccctcggttcggcctctggcctgcacaccatgaactctcgcttccggagcctctggagagccatggctggggctttgcagccgccgtgccgcctcggagctgccgcgtgtagcttgctcgctaagcagcagctatagtagctgagcgagtgcgtccatcgatcggagtcgtccacctccgtctccctttgcgattcggcgtcgtgaactcgtgttcttgagcgtgggggcaaggggcagagcaacaaggagacacttcttcttcttctttacaacaaataagaaagcagcaacggcaatggagggagctggtctgcagtgacagtgacacgagccatggatcccgagccattcgtgcggctctcagttgggcagctcggtctgaagctccccggcgggaacgctagcaaggcggccggccggctctgcgactgcgagatccggctgggcgggttcccggtgcagaccgctccggtgccgctggtccactccccggcgttcaacctcgacccattcaccaacgcggcggttttctccctcgaggaatccgacctcaaggcgctggcggcgccggggtgcttccgggccccgcggtcgtcgtgccttgaggtcgcggtgtactacctggcccgcttcggcgcttcacgctgtggtgtcctcgcctgcgggaggaagcggctggttggcgtgttcagggtggagctcgcttcgtcggaatggcgggacggcaagcccgtgctgctgcaccatgggtgggcgggcatcggcaagggggcggccaggccggagctccacctcagggtgaagctggaggctgacccccgctacatcttccagtttgacgacgagatcgcgctcaacccgcaggttgtccagctccatggcagcatccggcagcccgtgttcagctgcaagttcatccgcgacaggcgagtgaccctttgggcggcgggcagtactggtcgagctccagcagcgaggagcaggacatggagatggtgaggcgggagaggaaggcctggaaggtggtgatccacgacctgtccggctcggccgtagccgcggcgtttatggccaccccgtttgtgccggcgccgggcggggacacggtggcacggtccaacccgggcgcctggctcatcgtgcgcgccgacaccacggggtcctcggacagttggcagccgtggggccggctggaggcgtggcgcgaggcggcggcggcggcggcgagcagcggcaaggacacggtgcgcctgcggctgcacctgctcccggaccgccacgacgactgcgtgctcgtgtcggaggcgcccctgagcagcgacaagggcggggagttcttcatcgacatggacaggcaggcgccctccgccacggcggcggagcactgcgcggcgagcctgggcgccgcgtgcgccggcggcggcttcgtcatgagctgcagggtggagggggaggcgaggagcagcaggccgttcgtgcagcttgccatgcggcatgtcacgtgcatggaggacgccgccatgttcgtcgcgctcgccgcggccgtcgacctcagcgtcaaggcgtgccgcccgttccgcaggaaaccgaacaagaaggccgcctcgccgtcgcccgaccacctcgagctcgacacctaggaacgcagaacaggaaggccccgccgactagcacccatggccgcccatggatccatctaactcgacctgtaaattcacttaatttcaagagctggactgaatcgtttgccacaatcaaaactctgttgtttgactggcctcagcagttagtacatgtttggaagtaaattaattttacagtca

SEQ ID NO: 16409 - DNA, 2038 bp, Zea Mays
cagcatccatcaactcaacatcatcagctcgcgttgcgtgctcggcccgcctaatcctctttctttagctcaagaccggcgactaaatttggcgccagccggcagcagggggtataagtagtcgccgccgccgtcttcctcgcacctccccgctccgctctcccttgtcgagttctcagcaccggccgatccatcctcctccgcctccctcggttcggcctctggcctgcacaccatgaactctcgcttccggagcctctggagagccatggctggggctttgcagccgccgtgccgcctcggagctgccgcgtgtagcttgctcgctaagcagcagctatagtagctgagcgagtgcgtccatcgatcggagtcgtccacctccgtctccctttgcgattcggcgtcgtgaactcgtgttcttgagcgtgggggcaaggggcagagcaacaaggagacacttcttcttcttctttacaacaaataagaaagcaacggcaatggagggagctggtctgcagtgacagtgacacgagccatggatcccgagccattcgtgcggctctcagttgggcagctcggtctgaagctccccggcgggaacgctagcaaggcggccggccggctctgcgactgcgagatccggctgggcgggttcccggtgcagaccgctccggtgccgctggtccactccccggcgttcaacctcgacccattcaccaacgcggcggttttctccctcgaggaatccgacctcaaggcgctggcggcgccggggtgcttccgggccccgcggtcgtcgtgccttgaggtcgcggtgtactacctggcccgcttcggcgcttcacgctgtggtgtcctcgcctgcgggaggaagcggctggttggcgtgttcagggtggagctcgcttcgtcggaatggcgggacggcaagcccgtgctgctgcaccatgggtgggcgggcatcggcaagggggcggccaggccggagctccacctcagggtgaagctggaggctgacccccgctacatcttccagtttgacgacgagatcgcgctcaacccgcaggttgtccagctccatggcagcatccggcagcccgtgttcagctgcaagttcatccgcgacaggcggccatctcagagtgaccctttgggcggcgggcagtactggtcgagctccagcagcgaggagcaggacatggagatggtgaggcgggagaggaaggcctggaaggtggtgatccacgacctgtccggctcggccgtagccgcggcgtttatggccaccccgtttgtgccggcgccgggcggggacacggtggcacggtccaacccgggcgcctggctcatcgtgcgcgccgacaccacggggtcctcggacagttggcagccgtggggccggctggaggcgtggcgcgaggcggcggcggcggcggcgagcagcggcaaggacacggtgcgcctgcggctgcacctgctcccggaccgccacgacgactgcgtgctcgtgtcggaggcgcccctgagcagcgacaagggcggggagttcttcatcgacatggacaggcaggcgccctccgccacggcggcggagcactgcgcggcgagcctgggcgccgcgtgcgccggcggcggcttcgtcatgagctgcagggtggagggggaggcgaggagcagcaggccgttcgtgcagcttgccatgcggcatgtcacgtgcatggaggacgccgccatgttcgtcgcgctcgccgcggccgtcgacctcagcgtcaaggcgtgccgcccgttccgcaggaaaccgaacaagaaggccgcctcgccgtcgcccgaccacctcgagctcgacacctaggaacgcagaacaggaaggccccgccgactagcacccatggccgcccatggatccatctaactcgacctgtaaattcacttaatttcaagagctggactgaatcgtttgccacaatcaaaactctgttgtttgactggcctcagcagttagtacatgtttggaagtaaattaattttacagtca

SEQ ID NO: 16410 - DNA, 2041 bp, Zea Mays
cagcatccatcaactcaacatcatcagctcgcgttgcgtgctcggcccgcctaatcctctttctttagctcaagaccggcgactaaatttggcgccagccggcagcagggggtataagtagtcgccgccgccgtcttcctcgcacctccccgctccgctctcccttgtcgagttctcagcaccggccgatccatcctcctccgcctccctcggttcggcctctggcctgcacaccatgaactctcgcttccggagcctctggagagccatggctggggctttgcagccgccgtgccgcctcggagctgccgcgtgtagcttgctcgctaagcagcagctatagtagctgagcgagtgcgtccatcgatcggagtcgtccacctccgtctccctttgcgattcggcgtcgtgaactcgtgttcttgagcgtgggggcaaggggcagagcaacaaggagacacttcttcttcttctttacaacaaataagaaagcagcaacggcaatggagggagctggtctgcagtgacagtgacacgagccatggatcccgagccattcgtgcggctctcagttgggcagctcggtctgaagctccccggcgggaacgctagcaaggcggccggccggctctgcgactgcgagatccggctgggcgggttcccggtgcagaccgctccggtgccgctggtccactccccggcgttcaacctcgacccattcaccaacgcggcggttttctccctcgaggaatccgacctcaaggcgctggcggcgccggggtgcttccgggccccgcggtcgtcgtgccttgaggtcgcggtgtactacctggcccgcttcggcgcttcacgctgtggtgtcctcgcctgcgggaggaagcggctggttggcgtgttcagggtggagctcgcttcgtcggaatggcgggacggcaagcccgtgctgctgcaccatgggtgggcgggcatcggcaagggggcggccaggccggagctccacctcagggtgaagctggaggctgacccccgctacatcttccagtttgacgacgagatcgcgctcaacccgcaggttgtccagctccatggcagcatccggcagcccgtgttcagctgcaagttcatccgcgacaggcggccatctcagagtgaccctttgggcggcgggcagtactggtcgagctccagcagcgaggagcaggacatggagatggtgaggcgggagaggaaggcctggaaggtggtgatccacgacctgtccggctcggccgtagccgcggcgtttatggccaccccgtttgtgccggcgccgggcggggacacggtggcacggtccaacccgggcgcctggctcatcgtgcgcgccgacaccacggggtcctcggacagttggcagccgtggggccggctggaggcgtggcgcgaggcggcggcggcggcggcgagcagcggcaaggacacggtgcgcctgcggctgcacctgctcccggaccgccacgacgactgcgtgctcgtgtcggaggcgcccctgagcagcgacaagggcggggagttcttcatcgacatggacaggcaggcgccctccgccacggcggcggagcactgcgcggcgagcctgggcgccgcgtgcgccggcggcggcttcgtcatgagctgcagggtggagggggaggcgaggagcagcaggccgttcgtgcagcttgccatgcggcatgtcacgtgcatggaggacgccgccatgttcgtcgcgctcgccgcggccgtcgacctcagcgtcaaggcgtgccgcccgttccgcaggaaaccgaacaagaaggccgcctcgccgtcgcccgaccacctcgagctcgacacctaggaacgcagaacaggaaggccccgccgactagcacccatggccgcccatggatccatctaactcgacctgtaaattcacttaatttcaagagctggactgaatcgtttgccacaatcaaaactctgttgtttgactggcctcagcagttagtacatgtttggaagtaaattaattttacagtca

SEQ ID NO: 16411 - DNA, 1341 bp, Zea Mays
cttccgcacaccaatgggcaatggcctcgcgccttctcgctccccgcaccctatcctctcctctcagctcccttcccggctgcgagcaatgctcctacctggctacctccatgccgcgcgcggctgaaggagaaactgggcaacgagccgtcatacaagcagctggcgcaatcgctgcggataccagctcctgagctgcgagcgaggatgcgcgagtcgtttcttgcgagggagatgctggcgatgagcaacacccgtctggtgatatccattgcccagaagtacgacaacctcggcgtcgagctgccagaccttattcagggtggtctgatagggctgctccgtgggatcgagaagtttgatgcctcaagggggtttaggatctccacctacgtgtattggtggatccgtcagggggtttcaagagcattggccgacaactcgagatcgttcaggctccctacttatttgcacgagaggttggtagccattcgcggcgcaaagtacgcgttagaagaccaaggaattgctccgacagtagagaacatagcggagtcgctcaacatatccgagaagaaagtgcacaacgctacagaggctgtgcacaaggttatttcactggatcaacaggcgttcccctccttaaacggcctacctggggatacactccatagttacatagaggatcaaaacgttgcaaatgatccgtggcacggatttgaggaaaggtacctcaaggaggaagttaacagtcttataaattcaactctcaacgagcgcgagagggacattattcgattatatcatggcataggaaagcagtgccatacatgggaggatatcagcagacaattcgggttgtcgagggagcgcgtgaggcaggtagggctcgttgcgatggagaagctgaagcatgctgcaaggagggaacatttggatgcgttgcttgaggaatactgagtgagatgttcttcgcttgagtcggttaattccaccgttgcagtggttgtatatactcggaaacataggggggcaggcacatcatccttgaaaggcttcactgccactcactcactctgcagataactatacatgtacatctgtgacgatcagtaggcatgcatagttaaagcatctgtggctgcaaaatcgtcaaggcgatccaacaaaaggagaaccttttttttggtcttggaagctttacaaagtgtgatgtggtatgtatatgcaaatgtaatgtatcagtaattcagtagagcaataacgtttatgtcctggatttgtattcttgtccagttacatagaaggaaaaaatgcttacaactgcagacaatttgcctt

SEQ ID NO: 16412 - DNA, 775 bp, Zea Mays
cttttgtggtggcaagcatttaacaagtacgagtacagatgggctgatggtgtgcagataaagaaacccatagaggtatcagcaccaaaatatgtggagtatctgatggattggattgaaggccagcttgacgatgaatccatatttcctcaaaaacttggcacgccatttccaccgaacttcaaggaagtagtaaagacaatattcaagcgcttgtttcgggtctatgcccatacttaccactcccatttccagaagattgttagccttaaagaggaggcccatctcaatacctgttttaagcacttcattctgtttacaaatgagtttggcctgattgacaagaaggagctggctccacttcaggagctcatcgaatccatcatcgttccttactgagaacacggtttgctaaacatggatacagagctcttaatgctgatgctgtgaaattcagtctgtttatgacagcactttactgcatagagcttattgttcccgttattagacacaaggacatgtcacatatgcgtgtatctgtgttgtttcttcctgatcatgctgaccatgtaagtactgtcatatcagctatagaacggcgatgataatgtactgcagaaagaaaaaaaacacgagaaagctgagttggggctataaattgcatattggcacttatcgagtatagaatagatctccttctctttcttcttacaaacagaattgacttgttatttttaatggaatgaaataaatattcacgctttttgacatagaa

SEQ ID NO: 16413 - DNA, 783 bp, Zea Mays
ggccatgccttttgtggtggcaagcatttaacaagtacgagtacagatgggctgatggtgtgcagataaagaaacccatagaggtatcagcaccaaaatatgtggagtatctgatggattggattgaaggccagcttgacgatgaatccatatttcctcaaaaacttggcacgccatttccaccgaacttcaaggaagtagtaaagacaatattcaagcgcttgtttcgggtctatgcccatacttaccactcccatttccagaagattgttagccttaaagaggaggcccatctcaatacctgttttaagcacttcattctgtttacaaatgagtttggcctgattgacaagaaggagctggctccacttcaggagctcatcgaatccatcatcgttccttactgagaacacggtttgctaaacatggatacagagctcttaatgctgatgctgtgaaattcagtctgtttatgacagcactttactgcatagagcttattgttcccgttattagacacaaggacatgtcacatatgcgtgtatctgtgttgtttcttcctgatcatgctgaccatgtaagtactgtcatatcagctatagaacggcgatgataatgtactgcagaaagaaaaaaaacacgagaaagctgagttggggctataaattgcatattggcacttatcgagtatagaatagatctccttctctttcttcttacaaacagaattgacttgttatttttaatggaatgaaataaatattcacgctttttgacatagaa

SEQ ID NO: 16414 - DNA, 984 bp, Zea Mays
cagagcctggctaagcagtattgttgcaaccgggagcacagctccgaaagcacatagatgccactctcggcagtggaaaccttagggaagctgtgaggttgcctcctggagaggatatcaatgaatggcttgcggtgaatactgtggatttctttaaccaagttaatatgctgtatggcacactcacagaattttgcacacctgagagctgtccgacaatgacagctggcccaaagtacgagtacagatgggctgatggtgtgcagataaagaaacccatagaggtatcagcaccaaaatatgtggagtatctgatggattggattgaaggccagcttgacgatgaatccatatttcctcaaaaacttggcacgccatttccaccgaacttcaaggaagtagtaaagacaatattcaagcgcttgtttcgggtctatgcccatacttaccactcccatttccagaagattgttagccttaaagaggaggcccatctcaatacctgttttaagcacttcattctgtttacaaatgagtttggcctgattgacaagaaggagctggctccacttcaggagctcatcgaatccatcatcgttccttactgagaacacggtttgctaaacatggatacagagctcttaatgctgatgctgtgaaattcagtctgtttatgacagcactttactgcatagagcttattgttcccgttattagacacaaggacatgtcacatatgcgtgtatctgtgttgtttcttcctgatcatgctgaccatgtaagtactgtcatatcagctatagaacggcgatgataatgtactgcagaaagaaaaaaaacacgagaaagctgagttggggctataaattgcatattggcacttatcgagtatagaatagatctccttctctttcttcttacaaacagaattgacttgttatttttaatggaatgaaataaatattcacgctttttgacatagaa

SEQ ID NO: 16415 - DNA, 1192 bp, Zea Mays
aaaaaaattcggtcccttcgtcctctactcctctagtcctctcggctcctcgcagtcgctcactgcgtgcgccaaaagcagcagcagctccagccgtcgccgtctccactctccagtctccaccactgctccgcccgcgccggatcgagggagggcaggcggacgaggaggagggatgagtctcttcgggcttggacgaaaccagaagacattccgccccaagaagagcgctccatcaggtagcaagggagcacagctccgaaagcacatagatgccactctcggcagtggaaaccttagggaagctgtgaggttgcctcctggagaggatatcaatgaatggcttgcgctgtggatttctttaaccaagttaatatgctgtatggcacactcacagaattttgcacacctgagagctgtccgacaatgacagctggcccaaagtacgagtacagatgggctgatggtgtgcagataaagaaacccatagaggtatcagcaccaaaatatgtggagtatctgatggattggattgaaggccagcttgacgatgaatccatatttcctcaaaaacttggcacgccatttccaccgaacttcaaggaagtagtaaagacaatattcaagcgcttgtttcgggtctatgcccatacttaccactcccatttccagaagattgttagccttaaagaggaggcccatctcaatacctgttttaagcacttcattctgtttacaaatgagtttggcctgattgacaagaaggagctggctccacttcaggagctcatcgaatccatcatcgttccttactgagaacacggtttgctaaacatggatacagagctcttaatgctgatgctgtgaaattcagtctgtttatgacagcactttactgcatagagcttattgttcccgttattagacacaaggacatgtcacatatgcgtgtatctgtgttgtttcttcctgatcatgctgaccatgtaagtactgtcatatcagctatagaacggcgatgataatgtactgcagaaagaaaaaaaacacgagaaagctgagttggggctataaattgcatattggcacttatcgagtatagaatagatctccttctctttcttcttacaaacagaattgacttgttatttttaatggaatgaaataaatattcacgctttttgacatagaa

SEQ ID NO: 16416 - DNA, 1946 bp, Zea Mays
tacaataacgaggcacccgaagcaccaccatctatcaaacaaaatggggtgaccgctgtacagggagaaaatctccacgacatcagtgtccgcggagaggaggatgagcagaaagagatgctgcagcaaatgactgacggagtcagagcaatgctgggctcaataggtgacggtgcgatcaacatttctgcctacgacaccgcatgggttgcccttgttaagagcctggaaggtggcaatggccctcagtttccctccagccttagatggatcgttgagaaccaactaccagatggctcgtggggcgacgaggagttcttcctggtctatgaccgcatgatcaacactctggcctgtgtgattgcacttgagtcgtgggaaatccatgctgacatgtgcgagaaaggtttgtcattcattcgagagaatttgtgaaggcttgcccgccacgagggacggtccggtctcagatgtcgatgacacggccatggggttccgtcttctccgactgcatggctacgatgtctctccttctgtgtttaagcacttcgagcaggacggggcgttctactgctacccagggcagtcgaacaaatccgtgactgctatgtacaacctctaccgcgcttctcaggtggcctttccaggcgaggatgagctccgacgcgctgaggcatacagccgtgagttcctctgccgcagacgagcctccggggagctcaaagacaagtgggtcatccccaaggacttgcctggcgaggtcgcttacgcactggacgtgccgtggaaagctagcctgccgcgcatcgagacgaggatgtatctggagcagtacggtggtgccgatgacgtgtggattgggaaggtcctgtacaggatgtctctcgtcaacaacgagctcctcctccggacagctcaagccgacttcagaagtttccagagacaatgcaagctcgagtggcatggcctcagaaaatgggccagcaggagaaacctccaagcatacggcgtgacgtcgaacagcacgctgcgatcctacttcttagccgcagccagcatctttgagccagacagagcgacagagcgtctgggatgggctcgcacggcggtgctcgccgaggccgtctcctcctgcctccgagacggtcgttgtagccgtgccgacggcatgctgagggaactgaccagcggcatccacctacgcaacgacgataatccggcagccagcttggtgcatgctctccatgagctcattggcctccttgcattcgacaatgcttcctacaacagccttcttgatgcctggaagcaatggctcgccatgtggaccgcccagggacacgaagggagcgtagcgctgctgctggttcgcacagtggagatatgctccggccggaggcgtagcgcctctgccaccgacgatggccaagcacacagcctctccgagtactcccagctcgagcagctcacgtcctcggtatgcagcaagcttgctgcagcaggcaccggagatggagacgacctttccccggcaagtgtggaggacgcagcagatcgccaccgtgtggatctggagatgcagacgttggctcggtgcgttctccggagccgcagcagtatcgacgcagtgaccaggcagacgtttctccatgtcgcgaggagcttctattacgtcgctcattgctcagctcgaacggttgatgcccacatctccaaggtcttgttcgaggatgtcgtgtagccaccgtttgggcctcgttttgtatctttaaagcagtgtttggttccagccagatttagtctcggccaaatcaaatgtttgaatggtaattacatgtattaaatatagtctaattataaaactaattacatatataaagactaaaagacgagataaatctactaaatctaactaagactatatttagttctcatatataatattc

SEQ ID NO: 16417 - DNA, 2387 bp, Zea Mays
tgagctccacgacatcagtgtccgcggagaggaggatgagcagaaagagatgctgcagcaaatgactgacggagtcagagcaatgctgggctcaataggtgacggtgcgatcaacatttctgcctacgacaccgcatgggttgcccttgttaagagcctggaaggtggcaatggccctcagtttccctccagccttagatggatcgttgagaaccaactaccagatggctcgtggggcgacgaggagttcttcctggtctatgaccgcatgatcaacactctggcctgtgtgattgcacttgagtcgtgggaaatccatgctgacatgtgcgagaaaggtttgtcattcattcgagagaatttgtggaggctagagcacagtggttcagatgactggatggtcgttagtttcgagataaccttcccccagctgctggagatggcaagagacttgggtctcgacgtgccctgcgacgagccatccctgcgagctatctatgcaaggagagacgcaaagctcgcaagaatccctaaagaattactgcacgcttcaccgacaactctgcttctgagcatagagggaatgccgggcttagactgggagagactactgaaactccagtgctccgatggttcgttcatgtcatcgcctgcacccacagcctacgctctcatgcagaccggcgacacgaaatgcctcgagttcctcaatggaatcgtcagcaagtttagcgggggagtgccctttacctaccctgtggatctgttcgagcacttatgggtagtggacaggatagagcggctgggcatagggaggcacttcacaggtgaaatcaaggagtgcctagaatacgtacacaggtactggggcgacgaaggcttgcccgccacgagggacggtccggtctcagatgtcgatgacacggccatggggttccgtcttctccgactgcatggctacgatgtctctccttctgtgtttaagcacttcgagcaggacggggcgttctactgctacccagggcagtcgaacaaatccgtgactgctatgtacaacctctaccgcgcttctcaggtggcctttccaggcgaggatgagctccgacgcgctgaggcatacagccgtgagttcctctgccgcagacgagcctccggggagctcaaagacaagtgggtcatccccaaggacttgcctggcgaggtcgcttacgcactggacgtgccgtggaaagctagcctgccgcgcatcgagacgaggatgtatctggagcagtacggtggtgccgatgacgtgtggattgggaaggtcctgtacaggatgtctctcgtcaacaacgagctcctcctccggacagctcaagccgacttcagaagtttccagagacaatgcaagctcgagtggcatggcctcagaaaatgggccagcaggagaaacctccaagcatacggcgtgacgtcgaacagcacgctgcgatcctacttcttagccgcagccagcatctttgagccagacagagcgacagagcgtctgggatgggctcgcacggcggtgctcgccgaggccgtctcctcctgcctccgagacggtcgttgtagccgtgccgacggcatgctgagggaactgaccagcggcatccacctacgcaacgacgataatccggcagccagcttggtgcatgctctccatgagctcattggcctccttgcattcgacaatgcttcctacaacagccttcttgatgcctggaagcaatggctcgccatgtggaccgcccagggacacgaagggagcgtagcgctgctgctggttcgcacagtggagatatgctccggccggaggcgtagcgcctctgccaccgacgatggccaagcacacagcctctccgagtactcccagctcgagcagctcacgtcctcggtatgcagcaagcttgctgcagcaggcaccggagatggagacgacctttccccggcaagtgtggaggacgcagcagatcgccaccgtgtggatctggagatgcagacgttggctcggtgcgttctccggagccgcagcagtatcgacgcagtgaccaggcagacgtttctccatgtcgcgaggagcttctattacgtcgctcattgctcagctcgaacggttgatgcccacatctccaaggtcttgttcgaggatgtcgtgtagccaccgtttgggcctcgttttgtatctttaaagcagtgtttggttccagccagatttagtctcggccaaatcaaatgtttgaatggtaattacatgtattaaatatagtctaattataaaactaattacatatataaagactaaaagacgagataaatctactaaatctaactaagactatatttagttctcatatataatattc

SEQ ID NO: 16418 - DNA, 2567 bp, Zea Mays
gctggtgccgttcgcttggtgcttcctccctcagcgccgttgtcctttgacccggcgcggcggtgcccaacctcgctgctcgtccgacgcccgactcgtcgtgggggtatcatacaataacgaggcacccgaagcaccaccatctatcaaacaaaatggggtgaccgctgtacagggagaaaatctccacgacatcagtgtccgcggagaggaggatgagcagaaagagatgctgcagcaaatgactgacggagtcagagcaatgctgggctcaataggtgacggtgcgatcaacatttctgcctacgacaccgcatgggttgcccttgttaagagcctggaaggtggcaatggccctcagtttccctccagccttagatggatcgttgagaaccaactaccagatggctcgtggggcgacgaggagttcttcctggtctatgaccgcatgatcaacactctggcctgtgtgattgcacttgagtcgtgggaaatccatgctgacatgtgcgagaaaggtttgtcattcattcgagagaatttgtggaggctagagcacagtggttcagatgactggatggtcgttagtttcgagataaccttcccccagctgctggagatggcaagagacttgggtctcgacgtgccctgcgacgagccatccctgcgagctatctatgcaaggagagacgcaaagctcgcaagaatccctaaagaattactgcacgcttcaccgacaactctgcttctgagcatagagggaatgccgggcttagactgggagagactactgaaactccagtgctccgatggttcgttcatgtcatcgcctgcacccacagcctacgctctcatgcagaccggcgacacgaaatgcctcgagttcctcaatggaatcgtcagcaagtttagcgggggagtgccctttacctaccctgtggatctgttcgagcacttatgggtagtggacaggatagagcggctgggcatagggaggcacttcacaggtgaaatcaaggagtgcctagaatacgtacacaggtactggggcgacgaaggcttgcccgccacgagggacggtccggtctcagatgtcgatgacacggccatggggttccgtcttctccgactgcatggctacgatgtctctccttctgtgtttaagcacttcgagcaggacggggcgttctactgctacccagggcagtcgaacaaatccgtgactgctatgtacaacctctaccgcgcttctcaggtggcctttccaggcgaggatgagctccgacgcgctgaggcatacagccgtgagttcctctgccgcagacgagcctccggggagctcaaagacaagtgggtcatccccaaggacttgcctggcgaggtcgcttacgcactggacgtgccgtggaaagctagcctgccgcgcatcgagacgaggatgtatctggagcagtacggtggtgccgatgacgtgtggattgggaaggtcctgtacaggatgtctctcgtcaacaacgagctcctcctccggacagctcaagccgacttcagaagtttccagagacaatgcaagctcgagtggcatggcctcagaaaatgggccagcaggagaaacctccaagcatacggcgtgacgtcgaacagcacgctgcgatcctacttcttagccgcagccagcatctttgagccagacagagcgacagagcgtctgggatgggctcgcacggcggtgctcgccgaggccgtctcctcctgcctccgagacggtcgttgtagccgtgccgacggcatgctgagggaactgaccagcggcatccacctacgcaacgacgataatccggcagccagcttggtgcatgctctccatgagctcattggcctccttgcattcgacaatgcttcctacaacagccttcttgatgcctggaagcaatggctcgccatgtggaccgcccagggacacgaagggagcgtagcgctgctgctggttcgcacagtggagatatgctccggccggaggcgtagcgcctctgccaccgacgatggccaagcacacagcctctccgagtactcccagctcgagcagctcacgtcctcggtatgcagcaagcttgctgcagcaggcaccggagatggagacgacctttccccggcaagtgtggaggacgcagcagatcgccaccgtgtggatctggagatgcagacgttggctcggtgcgttctccggagccgcagcagtatcgacgcagtgaccaggcagacgtttctccatgtcgcgaggagcttctattacgtcgctcattgctcagctcgaacggttgatgcccacatctccaaggtcttgttcgaggatgtcgtgtagccaccgtttgggcctcgttttgtatctttaaagcagtgtttggttccagccagatttagtctcggccaaatcaaatgtttgaatggtaattacatgtattaaatatagtctaattataaaactaattacatatataaagactaaaagacgagataaatctactaaatctaactaagactatatttagttctcatatataatattc

SEQ ID NO: 16419 - DNA, 2607 bp, Zea Mays
gctggtgccgttcgcttggtgcttcctccctcagcgccgttgtcctttgacccggcgcggcggtgcccaacctcgctgctcgtccgacgcccgtacgtcgcccttcgcgtcctccctccttactccctcgccaagtcgcccgacgatggatctgccgcgaccccaggctccctgttgtcggcgccctgcagacctacgtcctgccccctgctgcatcgatgcgcccaggcccagcgacctgcgcggctgcgccccggcagccggcgccctatggaaaccctccgcttcgtatccccgtgctgccgtgccgccagcctccgtgaggctccacgacatcagtgtccgcggagaggaggatgagcagaaagagatgctgcagcaaatgactgacggagtcagagcaatgctgggctcaataggtgacggtgcgatcaacatttctgcctacgacaccgcatgggttgcccttgttaagagcctggaaggtggcaatggccctcagtttccctccagccttagatggatcgttgagaaccaactaccagatggctcgtggggcgacgaggagttcttcctggtctatgaccgcatgatcaacactctggcctgtgtgattgcacttgagtcgtgggaaatccatgctgacatgtgcgagaaaggtttgtcattcattcgagagaatttgtggaggctagagcacagtggttcagatgactggatggtcgttagtttcgagataaccttcccccagctgctggagatggcaagagacttgggtctcgacgtgccctgcgacgagccatccctgcgagctatctatgcaaggagagacgcaaagctcgcaagaatccctaaagaattactgcacgcttcaccgacaactctgcttctgagcatagagggaatgccgggcttagactgggagagactactgaaactccagtgctccgatggttcgttcatgtcatcgcctgcacccacagcctacgctctcatgcagaccggcgacacgaaatgcctcgagttcctcaatggaatcgtcagcaagtttagcgggggagtgccctttacctaccctgtggatctgttcgagcacttatgggtagtggacaggatagagcggctgggcatagggaggcacttcacaggtgaaatcaaggagtgcctagaatacgtacacaggtactggggcgacgaaggcttgcccgccacgagggacggtccggtctcagatgtcgatgacacggccatggggttccgtcttctccgactgcatggctacgatgtctctccttgtggcctttccaggcgaggatgagctccgacgcgctgaggcatacagccgtgagttcctctgccgcagacgagcctccggggagctcaaagacaagtgggtcatccccaaggacttgcctggcgaggtcgcttacgcactggacgtgccgtggaaagctagcctgccgcgcatcgagacgaggatgtatctggagcagtacggtggtgccgatgacgtgtggattgggaaggtcctgtacaggatgtctctcgtcaacaacgagctcctcctccggacagctcaagccgacttcagaagtttccagagacaatgcaagctcgagtggcatggcctcagaaaatgggccagcaggagaaacctccaagcatacggcgtgacgtcgaacagcacgctgcgatcctacttcttagccgcagccagcatctttgagccagacagagcgacagagcgtctgggatgggctcgcacggcggtgctcgccgaggccgtctcctcctgcctccgagacggtcgttgtagccgtgccgacggcatgctgagggaactgaccagcggcatccacctacgcaacgacgataatccggcagccagcttggtgcatgctctccatgagctcattggcctccttgcattcgacaatgcttcctacaacagccttcttgatgcctggaagcaatggctcgccatgtggaccgcccagggacacgaagggagcgtagcgctgctgctggttcgcacagtggagatatgctccggccggaggcgtagcgcctctgccaccgacgatggccaagcacacagcctctccgagtactcccagctcgagcagctcacgtcctcggtatgcagcaagcttgctgcagcaggcaccggagatggagacgacctttccccggcaagtgtggaggacgcagcagatcgccaccgtgtggatctggagatgcagacgttggctcggtgcgttctccggagccgcagcagtatcgacgcagtgaccaggcagacgtttctccatgtcgcgaggagcttctattacgtcgctcattgctcagctcgaacggttgatgcccacatctccaaggtcttgttcgaggatgtcgtgtagccaccgtttgggcctcgttttgtatctttaaagcagtgtttggttccagccagatttagtctcggccaaatcaaatgtttgaatggtaattacatgtattaaatatagtctaattataaaactaattacatatataaagactaaaagacgagataaatctactaaatctaactaagactatatttagttctcatatataatattc

SEQ ID NO: 16420 - DNA, 2475 bp, Zea Mays
gctggtgccgttcgcttggtgcttcctccctcagcgccgttgtcctttgacccggcgcggcggtgcccaacctcgctgctcgtccgacgcccctccacgacatcagtgtccgcggagaggaggatgagcagaaagagatgctgcagcaaatgactgacggagtcagagcaatgctgggctcaataggtgacggtgcgatcaacatttctgcctacgacaccgcatgggttgcccttgttaagagcctggaaggtggcaatggccctcagtttccctccagccttagatggatcgttgagaaccaactaccagatggctcgtggggcgacgaggagttcttcctggtctatgaccgcatgatcaacactctggcctgtgtgattgcacttgagtcgtgggaaatccatgctgacatgtgcgagaaaggtttgtcattcattcgagagaatttgtggaggctagagcacagtggttcagatgactggatggtcgttagtttcgagataaccttcccccagctgctggagatggcaagagacttgggtctcgacgtgccctgcgacgagccatccctgcgagctatctatgcaaggagagacgcaaagctcgcaagaatccctaaagaattactgcacgcttcaccgacaactctgcttctgagcatagagggaatgccgggcttagactgggagagactactgaaactccagtgctccgatggttcgttcatgtcatcgcctgcacccacagcctacgctctcatgcagaccggcgacacgaaatgcctcgagttcctcaatggaatcgtcagcaagtttagcgggggagtgccctttacctaccctgtggatctgttcgagcacttatgggtagtggacaggatagagcggctgggcatagggaggcacttcacaggtgaaatcaaggagtgcctagaatacgtacacaggtactggggcgacgaaggcttgcccgccacgagggacggtccggtctcagatgtcgatgacacggccatggggttccgtcttctccgactgcatggctacgatgtctctccttctgtgtttaagcacttcgagcaggacggggcgttctactgctacccagggcagtcgaacaaatccgtgactgctatgtacaacctctaccgcgcttctcaggtggcctttccaggcgaggatgagctccgacgcgctgaggcatacagccgtgagttcctctgccgcagacgagcctccggggagctcaaagacaagtgggtcatccccaaggacttgcctggcgaggtcgcttacgcactggacgtgccgtggaaagctagcctgccgcgcatcgagacgaggatgtatctggagcagtacggtggtgccgatgacgtgtggattgggaaggtcctgtacaggatgtctctcgtcaacaacgagctcctcctccggacagctcaagccgacttcagaagtttccagagacaatgcaagctcgagtggcatggcctcagaaaatgggccagcaggagaaacctccaagcatacggcgtgacgtcgaacagcacgctgcgatcctacttcttagccgcagccagcatctttgagccagacagagcgacagagcgtctgggatgggctcgcacggcggtgctcgccgaggccgtctcctcctgcctccgagacggtcgttgtagccgtgccgacggcatgctgagggaactgaccagcggcatccacctacgcaacgacgataatccggcagccagcttggtgcatgctctccatgagctcattggcctccttgcattcgacaatgcttcctacaacagccttcttgatgcctggaagcaatggctcgccatgtggaccgcccagggacacgaagggagcgtagcgctgctgctggttcgcacagtggagatatgctccggccggaggcgtagcgcctctgccaccgacgatggccaagcacacagcctctccgagtactcccagctcgagcagctcacgtcctcggtatgcagcaagcttgctgcagcaggcaccggagatggagacgacctttccccggcaagtgtggaggacgcagcagatcgccaccgtgtggatctggagatgcagacgttggctcggtgcgttctccggagccgcagcagtatcgacgcagtgaccaggcagacgtttctccatgtcgcgaggagcttctattacgtcgctcattgctcagctcgaacggttgatgcccacatctccaaggtcttgttcgaggatgtcgtgtagccaccgtttgggcctcgttttgtatctttaaagcagtgtttggttccagccagatttagtctcggccaaatcaaatgtttgaatggtaattacatgtattaaatatagtctaattataaaactaattacatatataaagactaaaagacgagataaatctactaaatctaactaagactatatttagttctcatatataatattc

SEQ ID NO: 16421 - DNA, 2674 bp, Zea Mays
gctggtgccgttcgcttggtgcttcctccctcagcgccgttgtcctttgacccggcgcggcggtgcccaacctcgctgctcgtccgacgcccgtacgtcgcccttcgcgtcctccctccttactccctcgccaagtcgcccgacgatggatctgccgcgaccccaggctccctgttgtcggcgccctgcagacctacgtcctgccccctgctgcatcgatgcgcccaggcccagcgacctgcgcggctgcgccccggcagccggcgccctatggaaaccctccgcttcgtatccccgtgctgccgtgccgccagcctccgtgaggctccacgacatcagtgtccgcggagaggaggatgagcagaaagagatgctgcagcaaatgactgacggagtcagagcaatgctgggctcaataggtgacggtgcgatcaacatttctgcctacgacaccgcatgggttgcccttgttaagagcctggaaggtggcaatggccctcagtttccctccagccttagatggatcgttgagaaccaactaccagatggctcgtggggcgacgaggagttcttcctggtctatgaccgcatgatcaacactctggcctgtgtgattgcacttgagtcgtgggaaatccatgctgacatgtgcgagaaaggtttgtcattcattcgagagaatttgtggaggctagagcacagtggttcagatgactggatggtcgttagtttcgagataaccttcccccagctgctggagatggcaagagacttgggtctcgacgtgccctgcgacgagccatccctgcgagctatctatgcaaggagagacgcaaagctcgcaagaatccctaaagaattactgcacgcttcaccgacaactctgcttctgagcatagagggaatgccgggcttagactgggagagactactgaaactccagtgctccgatggttcgttcatgtcatcgcctgcacccacagcctacgctctcatgcagaccggcgacacgaaatgcctcgagttcctcaatggaatcgtcagcaagtttagcgggggagtgccctttacctaccctgtggatctgttcgagcacttatgggtagtggacaggatagagcggctgggcatagggaggcacttcacaggtactggggcgacgaaggcttgcccgccacgagggacggtccggtctcagatgtcgatgacacggccatggggttccgtcttctccgactgcatggctacgatgtctctccttctgtgtttaagcacttcgagcaggacggggcgttctactgctacccagggcagtcgaacaaatccgtgactgctatgtacaacctctaccgcgcttctcaggtggcctttccaggcgaggatgagctccgacgcgctgaggcatacagccgtgagttcctctgccgcagacgagcctccggggagctcaaagacaagtgggtcatccccaaggacttgcctggcgaggtcgcttacgcactggacgtgccgtggaaagctagcctgccgcgcatcgagacgaggatgtatctggagcagtacggtggtgccgatgacgtgtggattgggaaggtcctgtacaggatgtctctcgtcaacaacgagctcctcctccggacagctcaagccgacttcagaagtttccagagacaatgcaagctcgagtggcatggcctcagaaaatgggccagcaggagaaacctccaagcatacggcgtgacgtcgaacagcacgctgcgatcctacttcttagccgcagccagcatctttgagccagacagagcgacagagcgtctgggatgggctcgcacggcggtgctcgccgaggccgtctcctcctgcctccgagacggtcgttgtagccgtgccgacggcatgctgagggaactgaccagcggcatccacctacgcaacgacgataatccggcagccagcttggtgcatgctctccatgagctcattggcctccttgcattcgacaatgcttcctacaacagccttcttgatgcctggaagcaatggctcgccatgtggaccgcccagggacacgaagggagcgtagcgctgctgctggttcgcacagtggagatatgctccggccggaggcgtagcgcctctgccaccgacgatggccaagcacacagcctctccgagtactcccagctcgagcagctcacgtcctcggtatgcagcaagcttgctgcagcaggcaccggagatggagacgacctttccccggcaagtgtggaggacgcagcagatcgccaccgtgtggatctggagatgcagacgttggctcggtgcgttctccggagccgcagcagtatcgacgcagtgaccaggcagacgtttctccatgtcgcgaggagcttctattacgtcgctcattgctcagctcgaacggttgatgcccacatctccaaggtcttgttcgaggatgtcgtgtagccaccgtttgggcctcgttttgtatctttaaagcagtgtttggttccagccagatttagtctcggccaaatcaaatgtttgaatggtaattacatgtattaaatatagtctaattataaaactaattacatatataaagactaaaagacgagataaatctactaaatctaactaagactatatttagttctcatatataatattc

SEQ ID NO: 16422 - DNA, 1664 bp, Zea Mays
cttctactctactctactcagtggagtagtataaaactgaggaacacggcaataacacgagcaaattcagcttgtcttccaatgggggatcgtgttggtgtcaagtacaacagcatcaatgaggctgaagagcataagggagggcatggcatccccaaggtttccatgatacccctcatattcctcatattttatgaagtttcagggggtccctttgggattgaggatagtgtcaaggctgctgggccactactggcaattttgggctttcttctgtttgcactcatatggagcgttccagaagctctaatcactgctgagatgggcactatgttccccgagaatggtggttatgttgtctgggtttcttcagctcttggtccgttctggggttttcagcaaggttgggcaaagtggctcagcggtgtcatagataatgccctctatccagtcctatttctggactatgtcaagtccagtgttccagctcttggaggtgggctcccaaggaccttagcggtgcttatcctcacagttgcgcttacatacatgaactacagagggctgactttttttgccaagagatctcactatggaaccccgcttattggcatcctgttctctgccttcggtgtgatcctactgtcctggatgagcttccaggagatcatcgctgccgagaactacctctactgcttcggcatgatcctggagttcattgccttcatcaagctgcgggtgtaccatccgaacgcctctcggccctacaagatccctttgggcaccattggtgctatccttatgatcatcccacctggtctcttgatcattgtggtgatggcactcgcgtcctacaaggtgatggtggtgagcatcctagcgatggtcttcggattcgtgctgcagccgtgtttggtgtacgtggagaagaagcggtggttaaggttctccatcagtgcagacctgcccgatttgcctgatgtgcaggaaattgctgaagatgatgctgtcccactcgtggtctaatattcggccattgtgctctggaggtgttgttcccaatcgagacatcctaggatggaatgtgacacactgggattcacgaccttgtatctcctgaatgagttccaaagccagaggtcttagacatcttgtataaggacacattatgttttcaccgtgctattgaacatcatgatggcatcatgcatcaaacagaaatgtaagccccagacagtgttcatcaaaggagatcctccagattatcaaatacatgttgcatctgctgtcagctgtcgcttaacttgtctatatactagggtcgatccatgacatgacatgaggttactcatctgggatcgccttaaaatgggtgaacgttaactcttgataagaggcagtagaggttctcgacctgcagattgtaacctggtttccattgcataaactgttatcagtaattccatcttttgcgtacagttttgtgttataaatggagcatcggcgtaattgtccttggaagttagttgccattattctgcatgtttcgactcatttttgcaaacaatataaaatgtttttcgcaaacaatataaaatgttgagttttatttcggaagggtactatttttttcgatttttgaatcccaaagtttcatcattaga

SEQ ID NO: 16423 - DNA, 2428 bp, Zea Mays
cccaattccacttccaaccggccgtctcctaccagtaccgcctgcgcctccctggacccgttccgtctgattccccaccgctgcttcgtcgtcaacatacttctcagccaataggtgcacatcttcctacttcgatgcgaatcctactctggattcaagtcaggtccagtttgaaagtgacaagaagctgctctagttccacgcatcttcgccgccccatcattgccacccgcaagcggcaagcccaacggtttccaacccaaccggagtgatcaatccttctactctactctactcagtggagtagtataaaactgaggaacacggcaataacacgagcaaattcagcttgtcttccaatgggggatcgtgttggtgtcaagtacaacagcatcaatgaggctgaagagcataagggagggcatggcatccccaaggtttccatgatacccctcatattcctcatattttatgaagtttcagggggtccctttgggattgaggatagtgtcaaggctgctgggccactactggcaattttgggctttcttctgtttgcactcatatggagcgttccagaagctctaatcactgctgagatgggcactatgttccccgagaatggtggttatgttgtctgggtttcttcagctcttggtccgttctggggttttcagcaaggttgggcaaagtggctcagcggtgtcatagataatgccctctatccagtcctatttctggactatgtcaagtccagtgttccagctcttggaggtgggctcccaaggaccttagcggtgcttatcctcacagttgcgcttacatacatgaactacagagggctgactatagttggctgggtggcagtctttcttggggtgttctctcttctcccgttctttgtgatgggattgatagctattccacagattgaaccttctaggtggcttgaaatggacttggggagtgtggattggggattgtatctgaatacactattttggaacctcaactattgggattcaatcagcacattggctggtgaagtcgagaatccaaagagaaccctaccaagagcgctttcttatgctctagttctagtggtgggaggatacctctacccattaatcacttgcacagcagcagttccaatcgttagggagcactggtcagatgggtatttttcagacatcgcaagaattctcggtggcatttggttgcactcatggattcaagcagcagctgctttatccaacatgggcaattttctcactgaaatgagcagcgattcttaccagcttcttgggatggctgagcgaggcatgctccctgacttttttgccaagagatctcactatggaaccccgcttattggcatcctgttctctgccttcggtgtgatcctactgtcctggatgagcttccaggagatcatcgctgccgagaactacctctactgcttcggcatgatcctggagttcattgccttcatcaagctgcgggtgtaccatccgaacgcctctcggccctacaagatccctttgggcaccattggtgctatccttatgatcatcccacctggtctcttgatcattgtggtgatggcactcgcgtcctacaaggtgatggtggtgagcatcctagcgatggtcttcggattcgtgctgcagccgtgtttggtgtacgtggagaagaagcggtggttaaggttctccatcagtgcagacctgcccgatttgcctgatgtgcaggaaattgctgaagatgatgctgtcccactcgtggtctaatattcggccattgtgctctggaggtgttgttcccaatcgagacatcctaggatggaatgtgacacactgggattcacgaccttgtatctcctgaatgagttccaaagccagaggtcttagacatcttgtataaggacacattatgttttcaccgtgctattgaacatcatgatggcatcatgcatcaaacagaaatgtaagccccagacagtgttcatcaaaggagatcctccagattatcaaatacatgttgcatctgctgtcagctgtcgcttaacttgtctatatactagggtcgatccatgacatgacatgaggttactcatctgggatcgccttaaaatgggtgaacgttaactcttgataagaggcagtagaggttctcgacctgcagattgtaacctggtttccattgcataaactgttatcagtaattccatcttttgcgtacagttttgtgttataaatggagcatcggcgtaattgtccttggaagttagttgccattattctgcatgtttcgactcatttttgcaaacaatataaaatgtttttcgcaaacaatataaaatgttgagttttatttcggaagggtactatttttttcgatttttgaatcccaaagtttcatcattaga

SEQ ID NO: 16424 - DNA, 2374 bp, Zea Mays
gagtcggcgacgcacggggagaagtcgaacagcggccgcgcgcggggaagttgcccggcggcggcggatctcggaggcagcgacgcgcgggtggaggagctcagtgacagcgccagtgcctatcgagcgagcgaatcgaggagattctccccactgtttctttcctgctgattccgatttcgcgttgaaacaccggggggagaagaattgcgggcgaccataactcggcaagaagcggctccaaaaagggcatctacctttgccgattccggcaccgatggatcccgcggcgtcggggaggttcgacaagctccagagctcgttcaagctctccatccagtgcctcctcaccgcctgctcccgcgaggatgtcaatgacgctttctcgtccttcactgatgctgagaaggagcgtttgcaccggatgctcacccttgtgatgaagaatctgcatgccaacgtagtggatgagtttgacgacttctgccaagaaacacagaggtggctgctgcccttgaaaagatagatgactttgttgaaaagcagaatcttgatgcattatcttcagagaagactactgttgaagaaatcgaagaaaaggtatcaagagcaaaaaaggatgaaattgaatatttgactggtttactgaaaaaggttgaagaaagtaacaatgccaagaaagctcgaattgaactcctgaagaaagaggaggatttaactgctgcaagagatgtcctcaataagatgacgcagtggaactctgcactcgtggagaacattaacccttgaatctgtgtgatgacgattcattggcgtcaaaggacatctttgtataggggtgtgttagattggatgacatgtgaatgtgattcatggatcagcctggatgttctgttatgattaagaactgctatgtatcgtgcaatagacacatcgtctgtactttggatgttattatcaggtcccaaacttcattatatccaatatgttacaatatcattttggtgacttaactacaatgtcagctcgtgccaacagaaaaagaagaaaagaaatgggcggtggttgcccgacaagtccttgtcagccgcacagtcttcacacgaccaggggccatgagcaccactcttgccttagccacggcccacgggcagcacagcatctccatctatccaaatggcagccagcagccgtccccttcctccaccctctgccatcctcgcagtcacagcccctcaccatggctgccacactctcctccgtggctgccccttccctccccaagcacatccccgttaccagagctcagcagcaggcgcctccttccatcatctcggcatcaactcagaagactgccttccatggggtgtcgctggtggtggacaggaggtgggcggccggccaccggagaggcggcggccggcggaggctgctgcaggtgaacgcgaggaccgccgccaagaacatcgaggtggaggtcgagaagccgcttggcttagccttgggccagaagcccggtggtggcgtcgtcatcacttctgtggagtctggagggaatgcagccagagccggtctgaaaaccggggaccaggtcctgtacacaagcagcttcttcggagacgagctgtggcctgcggataagcttgggttcaccaagacagccatccaagcgaagtcagactccgtctacttcgtcgtgagcaggggtgccgaagttgacgtgaagcgcctacctaagaggccggcgccaccccggtttggacggaagctgactgattcacaaaaggagagagcaacgcacgtctgccttgattgtgggtacatatacttcctacccaagccttttgacgaacagcccgacgactacggttgcccacagtgcaacgcgccgaagaagcggtttgcgaggtacgacgctgccaccgggaaggccatcggcggcgctctgccgcctatcgccgtgatcgtaagtttggtgatcggcatcgctggggtaggagctctgctcgtgtacggcctgcagtagcctgctcgttcttgttcagaacctttttttttttttgctgtgctcaagaagctcagctgactgctgctgtactctgtctcacaagacattccgagtgatatacatacataaaagggaagaaggaaatacacagtatttgaggctaaaaacgaacctcgtatagacactactgtgggttggggtacagtgcaagaatcgaaacggaactggagattcagaaccaaatggaaacaaagaaccagtcttggtgaccatcagatgaataaacgttcgatcttcaacaagcgagtagcagaatatggcgatttagagagtgatgagccgtgtacctgcagacccatggcttgg

SEQ ID NO: 16425 - DNA, 2350 bp, Zea Mays
caactacgattcatctcggaacagcccaactagcccattcaacattcctgtaagcgcggagtcggcgacgcacggggagaagtcgaacagcggccgcgcgcggggaagttgcccggcggcggcggatctcggaggcagcgacgcgcgggtggaggagctcagtgacagcgccagtgcctatcgagcgagcgaatcgaggagattctccccactgtttctttcctgctgattccgatttcgcgttgaaacaccggggggagaagaattgcgggcgaccataactcggcaagaagcggctccaaaaagggcatctacctttgccgattccggcaccgatggatcccgcggcgtcggggaggttcgacaagctccagagctcgttcaagctctccatccagtgcctcctcaccgcctgctcccgcgaggatgtcaatgacgctttctcgtccttcactgatgctgagaaggagcgtttgcaccggatgctcacccttgtgatgaagaatctgcatgccaacgtagtggatgagtttgacgacttctgccaagaaacacaggtggctgctgcccttgaaaagatagatgactttgttgaaaagcagaatcttgatgcattatcttcagagaagactactgttgaagaaatcgaagaaaaggtatcaagagcaaaaaaggatgaaattgaatatttgactggtttactgaaaaaggttgaagaaagtaacaatgccaagaaagctcgaattgaactcctgaagaaagaggaggatttaactgctgcaagagatgtcctcaataagatgacgcagtggaactctgcactcgtggagaacattaacccttgaatctgtgtgatgacgattcattggcgtcaaaggacatctttgtataggggtgtgttagattggatgacatgtgaatgtgattcatggatcagcctggatgttctgttatgattaagaactgctatgtatcgtgcaatagacacatcgtctgtactttggatgttattatcagaaaaagaagaaaagaaatgggcggtggttgcccgacaagtccttgtcagccgcacagtcttcacacgaccaggggccatgagcaccactcttgccttagccacggcccacgggcagcacagcatctccatctatccaaatggcagccagcagccgtccccttcctccaccctctgccatcctcgcagtcacagcccctcaccatggctgccacactctcctccgtggctgccccttccctccccaagcacatccccgttaccagagctcagcagcaggcgcctccttccatcatctcggcatcaactaagactgccttccatggggtgtcgctggtggtggacaggaggtgggcggccggccaccggagaggcggcggccggcggaggctgctgcaggtgaacgcgaggaccgccgccaagaacatcgaggtggaggtcgagaagccgcttggcttagccttgggccagaagcccggtggtggcgtcgtcatcacttctgtggagtctggagggaatgcagccagagccggtctgaaaaccggggaccaggtcctgtacacaagcagcttcttcggagacgagctgtggcctgcggataagcttgggttcaccaagacagccatccaagcgaagtcagactccgtctacttcgtcgtgagcaggggtgccgaagttgacgtgaagcgcctacctaagaggccggcgccaccccggtttggacggaagctgactgattcacaaaaggagagagcaacgcacgtctgccttgattgtgggtacatatacttcctacccaagccttttgacgaacagcccgacgactacggttgcccacagtgcaacgcgccgaagaagcggtttgcgaggtacgacgctgccaccgggaaggccatcggcggcgctctgccgcctatcgccgtgatcgtaagtttggtgatcggcatcgctggggtaggagctctgctcgtgtacggcctgcagtagcctgctcgttcttgttcagaacctttttttttttttgctgtgctcaagaagctcagctgactgctgctgtactctgtctcacaagacattccgagtgatatacatacataaaagggaagaaggaaatacacagtatttgaggctaaaaacgaacctcgtatagacactactgtgggttggggtacagtgcaagaatcgaaacggaactggagattcagaaccaaatggaaacaaagaaccagtcttggtgaccatcagatgaataaacgttcgatcttcaacaagcgagtagcagaatatggcgatttagagagtgatgagccgtgtacctgcagacccatggcttgg

SEQ ID NO: 16426 - DNA, 2316 bp, Zea Mays
caactacgattcatctcggaacagcccaactagcccattcaacattcctgtaagcgcggagtcggcgacgcacggggagaagtcgaacagcggccgcgcgcggggaagttgcccggcggcggcggatctcggaggcagcgacgcgcgggtggaggagctcagtgacagcgccagtgcctatcgagcgagcgaatcgaggagattctccccactgtttctttcctgctgattccgatttcgcgttgaaacaccggggggagaagaattgcgggcgaccataactcggcaagaagcggctccaaaaagggcatctacctttgccgattccggcaccgatggatcccgcggcgtcggggaggttcgacaagctccagagctcgttcaagctctccatccagtgcctcctcaccgcctgctcccgcgaggatgtcaatgacgctttctcgtccttcactgatgctgagaaggagcgtttgcaccggatgctcacccttgtgatgaagaatctgcatgccaacgtagtggatgagtttgacgacttctgccaagaaacacaggtggctgctgcccttgaaaagatagatgactttgttgaaaagcagaatcttgatgcattatcttcagagaagactactgttgaagaaatcgaagaaaaggtatcaagagcaaaaaaggatgaaattgaatatttgactggtttactgaaaaaggttgaagaaagtaacaatgccaagaaagctcgaattgaactcctgaagaaagaggaggatttaactgctgcaagagatgtcctcaataagatgacgcagtggaactctgcactcgtggagaacattaacccttgaatctgtgtgatgacgattcattggcgtcaaaggacatctttgtataggggtgtgttagattggatgacatgtgaatgtgattcatggatcagcctggatgttctgttatgattaagaactgctatctcgtgccaacagaaaaagaagaaaagaaatgggcggtggttgcccgacaagtccttgtcagccgcacagtcttcacacgaccaggggccatgagcaccactcttgccttagccacggcccacgggcagcacagcatctccatctatccaaatggcagccagcagccgtccccttcctccaccctctgccatcctcgcagtcacagcccctcaccatggctgccacactctcctccgtggctgccccttccctccccaagcacatccccgttaccagagctcagcagcaggcgcctccttccatcatctcggcatcaactaagactgccttccatggggtgtcgctggtggtggacaggaggtgggcggccggccaccggagaggcggcggccggcggaggctgctgcaggtgaacgcgaggaccgccgccaagaacatcgaggtggaggtcgagaagccgcttggcttagccttgggccagaagcccggtggtggcgtcgtcatcacttctgtggagtctggagggaatgcagccagagccggtctgaaaaccggggaccaggtcctgtacacaagcagcttcttcggagacgagctgtggcctgcggataagcttgggttcaccaagacagccatccaagcgaagtcagactccgtctacttcgtcgtgagcaggggtgccgaagttgacgtgaagcgcctacctaagaggccggcgccaccccggtttggacggaagctgactgattcacaaaaggagagagcaacgcacgtctgccttgattgtgggtacatatacttcctacccaagccttttgacgaacagcccgacgactacggttgcccacagtgcaacgcgccgaagaagcggtttgcgaggtacgacgctgccaccgggaaggccatcggcggcgctctgccgcctatcgccgtgatcgtaagtttggtgatcggcatcgctggggtaggagctctgctcgtgtacggcctgcagtagcctgctcgttcttgttcagaacctttttttttttttgctgtgctcaagaagctcagctgactgctgctgtactctgtctcacaagacattccgagtgatatacatacataaaagggaagaaggaaatacacagtatttgaggctaaaaacgaacctcgtatagacactactgtgggttggggtacagtgcaagaatcgaaacggaactggagattcagaaccaaatggaaacaaagaaccagtcttggtgaccatcagatgaataaacgttcgatcttcaacaagcgagtagcagaatatggcgatttagagagtgatgagccgtgtacctgcagacccatggcttgg

SEQ ID NO: 16427 - DNA, 2353 bp, Zea Mays
caactacgattcatctcggaacagcccaactagcccattcaacattcctgtaagcgcggagtcggcgacgcacggggagaagtcgaacagcggccgcgcgcggggaagttgcccggcggcggcggatctcggaggcagcgacgcgcgggtggaggagctcagtgacagcgccagtgcctatcgagcgagcgaatcgaggagattctccccactgtttctttcctgctgattccgatttcgcgttgaaacaccggggggagaagaattgcgggcgaccataactcggcaagaagcggctccaaaaagggcatctacctttgccgattccggcaccgatggatcccgcggcgtcggggaggttcgacaagctccagagctcgttcaagctctccatccagtgcctcctcaccgcctgctcccgcgaggatgtcaatgacgctttctcgtccttcactgatgctgagaaggagcgtttgcaccggatgctcacccttgtgatgaagaatctgcatgccaacgtagtggatgagtttgacgacttctgccaagaaacacaggtggctgctgcccttgaaaagatagatgactttgttgaaaagcagaatcttgatgcattatcttcagagaagactactgttgaagaaatcgaagaaaaggtatcaagagcaaaaaaggatgaaattgaatatttgactggtttactgaaaaaggttgaagaaagtaacaatgccaagaaagctcgaattgaactcctgaagaaagaggaggatttaactgctgcaagagatgtcctcaataagatgacgcagtggaactctgcactcgtggagaacattaacccttgaatctgtgtgatgacgattcattggcgtcaaaggacatctttgtataggggtgtgttagattggatgacatgtgaatgtgattcatggatcagcctggatgttctgttatgattaagaactgctatgtatcgtgcaatagacacatcgtctgtactttggatgttattatcagaaaaagaagaaaagaaatgggcggtggttgcccgacaagtccttgtcagccgcacagtcttcacacgaccaggggccatgagcaccactcttgccttagccacggcccacgggcagcacagcatctccatctatccaaatggcagccagcagccgtccccttcctccaccctctgccatcctcgcagtcacagcccctcaccatggctgccacactctcctccgtggctgccccttccctccccaagcacatccccgttaccagagctcagcagcaggcgcctccttccatcatctcggcatcaactcagaagactgccttccatggggtgtcgctggtggtggacaggaggtgggcggccggccaccggagaggcggcggccggcggaggctgctgcaggtgaacgcgaggaccgccgccaagaacatcgaggtggaggtcgagaagccgcttggcttagccttgggccagaagcccggtggtggcgtcgtcatcacttctgtggagtctggagggaatgcagccagagccggtctgaaaaccggggaccaggtcctgtacacaagcagcttcttcggagacgagctgtggcctgcggataagcttgggttcaccaagacagccatccaagcgaagtcagactccgtctacttcgtcgtgagcaggggtgccgaagttgacgtgaagcgcctacctaagaggccggcgccaccccggtttggacggaagctgactgattcacaaaaggagagagcaacgcacgtctgccttgattgtgggtacatatacttcctacccaagccttttgacgaacagcccgacgactacggttgcccacagtgcaacgcgccgaagaagcggtttgcgaggtacgacgctgccaccgggaaggccatcggcggcgctctgccgcctatcgccgtgatcgtaagtttggtgatcggcatcgctggggtaggagctctgctcgtgtacggcctgcagtagcctgctcgttcttgttcagaacctttttttttttttgctgtgctcaagaagctcagctgactgctgctgtactctgtctcacaagacattccgagtgatatacatacataaaagggaagaaggaaatacacagtatttgaggctaaaaacgaacctcgtatagacactactgtgggttggggtacagtgcaagaatcgaaacggaactggagattcagaaccaaatggaaacaaagaaccagtcttggtgaccatcagatgaataaacgttcgatcttcaacaagcgagtagcagaatatggcgatttagagagtgatgagccgtgtacctgcagacccatggcttgg

SEQ ID NO: 16428 - DNA, 847 bp, Zea Mays
caactacgattcatctcggaacagcccaactagcccattcaacattcctgtaagcgcggagtcggcgacgcacggggagaagtcgaacagcggccgcgcgcggggaagttgcccggcggcggcggatctcggaggcagcgacgcgcgggtggaggagctcagtgacagcgccagtgcctatcgagcgagcgaatcgaggagattctccccactgtttctttcctgctgattccgatttcgcgttgaaacaccggggggagaagaattgcgggcgaccataactcggcaagaagcggctccaaaaagggcatctacctttgccgattccggcaccgatggatcccgcggcgtcggggaggttcgacaagctccagagctcgttcaagctctccatccagtgcctcctcaccgcctgctcccgcgaggatgtcaatgacgctttctcgtccttcactgatgctgagaaggagcgtttgcaccggatgctcacccttgtgatgaagaatctgcatgccaacgtagtggatgagtttgacgacttctgccaagaaacacaggtggctgctgcccttgaaaagatagatgactttgttgaaaagcagaatcttgatgcattatcttcagagaagactactgttgaagaaatcgaagaaaaggtatcaagagcaaaaaaggatgaaattgaatatttgactggtttactgaaaaagttgctaaatcagatggaggagctgttgctgctgcacgtgcacgggttcgagggcctgccgctgcttctatttccacttgagatccaatagttgctccggttataggagcatgagaactactagtacctggagtcgac

SEQ ID NO: 16429 - DNA, 559 bp, Zea Mays
cgcggagtcggcgacgcacggggagaagtcgaacagcggccgcgcgcggggaagttgcccggcggcggcggatctcggaggcagcgacgcgcgggtggaggagctcagtgacagcgccagtgcctatcgagcgagcgaatcgaggagattctccccactgtttctttcctgctgattccgatttcgcgttgaaacaccggggggagaagaattgcgggcgaccataactcggcaagaagcggctccaaaaagggcatctacctttgccgattccggcaccgatggatcccgcggcgtcggggaggttcgacaagctccagagctcgttcaagctctccatccagtgcctcctcaccgcctgctcccgcgaggatgtcaatgacgctttctcgtccttcactgatgctgagaaggagcgtttgcaccggatgctcacccttgatgagtttgacgacttctgccaagaaacacaggtggctgctgcccttgaaaagatagatgactttgttgaaaagcagaatcttgatgcattatcttcagagaattcatttgattgcag

SEQ ID NO: 16430 - DNA, 643 bp, Zea Mays
caactacgattcatctcggaacagcccaactagcccattcaacattcctgtaagcgcggagtcggcgacgcacggggagaagtcgaacagcggccgcgcgcggggaagttgcccggcggcggcggatctcggaggcagcgacgcgcgggtggaggagctcagtgacagcgccagtgcctatcgagcgagcgaatcgaggagattctccccactgtttctttcctgctgattccgatttcgcgttgaaacaccggggggagaagaattgcgggcgaccataactcggcaagaagcggctccaaaaagggcatctacctttgccgattccggcaccgatggatcccgcggcgtcggggaggttcgacaagctccagagctcgttcaagctctccatccagtgcctcctcaccgcctgctcccgcgaggatgtcaatgacgctttctcgtccttcactgatgctgagaaggagcgtttgcaccggatgctcacccttgtgatgaagaatctgcatgccaacgtagtggatgagtttgacgacttctgccaagaaacacaggtggctgctgcccttgaaaagatagatgactttgttgaaaagcagaatcttgatgcattatcttcagagaattcatttgattgcag

SEQ ID NO: 16431 - DNA, 2551 bp, Zea Mays
gttagctcatcaccgtggaactaggtcatggaatggatcgtgagagagaggccctacaagctgagtgagcttgattactcgtatctgctggagttcacagctaaagtccatggcatttctgaagccgaaagcctcttccttcgcgtgcctcaggaatgccggaaagagctcctctacaacaaccttgtcatggctgctttagatctgaatcacattaagcattcatacgcttacatgaggaagatgagagaattgtccctgccgatctcgccgtatgtttacaaccgcctgatcatccttcactcatcacccggtcgcaggaaaactatatccaagatcctttcccagatgaaagctgatcgtgtggtccctcacacgtcaacctacaacatcctattgaaaatacaagccaatgagcacaacattgatgggctagccagggtgttcaatggtatgaaaagagcaaagattgagcccaatgagatcacttatggcattctagccattgcacatgctgttgcaaggctatatactgtttgccatacatatgtagaagccattgagaattccatgacaggtactaattggtccacgctggaaattcttcttatcctgtatggataccttgggaaggaaaaggagctaaagaggacatgggagatcatgcaagacctccctcatattcgatccaaaagcttcacactagcaatcgaagcatttggaaaggttggctccattgaccaggcagaaaagatatggatccatataaaatcaacaaagaagttaagccttacagaacagtttaattctatgttatcagtttactgcaggcacggtgttgtcgataaagcatcatctgtattcaaggaaatgagagcaaatggatgccagcctaatgctattacttatcgccacttagcattgggttgcttgaaatcaggtcttgttaaagaagctttgaacacaatagatatgggaaagaaggaagtcgtcactaaaaaggtgaggagttcaacaccatggttggagaccacacatctgttgcttgagaactttgcagaaattggagacttggaaaatgcaaagagactgtacagtgaactgaatgaatccaaatattctctgaattcctttgtgtataacaccctcctgaaagcttatgtgaaggcaaaagtttatgagccggatttgtcgaggacaatgattttgagaggggcaatgcctgacgctgagacatatagccttctcagactgattgaacaattcaagatctaatgctctatgtgtgttgttgctttgaaggaaaaccagtaaaccactgctggattttgtcatgcaaaaaccattagagatactgtggacagcgtgttgcattctggcaatcaaattttttttgcacagtaatcccaacttccgcactaatcaattggagatatgcagctatcttttctatcataaacaattttagaactgcaagatatacaattcttgtgcattccgaattttggaaatgttcctttttctcatgcagaaggtatatcaactagttcaatttaatattggtataatatttgtcctccaatgctgcatttcatttcaagtacaaaagatggaatacaggcacccaaacaataaaggaggccaattgtcttttatcatgccacaaagaggtgatagaaatggtgaatatttaattgtgttgctactgcttgtttcttgagcagatactgttcagctgcgaggataaaggaacctggaaatttccgtggagaaggctccaacttttttttttctacctcatcaattagtttaactacattgggattcaggttagaagtctacatactggttaagtgctcatccgggtacaacatcgtgttttttttctttgaacttctgttgctcttttagagcttgtagtttgatcttgtggaccttctacatctgcttgctttataaataattctgcaccaagctgttcttgttctccagtagtgagatggttttccgtaagaaaatgtgaacagctagtgggtcacaaagaatgccatcagcattatcatgaggctgtgtggtgggtgcagtgtttctgaatgttcaggttggcaaatggcatacgaatggaaaatgccccactgatttgatcaactccatctgccatataaatctcttttgggctgattataggtgtgagtgctgcatgaaaggttctgctgaaattaggagcccttttctcttttttgagcctgacaccggttgtggcaattttatgtgctaataaatagccagtggcataacaaggcaacatggttttttttttggtatggttactcttgtgctgctcagtcacagcgacattagcaattggagcagaaacagagacccaagcagaagtcagtatagtgtttctacgctagaatagtttgctaacaggacacgcttacaatgatgaagtaatgtaactatgttggaaactcgggaatagcgacatcagataagttataatggcatatcagaacagaaacagaggctcaatcagaaaatatattcc

SEQ ID NO: 16432 - DNA, 3118 bp, Zea Mays
atgctgttgtggcgagtgctgctccggcaccggcggccgccgttccccgtccacgccgccggattcttcaccagctccggaagcaacaccactgcgcctcctcctgctggagcggaggggctccgcgacgagccgggggaggagggctccctggcgcggcgggtggagcgggcggcgtcggtcggcgcggccatgcggggctggatggcagacggccgcgccgtgcaccgtggccacgtattccacgccatcaaccgcctccgacgacaccgcctacaccgcaccgccctgcaggtgttctgctgatttctgtacttgttcacgatgtggtggaaagcttatttgaatggtcatggaatggatcgtgagagagaggccctacaagctgagtgagcttgattactcgtatctgctggagttcacagctaaagtccatggcatttctgaagccgaaagcctcttccttcgcgtgcctcaggaatgccggaaagagctcctctacaacaaccttgtcatggctgctttagatctgaatcacattaagcattcatacgcttacatgaggaagatgagagaattgtccctgccgatctcgccgtatgtttacaaccgcctgatcatccttcactcatcacccggtcgcaggaaaactatatccaagatcctttcccagatgaaagctgatcgtgtggtccctcacacgtcaacctacaacatcctattgaaaatacaagccaatgagcacaacattgatgggctagccagggtgttcaatggtatgaaaagagcaaagattgagcccaatgagatcacttatggcattctagccattgcacatgctgttgcaaggctatatactgtttgccatacatatgtagaagccattgagaattccatgacaggtactaattggtccacgctggaaattcttcttatcctgtatggataccttgggaaggaaaaggagctaaagaggacatgggagatcatgcaagacctccctcatattcgatccaaaagcttcacactagcaatcgaagcatttggaaaggttggctccattgaccaggcagaaaagatatggatccatataaaatcaacaaagaagttaagccttacagaacagtttaattctatgttatcagtttactgcaggcacggtgttgtcgataaagcatcatctgtattcaaggaaatgagagcaaatggatgccagcctaatgctattacttatcgccacttagcattgggttgcttgaaatcaggtcttgttaaagaagctttgaacacaatagatatgggaaagaaggaagtcgtcactaaaaaggtgaggagttcaacaccatggttggagaccacacatctgttgcttgagaactttgcagaaattggagacttggaaaatgcaaagagactgtacagtgaactgaatgaatccaaatattctctgaattcctttgtgtataacaccctcctgaaagcttatgtgaaggcaaaagtttatgagccggatttgtcgaggacaatgattttgagaggggcaatgcctgacgctgagacatatagccttctcagactgattgaacaattcaagatctaatgctctatgtgtgttgttgctttgaaggaaaaccagtaaaccactgctggattttgtcatgcaaaaaccattagagatactgtggacagcgtgttgcattctggcaatcaaattttttttgcacagtaatcccaacttccgcactaatcaattggagatatgcagctatcttttctatcataaacaattttagaactgcaagatatacaattcttgtgcattccgaattttggaaatgttcctttttctcatgcagaaggcacccaaacaataaaggaggccaattgtcttttatcatgccacaaagaggtgatagaaatggtgaatatttaattgtgttgctactggtaagtctttgcagatccttgctcctgcgacacttctaaggtgctaggctgctagctatacttatgagaaaacagtagaagcatcctccacacaagctttgccagaaccaagctgaataaacacaagtgctattctctggttgcagaactgaacagaactccattctgccttttgcctatacacaaatcaaatatgctcaaatcatccacgcggaagggtagtgaatggaatcggaaccaacacaaagcaaatttcaccgatgatgtgaacttgccaaccataccaaataatttgccgttgagcttgacaattccctttgctgttgagcttgtttcttgagcagatactgttcagctgcgaggataaaggaacctggaaatttccgtggagaaggctccaacttttttttttctacctcatcaattagtttaactacattgggattcaggttagaagtctacatactggttaagtgctcatccgggtacaacatcgtgttttttttctttgaacttctgttgctcttttagagcttgtagtttgatcttgtggaccttctacatctgcttgctttataaataattctgcaccaagctgttcttgttctccagtagtgagatggttttccgtaagaaaatgtgaacagctagtgggtcacaaagaatgccatcagcattatcatgaggctgtgtggtgggtgcagtgtttctgaatgttcaggttggcaaatggcatacgaatggaaaatgccccactgatttgatcaactccatctgccatataaatctcttttgggctgattataggtgtgagtgctgcatgaaaggttctgctgaaattaggagcccttttctcttttttgagcctgacaccggttgtggcaattttatgtgctaataaatagccagtggcataacaaggcaacatggttttttttttggtatggttactcttgtgctgctcagtcacagcgacattagcaattggagcagaaacagagacccaagcagaagtcagtatagtgtttctacgctagaatagtttgctaacaggacacgcttacaatgatgaagtaatgtaactatgttggaaactcgggaatagcgacatcagataagttataatggcatatcagaacagaaacagaggctcaatcagaaaatatattcc

SEQ ID NO: 16433 - DNA, 2975 bp, Zea Mays
atgctgttgtggcgagtgctgctccggcaccggcggccgccgttccccgtccacgccgccggattcttcaccagctccggaagcaacaccactgcgcctcctcctgctggagcggaggggctccgcgacgagccgggggaggagggctccctggcgcggcgggtggagcgggcggcgtcggtcggcgcggccatgcggggctggatggcagacggccgcgccgtgcaccgtggccacgtattccacgccatcaaccgcctccgacgacaccgcctacaccgcaccgccctgcaggtgttctgctgatttctgtacttgttcacgatgtggtggaaagcttatttgaatggtggtcatggaatggatcgtgagagagaggccctacaagctgagtgagcttgattactcgtatctgctggagttcacagctaaagtccatggcatttctgaagccgaaagcctcttccttcgcgtgcctcaggaatgccggaaagagctcctctacaacaaccttgtcatggctgctttagatctgaatcacattaagcattcatacgcttacatgaggaagatgagagaattgtccctgccgatctcgccgtatgtttacaaccgcctgatcatccttcactcatcacccggtcgcaggaaaactatatccaagatcctttcccagatgaaagctgatcgtgtggtccctcacacgtcaacctacaacatcctattgaaaatacaagccaatgagcacaacattgatgggctagccagggtgttcaatggtatgaaaagagcaaagattgagcccaatgagatcacttatggcattctagccattgcacatgctgttgcaaggctatatactgtttgccatacatatgtagaagccattgagaattccatgacaggtactaattggtccacgctggaaattcttcttatcctgtatggataccttgggaaggaaaaggagctaaagaggacatgggagatcatgcaagacctccctcatattcgatccaaaagcttcacactagcaatcgaagcatttggaaaggttggctccattgaccaggcagaaaagatatggatccatataaaatcaacaaagaagttaagccttacagaacagtttaattctatgttatcagtttactgcaggcacggtgttgtcgataaagcatcatctgtattcaaggaaatgagagcaaatggatgccagcctaatgctattacttatcgccacttagcattgggttgcttgaaatcaggtcttgttaaagaagctttgaacacaatagatatgggaaagaaggaagtcgtcactaaaaaggtgaggagttcaacaccatggttggagaccacacatctgttgcttgagaactttgcagaaattggagacttggaaaatgcaaagagactgtacagtgaactgaatgaatccaaatattctctgaattcctttgtgtataacaccctcctgaaagcttatgtgaaggcaaaagtttatgagccggatttgtcgaggacaatgattttgagaggggcaatgcctgacgctgagacatatagccttctcagactgattgaacaattcaagatctaatgctctatgtgtgttgttgctttgaaggaaaaccagtaaaccactgctggattttgtcatgcaaaaaccattagagatactgtggacagcgtgttgcattctggcaatcaaattttttttgcacagtaatcccaacttccgcactaatcaattggagatatgcagctatcttttctatcataaacaattttagaactgcaagatatacaattcttgtgcattccgaattttggaaatgttcctttttctcatgcagaaggcacccaaacaataaaggaggccaattgtcttttatcatgccacaaagaggtgatagaaatggtgaatatttaattgtgttgctactgaactgaacagaactccattctgccttttgcctatacacaaatcaaatatgctcaaatcatccacgcggaagggtagtgaatggaatcggaaccaacacaaagcaaatttcaccgatgatgtgaacttgccaaccataccaaataatttgccgttgagcttgacaattccctttgctgttgagcttgtttcttgagcagatactgttcagctgcgaggataaaggaacctggaaatttccgtggagaaggctccaacttttttttttctacctcatcaattagtttaactacattgggattcaggttagaagtctacatactggttaagtgctcatccgggtacaacatcgtgttttttttctttgaacttctgttgctcttttagagcttgtagtttgatcttgtggaccttctacatctgcttgctttataaataattctgcaccaagctgttcttgttctccagtagtgagatggttttccgtaagaaaatgtgaacagctagtgggtcacaaagaatgccatcagcattatcatgaggctgtgtggtgggtgcagtgtttctgaatgttcaggttggcaaatggcatacgaatggaaaatgccccactgatttgatcaactccatctgccatataaatctcttttgggctgattataggtgtgagtgctgcatgaaaggttctgctgaaattaggagcccttttctcttttttgagcctgacaccggttgtggcaattttatgtgctaataaatagccagtggcataacaaggcaacatggttttttttttggtatggttactcttgtgctgctcagtcacagcgacattagcaattggagcagaaacagagacccaagcagaagtcagtatagtgtttctacgctagaatagtttgctaacaggacacgcttacaatgatgaagtaatgtaactatgttggaaactcgggaatagcgacatcagataagttataatggcatatcagaacagaaacagaggctcaatcagaaaatatattcc

SEQ ID NO: 16434 - DNA, 3217 bp, Zea Mays
ggtgcccccaccctgccgtactggggcctccgccctccgcctatctgcgaagccgcgatgctgttgtggcgagtgctgctccggcaccggcggccgccgttccccgtccacgccgccggattcttcaccagctccggaagcaacaccactgcgcctcctcctgctggagcggaggggctccgcgacgagccgggggaggagggctccctggcgcggcgggtggagcgggcggcgtcggtcggcgcggccatgcggggctggatggcagacggccgcgccgtgcaccgtggccacgtattccacgccatcaaccgcctccgacgacaccgcctacaccgcaccgccctgcaggtgttctgctgatttctgtacttgttcacgatgtggtggaaagcttatttgaatggtggtaattcacttcttagttagctcatcaccgtggaactaggtcatggaatggatcgtgagagagaggccctacaagctgagtgagcttgattactcgtatctgctggagttcacagctaaagtccatggcatttctgaagccgaaagcctcttccttcgcgtgcctcaggaatgccggaaagagctcctctacaacaaccttgtcatggctgctttagatctgaatcacattaagcattcatacgcttacatgaggaagatgagagaattgtccctgccgatctcgccgtatgtttacaaccgcctgatcatccttcactcatcacccggtcgcaggaaaactatatccaagatcctttcccagatgaaagctgatcgtgtggtccctcacacgtcaacctacaacatcctattgaaaatacaagccaatgagcacaacattgatgggctagccagggtgttcaatggtatgaaaagagcaaagattgagcccaatgagatcacttatggcattctagccattgcacatgctgttgcaaggctatatactgtttgccatacatatgtagaagccattgagaattccatgacaggtactaattggtccacgctggaaattcttcttatcctgtatggataccttgggaaggaaaaggagctaaagaggacatgggagatcatgcaagacctccctcatattcgatccaaaagcttcacactagcaatcgaagcatttggaaaggttggctccattgaccaggcagaaaagatatggatccatataaaatcaacaaagaagttaagccttacagaacagtttaattctatgttatcagtttactgcaggcacggtgttgtcgataaagcatcatctgtattcaaggaaatgagagcaaatggatgccagcctaatgctattacttatcgccacttagcattgggttgcttgaaatcaggtcttgttaaagaagctttgaacacaatagatatgggaaagaaggaagtcgtcactaaaaaggtgaggagttcaacaccatggttggagaccacacatctgttgcttgagaactttgcagaaattggagacttggaaaatgcaaagagactgtacagtgaactgaatgaatccaaatattctctgaattcctttgtgtataacaccctcctgaaagcttatgtgaaggcaaaagtttatgagccggatttgtcgaggacaatgattttgagaggggcaatgcctgacgctgagacatatagccttctcagactgattgaacaattcaagatctaatgctctatgtgtgttgttgctttgaaggaaaaccagtaaaccactgctggattttgtcatgcaaaaaccattagagatactgtggacagcgtgttgcattctggcaatcaaattttttttgcacagtaatcccaacttccgcactaatcaattggagatatgcagctatcttttctatcataaacaattttagaactgcaagatatacaattcttgtgcattccgaattttggaaatgttcctttttctcatgcagaaggcacccaaacaataaaggaggccaattgtcttttatcatgccacaaagaggtgatagaaatggtgaatatttaattgtgttgctactggtaagtctttgcagatccttgctcctgcgacacttctaaggtgctaggctgctagctatacttatgagaaaacagtagaagcatcctccacacaagctttgccagaaccaagctgaataaacacaagtgctattctctggttgcagaactgaacagaactccattctgccttttgcctatacacaaatcaaatatgctcaaatcatccacgcggaagggtagtgaatggaatcggaaccaacacaaagcaaatttcaccgatgatgtgaacttgccaaccataccaaataatttgccgttgagcttgacaattccctttgctgttgagcttgtttcttgagcagatactgttcagctgcgaggataaaggaacctggaaatttccgtggagaaggctccaacttttttttttctacctcatcaattagtttaactacattgggattcaggttagaagtctacatactggttaagtgctcatccgggtacaacatcgtgttttttttctttgaacttctgttgctcttttagagcttgtagtttgatcttgtggaccttctacatctgcttgctttataaataattctgcaccaagctgttcttgttctccagtagtgagatggttttccgtaagaaaatgtgaacagctagtgggtcacaaagaatgccatcagcattatcatgaggctgtgtggtgggtgcagtgtttctgaatgttcaggttggcaaatggcatacgaatggaaaatgccccactgatttgatcaactccatctgccatataaatctcttttgggctgattataggtgtgagtgctgcatgaaaggttctgctgaaattaggagcccttttctcttttttgagcctgacaccggttgtggcaattttatgtgctaataaatagccagtggcataacaaggcaacatggttttttttttggtatggttactcttgtgctgctcagtcacagcgacattagcaattggagcagaaacagagacccaagcagaagtcagtatagtgtttctacgctagaatagtttgctaacaggacacgcttacaatgatgaagtaatgtaactatgttggaaactcgggaatagcgacatcagataagttataatggcatatcagaacagaaacagaggctcaatcagaaaatatattcc

SEQ ID NO: 16435 - DNA, 3185 bp, Zea Mays
ctgatgggctcgaccgatagaagttgggccacgactccggcgctcagcgttaggtgagtgagacaggtgcccccaccctgccgtactggggcctccgccctccgcctatctgcgaagccgcgatgctgttgtggcgagtgctgctccggcaccggcggccgccgttccccgtccacgccgccggattcttcaccagctccggaagcaacaccactgcgcctcctcctgctggagcggaggggctccgcgacgagccgggggaggagggctccctggcgcggcgggtggagcgggcggcgtcggtcggcgcggccatgcggggctggatggcagacggccgcgccgtgcaccgtggccacgtattccacgccatcaaccgcctccgacgacaccgcctacaccgcaccgccctgcaggtcatggaatggatcgtgagagagaggccctacaagctgagtgagcttgattactcgtatctgctggagttcacagctaaagtccatggcatttctgaagccgaaagcctcttccttcgcgtgcctcaggaatgccggaaagagctcctctacaacaaccttgtcatggctgctttagatctgaatcacattaagcattcatacgcttacatgaggaagatgagagaattgtccctgccgatctcgccgtatgtttacaaccgcctgatcatccttcactcatcacccggtcgcaggaaaactatatccaagatcctttcccagatgaaagctgatcgtgtggtccctcacacgtcaacctacaacatcctattgaaaatacaagccaatgagcacaacattgatgggctagccagggtgttcaatggtatgaaaagagcaaagattgagcccaatgagatcacttatggcattctagccattgcacatgctgttgcaaggctatatactgtttgccatacatatgtagaagccattgagaattccatgacaggtactaattggtccacgctggaaattcttcttatcctgtatggataccttgggaaggaaaaggagctaaagaggacatgggagatcatgcaagacctccctcatattcgatccaaaagcttcacactagcaatcgaagcatttggaaaggttggctccattgaccaggcagaaaagatatggatccatataaaatcaacaaagaagttaagccttacagaacagtttaattctatgttatcagtttactgcaggcacggtgttgtcgataaagcatcatctgtattcaaggaaatgagagcaaatggatgccagcctaatgctattacttatcgccacttagcattgggttgcttgaaatcaggtcttgttaaagaagctttgaacacaatagatatgggaaagaaggaagtcgtcactaaaaaggtgaggagttcaacaccatggttggagaccacacatctgttgcttgagaactttgcagaaattggagacttggaaaatgcaaagagactgtacagtgaactgaatgaatccaaatattctctgaattcctttgtgtataacaccctcctgaaagcttatgtgaaggcaaaagtttatgagccggatttgtcgaggacaatgattttgagaggggcaatgcctgacgctgagacatatagccttctcagactgattgaacaattcaagatctaatgctctatgtgtgttgttgctttgaaggaaaaccagtaaaccactgctggattttgtcatgcaaaaaccattagagatactgtggacagcgtgttgcattctggcaatcaaattttttttgcacagtaatcccaacttccgcactaatcaattggagatatgcagctatcttttctatcataaacaattttagaactgcaagatatacaattcttgtgcattccgaattttggaaatgttcctttttctcatgcagaaggcacccaaacaataaaggaggccaattgtcttttatcatgccacaaagaggtgatagaaatggtgaatatttaattgtgttgctactggtaagtctttgcagatccttgctcctgcgacacttctaaggtgctaggctgctagctatacttatgagaaaacagtagaagcatcctccacacaagctttgccagaaccaagctgaataaacacaagtgctattctctggttgcagaactgaacagaactccattctgccttttgcctatacacaaatcaaatatgctcaaatcatccacgcggaagggtagtgaatggaatcggaaccaacacaaagcaaatttcaccgatgatgtgaacttgccaaccataccaaataatttgccgttgagcttgacaattccctttgctgttgagcttgtttcttgagcagatactgttcagctgcgaggataaaggaacctggaaatttccgtggagaaggctccaacttttttttttctacctcatcaattagtttaactacattgggattcaggttagaagtctacatactggttaagtgctcatccgggtacaacatcgtgttttttttctttgaacttctgttgctcttttagagcttgtagtttgatcttgtggaccttctacatctgcttgctttataaataattctgcaccaagctgttcttgttctccagtagtgagatggttttccgtaagaaaatgtgaacagctagtgggtcacaaagaatgccatcagcattatcatgaggctgtgtggtgggtgcagtgtttctgaatgttcaggttggcaaatggcatacgaatggaaaatgccccactgatttgatcaactccatctgccatataaatctcttttgggctgattataggtgtgagtgctgcatgaaaggttctgctgaaattaggagcccttttctcttttttgagcctgacaccggttgtggcaattttatgtgctaataaatagccagtggcataacaaggcaacatggttttttttttggtatggttactcttgtgctgctcagtcacagcgacattagcaattggagcagaaacagagacccaagcagaagtcagtatagtgtttctacgctagaatagtttgctaacaggacacgcttacaatgatgaagtaatgtaactatgttggaaactcgggaatagcgacatcagataagttataatggcatatcagaacagaaacagaggctcaatcagaaaatatattcc

SEQ ID NO: 16436 - DNA, 4481 bp, Zea Mays
agcgagagaagttctcggagagagaaactaagcgagcgagataaaagaagcgaaacgcgggcagctgttgctgaggcgtggagacggaggcggcggcgcggccgaaccctagccgacggcggcgcgtttgaggcgggaccctctgcaggcgacgcctggcggccggattcgagctgccggcgtcggcagcttcagatcggcggtcgcgccgacggaatcggcggggatcccggcgggatgggcgcggcgaggcccgtgctctggtcgtgagtttgcttggttcgtgggttctggctctgggctcccgagcaaggttttgagctcggtgtagccgcttgcttgctgagttgctgctgtcgctttttgggcggtttgaagcgggtttttgcggggggtttgggagggatctgccgggaaggcccgaggtttaggccggtttttgagagctggaggctccggccgggatcgggggagccatgtcgtctcttagcagggagctggttttcctcatcctgcagttcctcgacgaggagaagttcaaagagacggtccacaagttggagcaggagtcgggcttctacttcaacatgaagcacttcgaggacctcgtgcagggcggcgagtgggacgaggtggagaagtacctcagcggcttcaccaaggtggaggacaaccgctactccatgaagatcttctttgagatccgcaagcaaaagtacctcgaggcccttgataggcatgacagagccaaggctgtggagattctcgtgaaggatcttaaggtattcgcctccttcaatgaggagctgttcaaggagataacgcagctgctgaccttggagaatttcaggcaaaatgagcagctgtccaagtatggggacacaaagtcagcccggaatatcatgcttttggagctcaaaaagctcattgaagcaaaccctctgttccgggacaagctgaatttcccaccattcaaagcttccagacttcgcacattgatcaatcaaagtctgaactggcaacatcagctttgcaagaaccccagaccaaaccctgacatcaagacactcttcactgatcactcttgtgctgctcctaccaatggagcaagagcacctccacctgccaatggtccacttggatccatccctaagtcagctggatttccaccaatgggtgctcatgctccatttcaacctgtggtgtcgccatctccaaacgcaattgcaggttggatgacaaatgccaacccctctttgcctcatgctgctgttgcacaagggccacctggtctcgttcaggctccaaacacagcggcatttctaaagcatcctagaacccctacaagtgcacctggtattgattaccaatctgcagattcagaacatctcatgaaaagaatgcgggttggacaaccagatgaggtatctttctctggtgcaagccatcctgccaatatgtacacacaagaagaccttcccaaacaagtttctcgtacccttaatcagggttctaatgttatgagcctggatttccaccccgttcaacaaaccattcttttagtttcctgacctaaacagttggaacaaatgttggtgacattgcggtgtgggaagttggttcacgggaaaggatagctcacaagactttcaaagtttgggatattggttcctgtaccttgcctttgcaggcttcgctgatgaaagatgctgcagtatctgtcaatagatgtctgtggagccctgatggaactattctaggtgttgctttctcgaagcatattgttcagacatatacttttgtacctaatggagatttacggcagcaagcagagattgacgcacacatcggtggggttaatgatatagccttctctcaccctaataaaactctatctatcatcacatgtggtgatgataaactcatcaaggtgtgggatgctcaaacaggacagaagcagtacacatttgaaggacatgaagctcctgtgtattctgtatgccctcactacaaggagtccattcagtttatcttctctactgccattgatggaaaaatcaaggcatggttgtatgattgcttgggctcaagagttgactatgatgctcctggacattggtgtactaccatggcttacagtgctgatgggacaagattattctcttgtggtactagtaaagaaggtgattcacacttggttgagtggaatgaaactgaaggggcaattaagaggacatacaatggcttcaggaaacgttcactcggtgttgttcagtttgacacaactaggaatcgcttcttggctgctggagatgaatttcttgttaaattctgggatatggataacaataacatactaacaacaacagactgtgacggtggactgccagcaagccctcgtttgagattcaatagagaaggttcattacttgcagttaccacaagtgataatggaataaaaatacttgccaacactgatggacaacgcttgcttaggatgcttgagagtagagcatttgagggctctagaggacctcctcaacaaataaacaccaagcctccaattgtcgcccttggtcctgtttcaaatgtcagcagtcctatagcagtaaatgccgagcgacctgatcggatcttgcctgcagtgtcgacaagtggcttggcacctatggatgctagcagaactccagatgttaagccaagaataacagatgaatccgaaaaggtcaaaacctggaagttggctgacattgttgataatggacatcttcgagctctgcatttgacagacacagacactaatccaagcaaaattgtccgtttgttatatacaaataatggggttgcactcttggctcttggctccaatgctgttcataagttgtggaaatggcaacggagcgacagaaatcctagcggcaagtctactgcatctgttgcacctcacctgtggcaacctgcaaatgggattctgatgacaaatgacacgaatgatggcaacccagaagaagcaaccgcctgcattgcattgtccaaaaatgactcctatgttatgtctgcatctggtggcaaagtctcgttgttcaatatgatgacatttaaggtcatgactactttcatggcacctccacctgctgcaactttccttgcattccacccacaagataataatatcatcgccattggaatggaggactctaccatccaaatctacaatgtccgcattgatgatgtcaaaagtaagctcaagggacatcagaagaagattacggggctggccttttctcaatcaatgaatgtgctagtatcatcaggtgctgatgctcagctatgtgtgtggagtattgatggctgggaaaaaaagaaatcaagatatatccaacccccagcaaaccgacctggcactttggttggtgacacaagggtgcagtttcacaatgaccaaacacatcttttggtcgtccatgagagccagttgggaatctatgatgggaatcttgactgtttgcgcttgtggtctccaagagatgcactcccagctccgatatcgagtgcgatatactcgtgcgacggtctcttggtttacgctgggttctgcgatggtgctatcggagtcttcgaagcagaatctcttaggctgcgctgccggattgctccttccgcttacattccaccttcaatactagcctgtgctggacgggtctacccgttggtagtcgctgcgcaccccatggagcctaaccagatcgcgatcggcatgagcgacggcaaggtccatgtggtggagccattagacggggacccgaagtggggatcggcacctccacaggacaatggagcgcacccgcacccgcatccagcgatatcagcggcaccgtcgaccgccaccaaccaggcatctgatcagccaacaaggtgactctggcctgcagcactggaggagattcgttagcgcagagactggtaggacctgtaggagatagggagaaagggtaaacgattagatgacgagaggatgatgctatatttatcaagtccgcagcgcctctcttgtggtggcccgcgacacaggtggggtgattgacagtgacatcgctcgctctaagttaggttttggttcttccctggcccccggaaatcatcacctggcgccgccacattcgaatggagatggatctgctggcatcatcttgcttcctcttttgtaaagcttttcctgctgagtttagtggtaccttagattgtcgtccatttctgccctgttctccgggcagctatttgtagtgtaaaaatatggtggcgtgctggatggtgttatttatgcgtgcgtggcctgtcatgacgaattccaccatgtttggggctatttgatggatgtttactgatcatggctcgaattttttttttcttcgtgccatttgcaattgtagaccgtggacgcggtgtgagttgatgagatttgctggtgagctgtttctgga

SEQ ID NO: 16437 - DNA, 4474 bp, Zea Mays
agaaaacagagagcgagagaagttctcggagagagaaactaagcgagcgagataaaagaagcgaaacgcgggcagctgttgctgaggcgtggagacggaggcggcggcgcggccgaaccctagccgacggcggcgcgtttgaggcgggaccctctgcaggcgacgcctggcggccggattcgagctgccggcgtcggcagcttcagatcggcggtcgcgccgacggaatcggcggggatcccggcgggatgggcgcggcgaggcccgtgctctggtcgtgagtttgcttggttcgtgggttctggctctgggctcccgagcaaggttttgagctcggtgtagccgcttgcttgctgagttgctgctgtcgctttttgggcggtttgaagcgggtttttgcggggggtttgggagggatctgccgggaaggcccgaggtttaggccggtttttgagagctggaggctccggccgggatcgggggagccatgtcgtctcttagcagggagctggttttcctcatcctgcagttcctcgacgaggagaagttcaaagagacggtccacaagttggagcaggagtcgggcttctacttcaacatgaagcacttcgaggacctcgtgcagggcggcgagtgggacgaggtggagaagtacctcagcggcttcaccaaggtggaggacaaccgctactccatgaagatcttctttgagatccgcaagcaaaagtacctcgaggcccttgataggcatgacagagccaaggctgtggagattctcgtgaaggatcttaaggtattcgcctccttcaatgaggagctgttcaaggagataacgcagctgctgaccttggagaatttcaggcaaaatgagcagctgtccaagtatggggacacaaagtcagcccggaatatcatgcttttggagctcaaaaagctcattgaagcaaaccctctgttccgggacaagctgaatttcccaccattcaaagcttccagacttcgcacattgatcaatcaaatctgaactggcaacatcagctttgcaagaaccccagaccaaaccctgacatcaagacactcttcactgatcactcttgtgctgctcctaccaatggagcaagagcacctccacctgccaatggtccacttggatccatccctaagtcagctggatttccaccaatgggtgctcatgctccatttcaacctgtggtgtcgccatctccaaacgcaattgcaggttggatgacaaatgccaacccctctttgcctcatgctgctgttgcacaagggccacctggtctcgttcaggctccaaacacagcggcatttctaaagcatcctagaacccctacaagtgcacctggtattgattaccaatctgcagattcagaacatctcatgaaaagaatgcgggttggacaaccagatgaggtatctttctctggtgcaagccatcctgccaatatgtacacacaagaagaccttcccaaacaagtttctcgtacccttaatcagggttctaatgttatgagcctggatttccaccccgttcaacaaaccattcttttagttggaacaaatgttggtgacattgcggtgtgggaagttggttcacgggaaaggatagctcacaagactttcaaagtttgggatattggttcctgtaccttgcctttgcaggcttcgctgatgaaagatgctgcagtatctgtcaatagatgtctgtggagccctgatggaactattctaggtgttgctttctcgaagcatattgttcagacatatacttttgtacctaatggagatttacggcagcaagcagagattgacgcacacatcggtggggttaatgatatagccttctctcaccctaataaaactctatctatcatcacatgtggtgatgataaactcatcaaggtgtgggatgctcaaacaggacagaagcagtacacatttgaaggacatgaagctcctgtgtattctgtatgccctcactacaaggagtccattcagtttatcttctctactgccattgatggaaaaatcaaggcatggttgtatgattgcttgggctcaagagttgactatgatgctcctggacattggtgtactaccatggcttacagtgctgatgggacaagattattctcttgtggtactagtaaagaaggtgattcacacttggttgagtggaatgaaactgaaggggcaattaagaggacatacaatggcttcaggaaacgttcactcggtgttgttcagtttgacacaactaggaatcgcttcttggctgctggagatgaatttcttgttaaattctgggatatggataacaataacatactaacaacaacagactgtgacggtggactgccagcaagccctcgtttgagattcaatagagaaggttcattacttgcagttaccacaagtgataatggaataaaaatacttgccaacactgatggacaacgcttgcttaggatgcttgagagtagagcatttgagggctctagaggacctcctcaacaaataaacaccaagcctccaattgtcgcccttggtcctgtttcaaatgtcagcagtcctatagcagtaaatgccgagcgacctgatcggatcttgcctgcagtgtcgacaagtggcttggcacctatggatgctagcagaactccagatgttaagccaagaataacagatgaatccgaaaaggtcaaaacctggaagttggctgacattgttgataatggacatcttcgagctctgcatttgacagacacagacactaatccaagcaaaattgtccgtttgttatatacaaataatggggttgcactcttggctcttggctccaatgctgttcataagttgtggaaatggcaacggagcgacagaaatcctagcggcaagtctactgcatctgttgcacctcacctgtggcaacctgcaaatgggattctgatgacaaatgacacgaatgatggcaacccagaagaagcaaccgcctgcattgcattgtccaaaaatgactcctatgttatgtctgcatctggtggcaaagtctcgttgttcaatatgatgacatttaaggtcatgactactttcatggcacctccacctgctgcaactttccttgcattccacccacaagataataatatcatcgccattggaatggaggactctaccatccaaatctacaatgtccgcattgatgatgtcaaaagtaagctcaagggacatcagaagaagattacggggctggccttttctcaatcaatgaatgtgctagtatcatcaggtgctgatgctcagctatgtgtgtggagtattgatggctgggaaaaaaagaaatcaagatatatccaacccccagcaaaccgacctggcactttggttggtgacacaagggtgcagtttcacaatgaccaaacacatcttttggtcgtccatgagagccagttgggaatctatgatgggaatcttgactgtttgcgcttgtggtctccaagagatgcactcccagctccgatatcgagtgcgatatactcgtgcgacggtctcttggtttacgctgggttctgcgatggtgctatcggagtcttcgaagcagaatctcttaggctgcgctgccggattgctccttccgcttacattccaccttcaatactagcctgtgctggacgggtctacccgttggtagtcgctgcgcaccccatggagcctaaccagatcgcgatcggcatgagcgacggcaaggtccatgtggtggagccattagacggggacccgaagtggggatcggcacctccacaggacaatggagcgcacccgcacccgcatccagcgatatcagcggcaccgtcgaccgccaccaaccaggcatctgatcagccaacaaggtgactctggcctgcagcactggaggagattcgttagcgcagagactggtaggacctgtaggagatagggagaaagggtaaacgattagatgacgagaggatgatgctatatttatcaagtccgcagcgcctctcttgtggtggcccgcgacacaggtggggtgattgacagtgacatcgctcgctctaagttaggttttggttcttccctggcccccggaaatcatcacctggcgccgccacattcgaatggagatggatctgctggcatcatcttgcttcctcttttgtaaagcttttcctgctgagtttagtggtaccttagattgtcgtccatttctgccctgttctccgggcagctatttgtagtgtaaaaatatggtggcgtgctggatggtgttatttatgcgtgcgtggcctgtcatgacgaattccaccatgtttggggctatttgatggatgtttactgatcatggctcgaattttttttttcttcgtgccatttgcaattgtagaccgtggacgcggtgtgagttgatgagatttgctggtgagctgtttctgga

SEQ ID NO: 16438 - DNA, 3371 bp, Zea Mays
agcgagagaagttctcggagagagaaactaagcgagcgagataaaagaagcgaaacgcgggcagctgttgctgaggcgtggagacggaggcggcggcgcggccgaaccctagccgacggcggcgcgtttgaggcgggaccctctgcaggcgacgcctggcggccggattcgagctgccggcgtcggcagcttcagatcggcggtcgcgccgacggaatcggcggggatcccggcgggatgggcgcggcgaggcccgtgctctggtcgtgagtttgcttggttcgtgggttctggctctgggctcccgagcaaggttttgagctcggtgtagccgcttgcttgctgagttgctgctgtcgctttttgggcggtttgaagcgggtttttgcggggggtttgggagggatctgccgggaaggcccgaggtttaggccggtttttgagagctggaggctccggccgggatcgggggagccatgtcgtctcttagcagggagctggttttcctcatcctgcagttcctcgacgaggagaagttcaaagagacggtccacaagttggagcaggagtcgggcttctacttcaacatgaagcacttcgaggacctcgtgcagggcggcgagtgggacgaggtggagaagtacctcagcggcttcaccaaggtggaggacaaccgctactccatgaagatcttctttgagatccgcaagcaaaagtacctcgaggcccttgataggcatgacagagccaaggctgtggagattctcgtgaaggatcttaaggtattcgcctccttcaatgaggagctgttcaaggagataacgcagctgctgaccttggagaatttcaggcaaaatgagcagctgtccaagtatggggacacaaagtcagcccggaatatcatgcttttggagctcaaaaagctcattgaagcaaaccctctgttccgggacaagctgaatttcccaccattcaaagcttccagacttcgcacattgatcaatcaaagtctgaactggcaacatcagctttgcaagaaccccagaccaaaccctgacatcaagacactcttcactgatcactcttgtgctgctcctaccaatggagcaagagcacctccacctgccaatggtccacttggatccatccctaagtcagctggatttccaccaatgggtgctcatgctccatttcaacctgtggtgtcgccatctccaaacgcaattgcaggttggatgacaaatgccaacccctctttgcctcatgctgctgttgcacaagggccacctggtctcgttcaggctccaaacacagcggcatttctaaagcatcctagaacccctacaagtgcacctggtattgattaccaatctgcagattcagaacatctcatgaaaagaatgcgggttggacaaccagatgaggtatctttctctggtgcaagccatcctgccaatatgtacacacaagaagaccttcccaaacaagtttctcgtacccttaatcagggttctaatgttatgagcctggatttccaccccgttcaacaaaccattcttttagttggaacaaatgttggtgacattgcggtgtgggaagttggttcacgggaaaggatagctcacaagactttcaaagtttgggatattggttcctgtaccttgcctttgcaggcttcgctgatgaaagatgctgcagtatctgtcaatagatgtctgtggagccctgatggaactattctaggtgttgctttctcgaagcatattgttcagacatatacttttgtacctaatggagatttacggcagcaagcagagattgacgcacacatcggtggggttaatgatatagccttctctcaccctaataaaactctatctatcatcacatgtggtgatgataaactcatcaaggtgtgggatgctcaaacaggacagaagcagtacacatttgaaggacatgaagctcctgtgtattctgtatgccctcactacaaggagtccattcagtttatcttctctactgccattgatggaaaaatcaaggcatggttgtatgattgcttgggctcaagagttgactatgatgctcctggacattggtgtactaccatggcttacagtgctgatgggacaagattattctcttgtggtactagtaaagaaggtgattcacacttggttgagtggaatgaaactgaaggggcaattaagaggacatacaatggcttcaggaaacgttcactcggtgttgttcagtttgacacaactaggaatcgcttcttggctgctggagatgaatttcttgttaaattctgggatatggataacaataacatactaacaacaacagactgtgacggtggactgccagcaagccctcgtttgagattcaatagagaaggttcattacttgcagttaccacaagtgataatggaataaaaatacttgccaacactgatggacaacgcttgcttaggatgcttgagagtagagcatttgagggctctagaggacctcctcaacaaataaacaccaagcctccaattgtcgcccttggtcctgtttcaaatgtcagcagtcctatagcagtaaatgccgagcgacctgatcggatcttgcctgcagtgtcgacaagtggcttggcacctatggatgctagcagaactccagatgttaagccaagaataacagatgaatccgaaaaggtcaaaacctggaagttggctgacattgttgataatggacatcttcgagctctgcatttgacagacacagacactaatccaagcaaaattgtccgtttgttatatacaaataatggggttgcactcttggctcttggctccaatgctgttcataagttgtggaaatggcaacggagcgacagaaatcctagcggcaagtctactgcatctgttgcacctcacctgtggcaacctgcaaatgggattctgatgacaaatgacacgaatgatggcaacccagaagaagcaaccgcctgcattgcattgtccaaaaatgactcctatgttatgtctgcatctggtggcaaagtctcgttgttcaatatgatgacatttaaggtcatgactactttcatggcacctccacctgctgcaactttccttgcattccacccacaagataataatatcatcgccattggaatggaggactctaccatccaaatctacaatgtccgcattgatgatgtcaaaagtaagctcaagggacatcagaagaagattacggggctggccttttctcaatcaatgaatgtgctagtatcatcaggtgctgatgctcagtcactctgacaagaatgtatctgtctttctctgggtaattgatttcttgtgcaaattctg

SEQ ID NO: 16439 - DNA, 606 bp, Zea Mays
atggatcctcttgatgagttcttcgaatcatcgtctgacgatgatgttgaagatatcgagttagtattgctttcgtcaacggtgcaaatcgtatcaaggaagtttgcaacttcaaggatgaggcactccgcaatgtctcagcgtgtcatccatcgtgatcaccgtgctggtgaatacctcatcaagcaccactactttggagacaacacggtgtcccctggtaaccctgctcacgtctttcgtcggaggggagttgtcgtaaggacatcaagagggcattcagagtgttacaggcacgatgggcagtgttgcgtggtcccgaggatggatgggatcgagataaccttgaagaaacaatgacagtgtgtatcataatgcataacatgatcgtggaggacgaaggggatcaagtaactaatgtggatttcgcaaacatcggcattccagctgacctttcatcaagtgttctagaagttcacaacgactagcttacaaaccacctggtcgtcgagaacatcgacataactcgcagaggcatgtacacaacattgaaacacggtcttgtcaagcagcatttggtgaggaaggtatcaatgtcttgattac

SEQ ID NO: 16440 - DNA, 2466 bp, Zea Mays
gcggaatttagaaatcgcgagttgcctgaagtcaaaaggagaaacacggccggctccttccatagatccaagagatttctccattcccaagctgcttgaccagacaaaccataaaaactattgaactttcaatacatctcctcccgtgtccggttcttcctcccaaaatctgcccgagcttctttgcccagcagatccccggcagttgcatccccaagcgcccctccccagtcgacggttctcacccaattccgccgccccatcgacgggttcgcaccaaatcagccgcccccgcagcggtgcgggagcggcgccgtttggacgctttcccgctgaaatctcccgacagtgtctcgtcattttgacgcctgagctttatccgggtggaaagtttggatcttggtgcttgcggagatggcgagtacgggggcgggtgctgttcttgctgtggtagttttggcttgtgcactgggagccagagctgatggctctgatcataagtacaaggaaggggatcatgttcctctctacgccaacaaggtcgggcctttccacaatccaagtgagacgtatcggtactatgatctacccttttgtgcaccagaacatccaaaggacaaaaaggaagctcttggcgaggttctaaatggcgaccggttggttgatgccccatacgagttgaacttcaaggaagacaggaactccaaggttctctgcaagaaagtgttgtcgaaggagcaagttgccaagctccgggatgcagtcgccaaggattactacttccagatgtactacgatgatttgccactatggggattcctcggtaaactggacaaggacaaggagcaaggagacgtgaaatacctactgttcaagcacatccacttcgacatcatgtacaacgacaaccgcgtcatagaaatcaatgtacagaccgatccaaatgtggccgtggatatcacggaggacaaggaagtgccgatagagttctcttattcggcgacatggaaaaagacagacattcctttcgagaaaagaatggataagtactccaagtcttcctctatgccacaacacctagagatccactggttttctataatcaactcgtgcgtcacagtgctcctcctgaccggtttcctggccaccatcttgatgcgtgttctcaagaacgacttcatcaagtattctcatgaagacgagtcccttgaagaccaagaggagactgggtggaagtacattcacggtgatgtattccgtttccccaaacagaagtccgtttttgcagcaattattggttctggaactcagcttctcgcccttgcgattttcatcttcctcctcgctcttgtcggcgtcttctacccatacaaccggggagctctcttcactgccctcgttgtcatctacgctctcacgtccggtatcgctggatacacagccacttctttctatctgcaactggagggcacaaactggtcgcaatagcgtacagcgccacggcagccctgcctttcggcaccatcatcgtcatcatcctcatctgggcgctcgtgacctctcctctcctcgtgctgggcggcatagccgggaagaacagcgacactgagttccaagccccctgccgcacgaccaagtacccgagggagatcccccagctcccgtggtaccgcagcaccgtccctcagatggccatggcggggttcctcccgttcagcgcgatctacatcgagctgtactacatcttcgcgagcatctgggggcacaagatttacaccatctacagcatcctcttcatcgtgttcatcatcctcatcatcgtcacggccttcgtcacggtggcgctcacctacttccagctcgccgtcgaagaccaccagtggtggtggagatctgtcctgtgcggaggctcgacaggcatattcatattcttctactgcatctactactaccacgcgcggtcggacatgtcggggttcatgcagacgtccttcttcttcggctacatgacctgcgtgtgctacggcttcttcctcatgctgggaacggtcggcttccgcgcgtcgctcttcttcgtgcgccacatctaccgctccatcaagtgcgagtaagcgccggacgtgcgcacgcggtctggcatgctcatggctgttgttccgggtggcttgggatccaattgcagaaaccgtcaccagttgggttgtgcatgaatttatatgctgaagcgccagcagttgccctcagtatggacctcttcgcctttagcctttatatatatacgttggagctcccggagaggaggatctatgtagtgtaggactgtcgccagaggcagtgtctgtattattatctagtacacttgtagtggagccagtgtcaaccttcaattatgttgctgaaacctgtgtgttgctcagtagtgcataccatgcacagtttcttttgtttattaggttggcgtccatg

SEQ ID NO: 16441 - DNA, 2697 bp, Zea Mays
agcacctgcagtttttttttacagtgggttaactttgtgatggtaaatgtgtaataagtagttaattaattactcgtctcctacagtactttgtgaaagtgaaactgaaactgacggttaataattagtaaaactgtcaaccaagtggtgattttattaactatatatataatggaggtgggtagaggtagagcagagtaaattatccggggaatcaatgattgagggcgaccgaagaaaggccacagcacagcacagctgcacagcacagcccctaatcaggaatccaccagtggccaattgaattgggggcttaaaggcgattctgtggtggtgtcgggggggaaaggaccaccccaaccacctcgtcacactagggttcaatgggacagtgcgtgtggtcttcttgctgctggatggctctgtctgtgtctgggcaattcagtgtacgcgcgcggcggtggttgcgctctccaccatcagccggccgcgtccattccgtcaaatcccctggaaaaccacccctcatctactaaccgatttcggccacactgcattcatacatacccatgcaaaaaatctggctatctagggacgtactagtactagtaatgtaataatttatttaatggcgcaaattaagcaattgaagagaagaaaaaagactgaccagtacgatgccggcgtggtctcccttgcggtggttctcggagggctcaacccatgtgccctcccactgggtgccgtcggccatccaggttgccctgggctcgccgtccttgagccccctggcggcgttgtacgcgtcggacctctgcttgatgtcgtggtcgaggccgttgatgcgcgccttgaactcgtcgtagtccttgcgcacgcggcggcggtcgttgacgaagtcctcctgggagcggcccatgtaagggtgggacttgaggtcgaagtagctctcggggccgcgcggctcgatgccgtgcttgcggcagaagggcacccagacggtggcgaacttggcggcctccgccatggcctcgtaggtgagcagcatcccggagtcgtcggagaggtagcacgtgttgcgctccacggggtagtcggcggccaggatggacagcacggagttggccgtgctcaggatcggctccttgaacgggtccgccgtcgtcacgaacacgtccagccccggcagcagcgacgtccctccgccggcgcccccgcccgcgcggtcgaaccgctgccgcagcgccgccaggtccggcacgcggttgatcgggttcagcttcggcagctggtccagcagccacgagaagccgaaccagaactcgcccgcgatcgacgtcacccacagccacagcgcgtccgggttgcggtgcgagatgcgccagattacgaacagcgtgaacgcgatcagccggacgaagatcagcaccctgcagccaccccaaatccagtcgtgaataaattttgttttcacccacagttcactagtactttttttctatgacagattttaagtttaacaaattttttttgcaaatcatggtgaatggttatatgtaaataaaaaaatcatataaagcgcgagtggtgattgagcgagtgcgtgcacgcacgatgttgggtcgtgcaataattggaggggtccggccgtccgggttacgggaagaaggaacgtgcatcgtgtcggcgagcatgctatgcatatgtgcgctgccacccacaggcgtgtccgtccgtccgtccacccgcggcgaaaagcaccagcccaccaaccaatcatgtgagggcgaggaaacggagccgctggctggcgtggtgcgggtgtcagaggcagtcaatgcgcgtgagctggcacgacgccacgccaccgacacgcgggggaggagctcgtccgttccgtccactcatcagtcatcactcccatcccacgggcccgcggcgtgaaagcgccagcgcctgccagccaggcaaggcaaggcaaggccgccgctcggtgggccccgccccatgccccagagaggcagcgcggcattgatttgccaggaataacggtttctttacccccgccacatttctcctcttcgctttctgttttttttttcgcttctggaaacaacaggtctcttttgtttccacttggggggtccgtcacctacaagcctgggcccgctgcaatcatgctctcgtgtcaggggcccgcctggaataatttcctggcaagcttccctaccactcatgtctgtgtgtgtgtatgtatgctccggtagtagcccgatacggtgtggtgtgtgtgagggatgcacgcagtgctgctgtacagcgtggacttggaaagtacgtggtagtcctctacagccagagccaggtactgctacggtctgagctgtaaataggccgagatctaatcccctccgtctcgagctgtcaccatgccgaggcagaggctaatgtggagctaccactaccccagcttttccttcctctatctaacgagcctgtgcttttagagacgtgccggtccttttccctggatgcgcaagctccatgaaagctaggactagatgcaaccccgtaaaaaagaaagacagttgagccctctagaagaatccaatccaaacccccaaaggagggggctaccactaccccagctttttttctcccaaaagggcaattagtggacagacaacaataaggcac

SEQ ID NO: 16442 - DNA, 721 bp, Zea Mays
cctcccttgtttttctctctcgtcgtcgtctccctcttggtgccgtcgagtgcagtggtcgtctgcagtgccatggcagcagcaatctcgctgctccttccccatgcaatgcagagctcagcttcatctctccaatgcagcggtcgtctctctctctcactcgctctgtgtattgttgagtatgacagacagcaacgacgtacggctacagctgaagccggcacccaaaaggagatggactgatggaggaggaccgtgctggggtcaacacagattcaacgctccctgtatacgacacgacgtactcgtaggccgtagcccattcatcaatttgatggacacgagcagttggcatttacaaatactgtacgtgacgaagcatcatgcactgtctcaaaacgcatctagctttccgctgctgtctcctcttgtttgtcatgaggctccaagatcaccattatattactgccggccgttcagaacaaactgaagaatgcccattgcatgctgccacagctgggatataaatgtccgatccgatcagatcagttaacctcttgtaccgtatctatgtattgcatcatatcatgtcgtactggaaaacactctggacttgatcttaggattagtatctttatgtgtgtgtacgctgcatgccagctgatatatatcatcagtgtatgtgtgtgatcgtctgatgccactcctagcacgcagcgct

SEQ ID NO: 16443 - DNA, 651 bp, Zea Mays
ggccgcgcgaggaggggggaaagacggtcagaggctgcactgttcacggcggctctccgctgagatgcagcggtcgtctctctctctcactcgctctgtgtattgttgagtatgacagacagcaacgacgtacggctacagctgaagccggcacccaaaaggagatggactgatggaggaggaccgtgctggggtcaacacagattcaacgctccctgtatacgacacgacgtactcgtaggccgtagcccattcatcaatttgatggacacgagcagttggcatttacaaatactgtacgtgacgaagcatcatgcactgtctcaaaacgcatctagctttccgctgctgtctcctcttgtttgtcatgaggctccaagatcaccattatattactgccggccgttcagaacaaactgaagaatgcccattgcatgctgccacagctgggatataaatgtccgatccgatcagatcagttaacctcttgtaccgtatctatgtattgcatcatatcatgtcgtactggaaaacactctggacttgatcttaggattagtatctttatgtgtgtgtacgctgcatgccagctgatatatatcatcagtgtatgtgtgtgatcgtctgatgccactcctagcacgcagcgct

SEQ ID NO: 16444 - DNA, 599 bp, Zea Mays
gcggccgcgcgaggaggggggaaagacggtcagaggctgcactgttcacggcggctctccgctgagacagcaacgacgtacggctacagctgaagccggcacccaaaaggagatggactgatggaggaggaccgtgctggggtcaacacagattcaacgctccctgtatacgacacgacgtactcgtaggccgtagcccattcatcaatttgatggacacgagcagttggcatttacaaatactgtacgtgacgaagcatcatgcactgtctcaaaacgcatctagctttccgctgctgtctcctcttgtttgtcatgaggctccaagatcaccattatattactgccggccgttcagaacaaactgaagaatgcccattgcatgctgccacagctgggatataaatgtccgatccgatcagatcagttaacctcttgtaccgtatctatgtattgcatcatatcatgtcgtactggaaaacactctggacttgatcttaggattagtatctttatgtgtgtgtacgctgcatgccagctgatatatatcatcagtgtatgtgtgtgatcgtctgatgccactcctagcacgcagcgct

SEQ ID NO: 16445 - DNA, 1212 bp, Zea Mays
ccgccccctgccctgccattcaaactgtcatcttcttccagctctgtcgtcgtcgtccagtcatggggagagagagaaaagctagctagtagctagctaccctctgtctctgtgtccgccatgcccagcccaacagggtgttgctgctcagtgctcaggggcaacacccaagtcagttcttgagctcatggacgtgaaggatctcaccctggctcatgtcaagtctcacttgcagatgtacaggaccgtgaagaacaccgaaaggccggcagcttcgtcagatctagctgatgggttcgagaacgggtcggcaggcgagatctgcgacgacaactcgctcgatctgcacggcgccggcaggccagagtcgggggcggcgcggcatggaagggaagactggaccggctttcccagcgagtccaacaccgggcgcatgagcatgcattctcgatctctcaaggatcagacgatgcagtccaagagcctggagatcctctcggacatgaactcctcctgcgtgtcggagacgacgtcgtgtgccagcgagttgaacctggagttcaccctaggcccacgcatcaggcactagcgtgcaaagcgaccagaggacgatataatcggaggaggattagctataggctactatataagacggggtgctttgcattgcgtgcgtgcgtgttcatgggatcgtgttaagacggaggatgcactcatggtcccagagagagagaggcagcatatatgcatctttcatcgttaaaagaagctaggccatggacagacaccagcagcagcagcagccaggaaaaaggattaaaggtgtagcatcagcagcagctagctctagggtagtggtagtagtagtggtagagtgaggtgatcgttcgaaagctagctaaacacagatgcaatgtgtgtaatggatggagttgttgtgttagatcgagcgcgtttgcgtttaggatcggaccatctgtttaaagggcttttttcgcagcaacaatgcatgcatatgagcttgcatttgctaggggccgcaggagtacgtgcaaaggaaaaaagggcgggggtgacctgtgttgttgctttctcctgcatcagtcacatgcccttgagcgctccatttgcattttgagctcagcttttctttgtcgtgatgggataaggcgatcaccaaacccttgcaatatatgcttatttgaaggcgac

SEQ ID NO: 16446 - DNA, 1237 bp, Zea Mays
ccatgatccaagcaccaaccatccacctagcttcaattcagtattatgcaaagcatgaaacagaaatgtgttatgcaggataaaggactgcaaaagcatattaaatgtccacagctaatttaaggcagcacagaatgaaaactgcgacagagatacaatatgcccattagctggccctggagcagcacaaacacaaaccctcaaaaaggcaggtaactgggtaagtgataccttttgtactgacacccaatacttcactggctgaacataaatgaaaacttgacacaagggccaaaatttatgaaatatttacgaaaaattgcattacaacttgcagtaccacaatgcaccttccagtatgtagaaagctttaccagaccttgttttgctgccaccgaacccaacccagcataatgtccacaaatccaaaaagaaaaggcagatggaactacattcttatcaatgacacaccctcaatcagcaatcacaaactttgaaaattgaaaccaaccaaaccccaaaagaattatgtatatgctacaatgtctacacctaccagcatggttcactcataaaccataaaatatttttgtagcctcttgctaggctggggtggtggtgtgtcctgtgactgatatgtgtctatgttgtgtatgtttggtgtgtgtgtgtgtgtgctttttgtgagtctggtgtgttttttttttgtgttgtgttctgattgtcccaggcctcaggccttttttcctctactttaatataatgatacgcagccctactgcgtattcgagaaagaaaaaaataaaccataaacatctcacagcccaaaaatattccttctaggaattcatcagcgcattgagaatcatagcatatacttccaaccatacatgattgaaaaataattgacaaaacagtagttcaaatcagagatactgctacaaagtaactacataaaccagcatggtctactccagaaaccataaagatcttgtaaccccaacagatctttttttcctggcaattcattatcatgtcagaaatcagcataaacatccacaacacgacacaaaattaattcaatgaaacaacatttgaaattaagcaaccatttattgtcactaattatgaaacacggtcaataacccaacctattagacttaatatcaaggataataattaaggagtgcaatgaacaatgtttctaccaaaagttcactataatagagtatcatgc

SEQ ID NO: 16447 - DNA, 1078 bp, Zea Mays
cattaaccactgaccctgtatttcgtgtcacctagcgactccgacgagccccaatcccgcgcgccggtgaccatggagttcatcgacccctgggactcccagtcccgcgctcgcgtcgtccattccggcgccaactccacttcgttctcctcctccaccgccaaagcacccctctccctccgccacgccgcatcttgcgccgccgcggccgtcgcacttctcgccgccgcgttctacctcctcccgacctaccagatcctctcctccctcctcatatggatcgcttcgtccctgctcctcgcccccttcgcgcccttgtcggccactggcggcgacatctccgtcggccgaggccgcgtcgttccggctccagaaccggccccagaacccacaccggaacccacgcccgccccccgccgcggccgtcgccagaacccagtcccgacgcccacaaaaccctcagatccgggcactccccccgtccaatcggccgcatcactgcatccgttgcagaaggcgacaactgcggatggagccgtggtggacggcggcgagagggaggaggacgccggcgagtggactgaccaagagctggagctgctccggcggcagatggtgaagcacccggcgggtgagccccagcgctgggagaagatcgccgcggtgtttggcggccgccgcacgccggagaatgtcatccgggcggcaaagtcgggcgctcccgcggcgggaggaagctcgttcgagcagttcctacgcaagcggaagccgctcgatccgagggccgaggctgctgtcactgcggacgatgcgggaggcgccgagagtgcggacgccgcttggagcgccggggatgaccgggccttgctgaacgctcttaaggagttcccgaaggacactgcaatgaggtgggagaaggtggcggcctctgtacccgggaagacaaaggccgtgtgcatgaagaggatcaccgagctcaagcgagacttcaggagcaccaagacggcatcggaagcagcatcataggcgaaacctgataattttgaatccgcacaacgtggagacagctttcaaacta

SEQ ID NO: 16448 - DNA, 1706 bp, Zea Mays
caatctcacaaatcaaagaatcatagacacatgtgacataataataaaccgacaacatttgccgattgcaaaaatgcaagggaggaccattaaccactgaccctgtatttcgtgtcacctagcgactccgacgagccccaatcccgcgcgccggtgaccatggagttcatcgacccctgggactcccagtcccgcgctcgcgtcgtccattccggcgccaactccacttcgttctcctcctccaccgccaaagcacccctctccctccgccacgccgcatcttgcgccgccgcggccgtcgcacttctcgccgccgcgttctacctcctcccgacctaccagatcctctcctccctcctcatatggatcgcttcgtccctgctcctcgcccccttcgcgcccttgtcggccactggcggcgacatctccgtcggccgaggccgcgtcgttccggctccagaaccggccccagaacccacaccggaacccacgcccgccccccgccgcggccgtcgccagaacccagtcccgacgcccacaaaaccctcagatccgggcactccccccgtccaatcggccgcatcactgcatccgttgcagaaggcgacaactgcggatggagccgtggtggacggcggcgagagggaggaggacgccggcgagtggactgaccaagagctggagctgctccggcggcagatggtgaagcacccggcgggtgagccccagcgctgggagaagatcgccgcggtgtttggcggccgccgcacgccggagaatgtcatccgggcggcaaagtcgggcgctcccgcggcgggaggaagctcgttcgagcagttcctacgcaagcggaagccgctcgatccgagggccgaggctgctgtcactgcggacgatgcgggaggcgccgagagtgcggacgccgcttggagcgccggggatgaccgggccttgctgaacgctcttaaggagttcccgaaggacactgcaatgaggtgggagaaggtggcggcctctgtacccgggaagacaaaggccgtgtgcatgaagaggatcaccgagctcaagcgagacttcaggagcaccaagacggcatcggaagcagcatcataggcgaaacctgataattttggtgccggactgaatgacatgcgctgcactggtttggctagcgaggaagaactttacatggctagctccagtgaaccatggaaacggcagaggattaactacactacggagagggccggagctatagaacagatcatgtaattttcctattgaactagagacagggtatcccttgatataggagaaactttgacttactactggacacatggcatgagacaggaagaacctgttcttgtttcaaactaaagcatgttttcattgcaatcttttgtaggggtcctattgctagtcggttaaatgtttttgtgtactgcttcgaattcctcgtttgagagtgggaaaccaagcagcgtttttttttatggtctgcgcgcttaggccatctcagaggaatcatatttgacttctacaggaatcagttcaatagcggtcggtactgcctgttaacatggtggcgtaggtggttggtatcgactggcttggttaattcggccaatcgatcggtgagtccgtcgatcgatcaatttggtcagtactccgatcacgggtcggtactgactagttcgttagag

SEQ ID NO: 16449 - DNA, 1720 bp, Zea Mays
cgagaagcgccgtcttccccctttccaacctcaagtctacagtctacaccgaatccatcccccatcgccgccgccgccgccgccgacgacgacgatggcaagcctactccggcgatctgccgtacccgcgcgccagctcctcctcctcccgcgccatttcgccgccgccggctccgcccccgccttgtcccgctcgttctcccgcttcaacccccgagacgacagctctatgttcgatccaccggagccgccggtgaactggggcgtgagcatagttccggagaagaaggcttacgttgtggagagattcgggaagtatctcaagaccctcggctccgggttccacctcctgatccccgccgtcgaccgtattgcctacgtgcactcgctcaaggaagagaccatccctatccctcaccagaacgccatcaccaaggacaacgtcaccatacagattgacagcgtcatctatgtcaagcacatcgagtggcgtgactgcatgtctgtcaatttgaatctaccaagtgccatcaatgaagcagccacagattggggcctgaagtgtatccgctatgagatcagggacataaatcctccagcagggattaggcaggctatggagatgcaggctgaggcagaaaggaaaaaacgcgctcaaatccttgagtcagaagggatgaaacaggcccaaatccttgaatcagaagggaaaaagactgcccagatccttgaatctgaaggagctatgttggatctagcaaaccgtgccaagggtatgcgacattccacacaccttattacaatgttctcattttcttttgtaaaaccattcaacatgcattattccgccaccgttttaccttatttgatgatggctattggtgctgttaaactgaacattgtaaatatttgtaattttttcttcttctaaagggtcttacatttctttatcccctccattattagaatttacttattctggctatcaacaccaggtgcggctgaagcaattcttgccaagtcagaagctactgctcgtggaatgagattggtttcagatgcgatgacaactgaaggcagtgccaaggctgctagcctgaaacttgcagagcaatacatcgaagcattctcaaatctggcacaaaagacaaatacaatgcttcttccaggtgatagtgccagcccagcatctttcgtggcccaggcaatgaagacgtatgagcaaatccattcccacagccaggcattaaagagccacccccagatagaagagctgaaggaatcaggagagaccagtcctgctccatcttctgaggcgagcaagacaccaccactcattgaggaagcagattctaaccagaccttctcactgcaacgccccaagaacaagcagtgagcttcgctcaagtgtttgaagtccttttttctatctgttgttctgaaacatgagtgccactgagaaacaccactagtaggttttagttttctttagtctgagagagctgatatgtggcggagaagggatagacccctaggcatttggtttctgggagctaaatgcgaccggagagacctagagagattttgattctcgtgaaggttatactttggttccttgttggaatgaagtttgtaaaaaggcaaggttgggttaacgttggttagacaaaatgcataaatgcttaagttatttctttcttgctgagcttgactacatata

SEQ ID NO: 16450 - DNA, 1489 bp, Zea Mays
cacacagcgaaacgcccggcctttgttactcaaagtcgagaagcgccgtcttccccctttccaacctcaagtctacagtctacaccgaatccatcccccatcgccgccgccgccgccgccgacgacgacgatggcaagcctactccggcgatctgccgtacccgcgcgccagctcctcctcctcccgcgccatttcgccgccgccggctccgcccccgccttgtcccgctcgttctcccgcttcaacccccgagacgacagctctatgttcgatccaccggagccgccggtgaactggggcgtgagcatagttccggagaagaaggcttacgttgtggagagattcgggaagtatctcaagaccctcggctccgggttccacctcctgatccccgccgtcgaccgtattgcctacgtgcactcgctcaaggaagagaccatccctatccctcaccagaacgccatcaccaaggacaacgtcaccatacagattgacagcgtcatctatgtcaagagtgccatcaatgaagcagccacagattggggcctgaagtgtatccgctatgagatcagggacataaatcctccagcagggattaggcaggctatggagatgcaggctgaggcagaaaggaaaaaacgcgctcaaatccttgagtcagaagggatgaaacaggcccaaatccttgaatcagaagggaaaaagactgcccagatccttgaatctgaaggagctatgttggatctagcaaaccgtgccaagggtgcggctgaagcaattcttgccaagtcagaagctactgctcgtggaatgagattggtttcagatgcgatgacaactgaaggcagtgccaaggctgctagcctgaaacttgcagagcaatacatcgaagcattctcaaatctggcacaaaagacaaatacaatgcttcttccaggtgatagtgccagcccagcatctttcgtggcccaggcaatgaagacgtatgagcaaatccattcccacagccaggcattaaagagccacccccagatagaagagctgaaggaatcaggagagaccagtcctgctccatcttctgaggcgagcaagacaccaccactcattgaggaagcagattctaaccagaccttctcactgcaacgccccaagaacaagcagtgagcttcgctcaagtgtttgaagtccttttttctatctgttgttctgaaacatgagtgccactgagaaacaccactagtaggttttagttttctttagtctgagagagctgatatgtggcggagaagggatagacccctaggcatttggtttctgggagctaaatgcgaccggagagacctagagagattttgattctcgtgaaggttatactttggttccttgttggaatgaagtttgtaaaaaggcaaggttgggttaacgttggttagacaaaatgcataaatgcttaagttatttctttcttgctgagcttgactacatata

SEQ ID NO: 16451 - DNA, 3808 bp, Zea Mays
atgccggctaggggagaggggaggccggcgaaggagagggtagaccaggtggtcggggtcggcacccggggcgacaacacgtggatcctggcgtgggtgcccagcgacgatggccaccagggtgagttggaaaaggaagctattaacaatggtacttctccggggcaagcccatgacattgacataccgccaccacggcctaaaagaaaggctaacagtccatatcctcgaaaaagtggtctcagctctgagacaccaaccaaagaacttccaagtgacaagtcaacaaaaccaaatatgcccttgagcaatgagaatgtactaatggcaggtgatgcatctcttcagaaatttcaaaggaaggagttgtctggaaaagaaagttgctcggaagttcttaatctcttccgtgatgccccatctccatcattttcttcagttaacaaaagctcttcaaatcatggtgcaccgattgaggcaagtaaaacaaaaatccgagatatgaccattatggaaaatagttctcttaaccccaacatgcaagaggatgtaaaggaaatcaatgatcaggagatggaaaggcttaatggtacccaaatcagctctaaatgtgaacactctcatgagggatatttggacatctcaatgcaacaaatgaagctaaagccagagtctgtggagacaacatatgtggacaaacaaaccgcaagagcttcacactccctagcggagagaactgggacaactagcattccggtcactgcaactgaagaaactcattctgttctaacaagtgatcaagtgggaatcaatggaagcatgaacccatccatccatccaatgtttcctgcagatccaaaatttgatagcagtgccacaccacagccttttcctcataattatgctgcctttgctccaatgatgcagtgcaactgcaaccaagatacccacagatcattggtcaacatgtcatccaccttctccagcatgcttgtttccacgttgttgtcaaaccctgccatccatgcagctgccaggctcgcagcatcatactggccagcagctgaaggtaacactccgattgatccgaatcaagaaaatcttgcagatggtgttcaaggaaggagcatagggtctcctccaagcatggcttctattgtagcagctacagttgctgcagcatctgcatggtgggcaacacaaggtcttctccctttcttcgccccacccatggctttttcatttgtgccagctcccagtgctgccttccccacagttgatgttccacgaccttcagagaaagatagagattgcccagctgaaaatgcacagaaggaatgccaagaagctcgaaaacagggacagtttgaaggtttcagagttgccgcttcttcagagtatgatgggagtggaaaaggcgaggtgtctgtccacacagagttaaagatatctcctgtccagaatgctgatgccacgtctgccgcaggagctgacacgactgatgcattcatgaataagaaaaagcaggaccgctcttcatgcggttctaacacaccttcaagtagtgatgtagatgtggacaatgtccctgagaaagagggcaatggtaatgagaaggcgaagcaagcctcctgcagcaactcttcagctggtgacactaaccaccgcagatttagaagcagtggaagcacgagtgattcatggaaggaagtttccgaagagggtcgtctggctttccatgcgctgttcagtagagaaaagcttccgcaaagcttttctcccccacaagcagaaggctcgaaggaagttggcaaggaggaggaagatgaagtcaccacagtggcagttgacctcaacaagagtaccacaagcattgatcatgacctcgacacaattggcttcaaaccatacaagagatgttctgtggaagcgaaggagaatagggtgccggctagcgacgaggttggtaccaagaggattcgtcttgatagtgaagcatcaacatgagcgatttctacatggttaccgctcggacttcctctgccgccatgaagtttatgacaaagttgtatttacatctaaactagtataggacttaaagaccttgcaatgcaatgcttcatgaaactgttgtgtgctgtattttagtacttgtgaagcagcccggtagactgcttttaaacctttatctcgtagactctgatttaagcatcaagcaactattgaactttatatttttggcgggaaggaaaataattattttttgatttattttgcagggtcatgcatttacatagcactcttgatgcaaaagtttatttcgtaaagttgtagtggaatatgctgagtgagaaggtgaactatttatgactaatatcgtccctgtcctagctaatcgccctactcgactaataatcctcgccccttctcctctatctcgctccactaataatttgaaagtattgttccctgtaattcttgtttgtttctcatgtatgtgcttccattcatttttagtatgtccttagtctttgacagtgccataaataactttaattgtttctgctgtggggtattcatataatacacacacatgagaacctgcgaccattcagtgaagtgctccctatctaccaactattctttaattcaataatcatttcttttagtcttgcatatagatcattctttcatccagtgtttcagtattttagtttttttatactatgaatttgtagagttttcttggttggacctgcaacctttcagtttcagtcctctgttaagaaactagatgggtcggcaattaaacaacaacatgttttatcgtctgttcttgcgaccttgagatttttttttaaaaaaatcaagaattcattgcaggcagctgtaaatgaaatgtttctgttgtctgctgaaactggattcaccagttaatttccaaggtagttctctctgtgtatatatgttggagaattcagacaagtactaccactttgtttcagggaatggtcttttaccatgttgcatgcttcagctttagatgaattgctgtggttacagttttgttcatgctgcataatgtttgcctatagatatgcattgaaaccttaaataaacctatacaaaaattccacttggtatttgaatttgccaattaattaatgtaaacagatagctatataagctgctgctacttttatttgtcatactaagaattcccttgattcatagtagttgcatgctctgctgtgtgatatttgtggatgacctattgttgacactaattcgggcattgtaacataattacaatcaatatttttgagaaatatattgcaaccttcaggcaatatacgcatgtttttgcctgtcatgttgttggttgtagttaagtccattattgttactctttggagtctgtgctgttggggttgggtaggtatgtgagtctgttgttgcctccacagatctccaataaatcacacaagatgagagctgttgctggtgtgtcctacctcgtcattctttgacggttgctattcaggtagcccttgcaataattaaattaagacaggggaagagagaaggaaaggggaacaatgaggaaatgctcatatggctctggaattcaataaattagtcatataatgatattggtccaaaatttaagttttggctttggcctaattagaagaatgtaaccatgaagggtcttattttcagtcatgctctacgcagacaataatatgaggtgaaggatgaaataataccataagatttgattatggaatgtgtttttttggttaaa

SEQ ID NO: 16452 - DNA, 4170 bp, Zea Mays
cttcgttcttcctgggctacgtgtctttttcgatgctttaatgtcgtcatgatttcttgcgtgcaatttgagaatctgaagagtggtaacggacagtagttgtaatgagctatgccgcttctcgctgtgtttcttttgtcgaggacggcggttgggatttgttcgtagctgtgtgcttggtaacttcaggggagtaaggacaattggatcaatttaagtaggtctgggcacacaaatttgaactattaacgcattgggagtgcttgtgtgttagaggtctaggaggagctatgaggtactacttccgtcaggtccagcgtttggttggagatatggaaggaggagctctcttgtttatagatgacctcaactccaagtgacaaagtgaacagctgttgaacttcccgtctatttctgtttctttttgctggatttggagatggaggtgaattcctctggtgaggaaacggtgataaaggtaaggaagccatacacaataaccaagcagcgggagcggtggacagaggctgagcacaaacggttccttgaagccttgaaactttatggcagagcatggcagcgcatagaagagcatgttgggacaaagacggccgtgcagatcagaagtcacgctcaaaagttcttcaccaagttggaaaaggaagctattaacaatggtacttctccggggcaagcccatgacattgacataccgccaccacggcctaaaagaaaggctaacagtccatatcctcgaaaaagtggtctcagctctgagacaccaaccaaagaacttccaagtgacaagtcaacaaaaccaaatatgcccttgagcaatgagaatgtactaatggcaggtgatgcatctcttcagaaatttcaaaggaaggagttgtctggaaaagaaagttgctcggaagttcttaatctcttccgtgatgccccatctccatcattttcttcagttaacaaaagctcttcaaatcatggtgcaccgattgaggcaagtaaaacaaaaatccgagatatgaccattatggaaaatagttctcttaaccccaacatgcaagaggatgtaaaggaaatcaatgatcaggagatggaaaggcttaatggtacccaaatcagctctaaatgtgaacactctcatgagggatatttggacatctcaatgcaacaaatgaagctaaagccagagtctgtggagacaacatatgtggacaaacaaaccgcaagagcttcacactccctagcggagagaactgggacaactagcattccggtcactgcaactgaagaaactcattctgttctaacaagtgatcaagtgggaatcaatggaagcatgaacccatccatccatccaatgtttcctgcagatccaaaatttgatagcagtgccacaccacagccttttcctcataattatgctgcctttgctccaatgatgcagtgcaactgcaaccaagatacccacagatcattggtcaacatgtcatccaccttctccagcatgcttgtttccacgttgttgtcaaaccctgccatccatgcagctgccaggctcgcagcatcatactggccagcagctgaaggtaacactccgattgatccgaatcaagaaaatcttgcagatggtgttcaaggaaggagcatagggtctcctccaagcatggcttctattgtagcagctacagttgctgcagcatctgcatggtgggcaacacaaggtcttctccctttcttcgccccacccatggctttttcatttgtgccagctcccagtgctgccttccccacagttgatgttccacgaccttcagagaaagatagagattgcccagctgaaaatgcacagaaggaatgccaagaagctcgaaaacagggacagtttgaaggtttcagagttgccgcttcttcagagtatgatgggagtggaaaaggcgaggtgtctgtccacacagagttaaagatatctcctgtccagaatgctgatgccacgtctgccgcaggagctgacacgactgatgcattcatgaataagaaaaagcaggaccgctcttcatgcggttctaacacaccttcaagtagtgatgtagatgtggacaatgtccctgagaaagagggcaatggtaatgagaaggcgaagcaagcctcctgcagcaactcttcagctggtgacactaaccaccgcagatttagaagcagtggaagcacgagtgattcatggaaggaagtttccgaagaggttgtaatctaccaacactatgccaattcactctgcccaaacctttgagcatgccgcactgcctttctaattcactttttttgttggcagggtcgtctggctttccatgcgctgttcagtagagaaaagcttccgcaaagcttttctcccccacaagcagaaggctcgaaggaagttggcaaggaggaggaagatgaagtcaccacagtggcagttgacctcaacaagagtaccacaagcattgatcatgacctcgacacaattggtgagccaagggcttcctttcccaatgaactgtcgcccctgaagctgaaattgcgccgaacaggcttcaaaccatacaagagatgttctgtggaagcgaaggagaatagggtgccggctagcgacgagggtcatgcatttacatagcactcttgatgcaaaagtttatttcgtaaagttgtagtggaatatgctgagtgagaaggtgaactatttatgactaatatcgtccctgtcctagctaatcgccctactcgactaataatcctcgccccttctcctctatctcgctccactaataatttgaaagtattgttccctgtaattcttgtttgtttctcatgtatgtgcttccattcatttttagtatgtccttagtctttgacagtgccataaataactttaattgtttctgctgtggggtattcatataatacacacacatgagaacctgcgaccattcagtgaagtgctccctatctaccaactattctttaattcaataatcatttcttttagtcttgcatatagatcattctttcatccagtgtttcagtattttagtttttttatactatgaatttgtagagttttcttggttggacctgcaacctttcagtttcagtcctctgttaagaaactagatgggtcggcaattaaacaacaacatgttttatcgtctgttcttgcgaccttgagatttttttttaaaaaaatcaagaattcattgcaggcagctgtaaatgaaatgtttctgttgtctgctgaaactggattcaccagttaatttccaaggtagttctctctgtgtatatatgttggagaattcagacaagtactaccactttgtttcagggaatggtcttttaccatgttgcatgcttcagctttagatgaattgctgtggttacagttttgttcatgctgcataatgtttgcctatagatatgcattgaaaccttaaataaacctatacaaaaattccacttggtatttgaatttgccaattaattaatgtaaacagatagctatataagctgctgctacttttatttgtcatactaagaattcccttgattcatagtagttgcatgctctgctgtgtgatatttgtggatgacctattgttgacactaattcgggcattgtaacataattacaatcaatatttttgagaaatatattgcaaccttcaggcaatatacgcatgtttttgcctgtcatgttgttggttgtagttaagtccattattgttactctttggagtctgtgctgttggggttgggtaggtatgtgagtctgttgttgcctccacagatctccaataaatcacacaagatgagagctgttgctggtgtgtcctacctcgtcattctttgacggttgctattcaggtagcccttgcaataattaaattaagacaggggaagagagaaggaaaggggaacaatgaggaaatgctcatatggctctggaattcaataaattagtcatataatgatattggtccaaaatttaagttttggctttggcctaattagaagaatgtaaccatgaagggtcttattttcagtcatgctctacgcagacaataatatgaggtgaaggatgaaataataccataagatttgattatggaatgtgtttttttggttaaa

SEQ ID NO: 16453 - DNA, 4585 bp, Zea Mays
gatttctcgcggcgctcgccgcgagagcgacccccacaggtcgccgcccctccgcggcccgcgcagcgcacagcatacagtcagcacacgcagcagctgccaccacagcgaacagcaaagcacctccgactcggagtcgcggcgagagccgagaaccttctcattcatcttcctcttctatccatcctgcctgcctgcttgcctccgtattccagctagatctccgggcagccgattgaccgagaagtttgtggttgtggcggcggcggagagggaaacggggagcgggagggcggcgcggatgccactgctgcgccggcgccggcggggccggtgatgcccgccgtggcggtcgcttgaggccgccgtgcgtgggaggtggacgggggagcgaggcggtgcggaccgaggttgcgttgggttggattcgattgggctgcgtctgctgagagtaaggacaattggatcaatttaagtagaggtctaggaggagctatgaggtactacttccgtcaggtccagcgtttggttggagatatggaaggaggagctctcttgtttatagatgacctcaactccaagtgacaaagtgaacagctgttgaacttcccgtctatttctgtttctttttgctggatttggagatggaggtgaattcctctggtgaggaaacggtgataaaggtaaggaagccatacacaataaccaagcagcgggagcggtggacagaggctgagcacaaacggttccttgaagccttgaaactttatggcagagcatggcagcgcatagaagagcatgttgggacaaagacggccgtgcagatcagaagtcacgctcaaaagttcttcaccaagttggaaaaggaagctattaacaatggtacttctccggggcaagcccatgacattgacataccgccaccacggcctaaaagaaaggctaacagtccatatcctcgaaaaagtggtctcagctctgagacaccaaccaaagaacttccaagtgacaagtcaacaaaaccaaatatgcccttgagcaatgagaatgtactaatggcagaaatttcaaaggaaggagttgtctggaaaagaaagttgctcggaagttcttaatctcttccgtgatgccccatctccatcattttcttcagttaacaaaagctcttcaaatcatggtgcaccgattgaggcaagtaaaacaaaaatccgagatatgaccattatggaaaatagttctcttaaccccaacatgcaagaggatgtaaaggaaatcaatgatcaggagatggaaaggcttaatggtacccaaatcagctctaaatgtgaacactctcatgagggatatttggacatctcaatgcaacaaatgaagctaaagccagagtctgtggagacaacatatgtggacaaacaaaccgcaagagcttcacactccctagcggagagaactgggacaactagcattccggtcactgcaactgaagaaactcattctgttctaacaagtgatcaagtgggaatcaatggaagcatgaacccatccatccatccaatgtttcctgcagatccaaaatttgatagcagtgccacaccacagccttttcctcataattatgctgcctttgctccaatgatgcagtgcaactgcaaccaagatacccacagatcattggtcaacatgtcatccaccttctccagcatgcttgtttccacgttgttgtcaaaccctgccatccatgcagctgccaggctcgcagcatcatactggccagcagctgaaggtaacactccgattgatccgaatcaagaaaatcttgcagatggtgttcaaggaaggagcatagggtctcctccaagcatggcttctattgtagcagctacagttgctgcagcatctgcatggtgggcaacacaaggtcttctccctttcttcgccccacccatggctttttcatttgtgccagctcccagtgctgccttccccacagttgatgttccacgaccttcagagaaagatagagattgcccagctgaaaatgcacagaaggaatgccaagaagctcgaaaacagggacagtttgaaggtttcagagttgccgcttcttcagagtatgatgggagtggaaaaggcgaggtgtctgtccacacagagttaaagatatctcctgtccagaatgctgatgccacgtctgccgcaggagctgacacgactgatgcattcatgaataagaaaaagcaggaccgctcttcatgcggttctaacacaccttcaagtagtgatgtagatgtggacaatgtccctgagaaagagggcaatggtaatgagaaggcgaagcaagcctcctgcagcaactcttcagctggtgacactaaccaccgcagatttagaagcagtggaagcacgagtgattcatggaaggaagtttccgaagagggtcgtctggctttccatgcgctgttcagtagagaaaagcttccgcaaagcttttctcccccacaagcagaaggctcgaaggaagttggcaaggaggaggaagatgaagtcaccacagtggcagttgacctcaacaagagtaccacaagcattgatcatgacctcgacacaattggtgagccaagggcttcctttcccaatgaactgtcgcccctgaagctgaaattgcgccgaacaggcttcaaaccatacaagagatgttctgtggaagcgaaggagaatagggtgccggctagcgacgaggttggtaccaagaggattcgtcttgatagtgaagcatcaacatgagcgatttctacatggttaccgctcggacttcctctgccgccatgaagtttatgacaaagttgtatttacatctaaactagtataggacttaaagaccttgcaatgcaatgcttcatgaaactgttgtgtgctgtattttagtacttgtgaagcagcccggtagactgcttttaaacctttatctcgtagactctgatttaagcatcaagcaactattgaactttatatttttggcgggaaggaaaataattattttttgatttattttgcagggtcatgcatttacatagcactcttgatgcaaaagtttatttcgtaaagttgtagtggaatatgctgagtgagaaggtgaactatttatgactaatatcgtccctgtcctagctaatcgccctactcgactaataatcctcgccccttctcctctatctcgctccactaataatttgaaagtattgttccctgtaattcttgtttgtttctcatgtatgtgcttccattcatttttagtatgtccttagtctttgacagtgccataaataactttaattgtttctgctgtggggtattcatataatacacacacatgagaacctgcgaccattcagtgaagtgctccctatctaccaactattctttaattcaataatcatttcttttagtcttgcatatagatcattctttcatccagtgtttcagtattttagtttttttatactatgaatttgtagagttttcttggttggacctgcaacctttcagtttcagtcctctgttaagaaactagatgggtcggcaattaaacaacaacatgttttatcgtctgttcttgcgaccttgagatttttttttaaaaaaatcaagaattcattgcaggcagctgtaaatgaaatgtttctgttgtctgctgaaactggattcaccagttaatttccaaggtagttctctctgtgtatatatgttggagaattcagacaagtactaccactttgtttcagggaatggtcttttaccatgttgcatgcttcagctttagatgaattgctgtggttacagttttgttcatgctgcataatgtttgcctatagatatgcattgaaaccttaaataaacctatacaaaaattccacttggtatttgaatttgccaattaattaatgtaaacagatagctatataagctgctgctacttttatttgtcatactaagaattcccttgattcatagtagttgcatgctctgctgtgtgatatttgtggatgacctattgttgacactaattcgggcattgtaacataattacaatcaatatttttgagaaatatattgcaaccttcaggcaatatacgcatgtttttgcctgtcatgttgttggttgtagttaagtccattattgttactctttggagtctgtgctgttggggttgggtaggtatgtgagtctgttgttgcctccacagatctccaataaatcacacaagatgagagctgttgctggtgtgtcctacctcgtcattctttgacggttgctattcaggtagcccttgcaataattaaattaagacaggggaagagagaaggaaaggggaacaatgaggaaatgctcatatggctctggaattcaataaattagtcatataatgatattggtccaaaatttaagttttggctttggcctaattagaagaatgtaaccatgaagggtcttattttcagtcatgctctacgcagacaataatatgaggtgaaggatgaaataataccataagatttgattatggaatgtgtttttttggttaaa

SEQ ID NO: 16454 - DNA, 4931 bp, Zea Mays
gatttctcgcggcgctcgccgcgagagcgacccccacaggtcgccgcccctccgcggcccgcgcagcgcacagcatacagtcagcacacgcagcagctgccaccacagcgaacagcaaagcacctccgactcggagtcgcggcgagagccgagaaccttctcattcatcttcctcttctatccatcctgcctgcctgcttgcctccgtattccagctagatctccgggcagccgattgaccgagaagtttgtggttgtggcggcggcggagagggaaacggggagcgggagggcggcgcggatgccactgctgcgccggcgccggcggggccggtgatgcccgccgtggcggtcgcttgaggccgccgtgcgtgggaggtggacgggggagcgaggcggtgcggaccgaggttgcgttgggttggattcgattgggctgcgtctgctgagtggcccaggctcttggaggacagcaatggatcagtgacatcttgacacttctttcctggacggggatccgacaatttttgctgatttgggatgatgtaagcaatattgtgttaacacaggaggcggatattcacacctggctgcatacttcctctgagtaaggacaattggatcaatttaagtaggtctgggcacacaaatttgaactattaacgcattgggagtgcttgtgtgttagaggtctaggaggagctatgaggtactacttccgtcaggtccagcgtttggttggagatatggaaggaggagctctcttgtttatagatgacctcaactccaagtgacaaagtgaacagctgttgaacttcccgtctatttctgtttctttttgctggatttggagatggaggtgaattcctctggtgaggaaacggtgataaaggtaaggaagccatacacaataaccaagcagcgggagcggtggacagaggctgagcacaaacggttccttgaagccttgaaactttatggcagagcatggcagcgcatagaagagcatgttgggacaaagacggccgtgcagatcagaagtcacgctcaaaagttcttcaccaagtttgagctgggaagagatggatgagtggggggaaaatccatccttcaatctccactcaagtgaagcaaatgttggaatttggagcaggcattctagctgtcactaatccactatgctaatttggaaaaggaagctattaacaatggtacttctccggggcaagcccatgacattgacataccgccaccacggcctaaaagaaaggctaacagtccatatcctcgaaaaagtggtctcagctctgagacaccaaccaaagaacttccaagtgacaagtcaacaaaaccaaatatgcccttgagcaatgagaatgtactaatggcaggtgatgcatctcttcagaaatttcaaaggaaggagttgtctggaaaagaaagttgctcggaagttcttaatctcttccgtgatgccccatctccatcattttcttcagttaacaaaagctcttcaaatcatggtgcaccgattgaggcaagtaaaacaaaaatccgagatatgaccattatggaaaatagttctcttaaccccaacatgcaagaggatgtaaaggaaatcaatgatcaggagatggaaaggcttaatggtacccaaatcagctctaaatgtgaacactctcatgagggatatttggacatctcaatgcaacaaatgaagctaaagccagagtctgtggagacaacatatgtggacaaacaaaccgcaagagcttcacactccctagcggagagaactgggacaactagcattccggtcactgcaactgaagaaactcattctgttctaacaagtgatcaagtgggaatcaatggaagcatgaacccatccatccatccaatgtttcctgcagatccaaaatttgatagcagtgccacaccacagccttttcctcataattatgctgcctttgctccaatgatgcagtgcaactgcaaccaagatacccacagatcattggtcaacatgtcatccaccttctccagcatgcttgtttccacgttgttgtcaaaccctgccatccatgcagctgccaggctcgcagcatcatactggccagcagctgaaggtaacactccgattgatccgaatcaagaaaatcttgcagatggtgttcaaggaaggagcatagggtctcctccaagcatggcttctattgtagcagctacagttgctgcagcatctgcatggtgggcaacacaaggtcttctccctttcttcgccccacccatggctttttcatttgtgccagctcccagtgctgccttccccacagttgatgttccacgaccttcagagaaagatagagattgcccagctgaaaatgcacagaaggaatgccaagaagctcgaaaacagggacagtttgaaggtttcagagttgccgcttcttcagagtatgatgggagtggaaaaggcgaggtgtctgtccacacagagttaaagatatctcctgtccagaatgctgatgccacgtctgccgcaggagctgacacgactgatgcattcatgaataagaaaaagcaggaccgctcttcatgcggttctaacacaccttcaagtagtgatgtagatgtggacaatgtccctgagaaagagggcaatggtaatgagaaggcgaagcaagcctcctgcagcaactcttcagctggtgacactaaccaccgcagatttagaagcagtggaagcacgagtgattcatggaaggaagtttccgaagagggtcgtctggctttccatgcgctgttcagtagagaaaagcttccgcaaagcttttctcccccacaagcagaaggctcgaaggaagttggcaaggaggaggaagatgaagtcaccacagtggcagttgacctcaacaagagtaccacaagcattgatcatgacctcgacacaattggtgagccaagggcttcctttcccaatgaactgtcgcccctgaagctgaaattgcgccgaacaggcttcaaaccatacaagagatgttctgtggaagcgaaggagaatagggtgccggctagcgacgaggttggtaccaagaggattcgtcttgatagtgaagcatcaacatgagcgatttctacatggttaccgctcggacttcctctgccgccatgaagtttatgacaaagttgtatttacatctaaactagtataggacttaaagaccttgcaatgcaatgcttcatgaaactgttgtgtgctgtattttagtacttgtgaagcagcccggtagactgcttttaaacctttatctcgtagactctgatttaagcatcaagcaactattgaactttatatttttggcgggaaggaaaataattattttttgatttattttgcagggtcatgcatttacatagcactcttgatgcaaaagtttatttcgtaaagttgtagtggaatatgctgagtgagaaggtgaactatttatgactaatatcgtccctgtcctagctaatcgccctactcgactaataatcctcgccccttctcctctatctcgctccactaataatttgaaagtattgttccctgtaattcttgtttgtttctcatgtatgtgcttccattcatttttagtatgtccttagtctttgacagtgccataaataactttaattgtttctgctgtggggtattcatataatacacacacatgagaacctgcgaccattcagtgaagtgctccctatctaccaactattctttaattcaataatcatttcttttagtcttgcatatagatcattctttcatccagtgtttcagtattttagtttttttatactatgaatttgtagagttttcttggttggacctgcaacctttcagtttcagtcctctgttaagaaactagatgggtcggcaattaaacaacaacatgttttatcgtctgttcttgcgaccttgagatttttttttaaaaaaatcaagaattcattgcaggcagctgtaaatgaaatgtttctgttgtctgctgaaactggattcaccagttaatttccaaggtagttctctctgtgtatatatgttggagaattcagacaagtactaccactttgtttcagggaatggtcttttaccatgttgcatgcttcagctttagatgaattgctgtggttacagttttgttcatgctgcataatgtttgcctatagatatgcattgaaaccttaaataaacctatacaaaaattccacttggtatttgaatttgccaattaattaatgtaaacagatagctatataagctgctgctacttttatttgtcatactaagaattcccttgattcatagtagttgcatgctctgctgtgtgatatttgtggatgacctattgttgacactaattcgggcattgtaacataattacaatcaatatttttgagaaatatattgcaaccttcaggcaatatacgcatgtttttgcctgtcatgttgttggttgtagttaagtccattattgttactctttggagtctgtgctgttggggttgggtaggtatgtgagtctgttgttgcctccacagatctccaataaatcacacaagatgagagctgttgctggtgtgtcctacctcgtcattctttgacggttgctattcaggtagcccttgcaataattaaattaagacaggggaagagagaaggaaaggggaacaatgaggaaatgctcatatggctctggaattcaataaattagtcatataatgatattggtccaaaatttaagttttggctttggcctaattagaagaatgtaaccatgaagggtcttattttcagtcatgctctacgcagacaataatatgaggtgaaggatgaaataataccataagatttgattatggaatgtgtttttttggttaaa

SEQ ID NO: 16455 - DNA, 4671 bp, Zea Mays
ctcgagtaaaccacgagaaaagatagtggctgagatttctcgcggcgctcgccgcgagagcgacccccacaggtcgccgcccctccgcggcccgcgcagcgcacagcatacagtcagcacacgcagcagctgccaccacagcgaacagcaaagcacctccgactcggagtcgcggcgagagccgagaaccttctcattcatcttcctcttctatccatcctgcctgcctgcttgcctccgtattccagctagatctccgggcagccgattgaccgagaagtttgtggttgtggcggcggcggagagggaaacggggagcgggagggcggcgcggatgccactgctgcgccggcgccggcggggccggtgatgcccgccgtggcggtcgcttgaggccgccgtgcgtgggaggtggacgggggagcgaggcggtgcggaccgaggttgcgttgggttggattcgattgggctgcgtctgctgagagtaaggacaattggatcaatttaagtaggtctgggcacacaaatttgaactattaacgcattgggagtgcttgtgtgttagaggtctaggaggagctatgaggtactacttccgtcaggtccagcgtttggttggagatatggaaggaggagctctcttgtttatagatgacctcaactccaagtgacaaagtgaacagctgttgaacttcccgtctatttctgtttctttttgctggatttggagatggaggtgaattcctctggtgaggaaacggtgataaaggtaaggaagccatacacaataaccaagcagcgggagcggtggacagaggctgagcacaaacggttccttgaagccttgaaactttatggcagagcatggcagcgcatagaagagcatgttgggacaaagacggccgtgcagatcagaagtcacgctcaaaagttcttcaccaagttggaaaaggaagctattaacaatggtacttctccggggcaagcccatgacattgacataccgccaccacggcctaaaagaaaggctaacagtccatatcctcgaaaaagtggtctcagctctgagacaccaaccaaagaacttccaagtgacaagtcaacaaaaccaaatatgcccttgagcaatgagaatgtactaatggcagaaatttcaaaggaaggagttgtctggaaaagaaagttgctcggaagttcttaatctcttccgtgatgccccatctccatcattttcttcagttaacaaaagctcttcaaatcatggtgcaccgattgaggcaagtaaaacaaaaatccgagatatgaccattatggaaaatagttctcttaaccccaacatgcaagaggatgtaaaggaaatcaatgatcaggagatggaaaggcttaatggtacccaaatcagctctaaatgtgaacactctcatgagggatatttggacatctcaatgcaacaaatgaagctaaagccagagtctgtggagacaacatatgtggacaaacaaaccgcaagagcttcacactccctagcggagagaactgggacaactagcattccggtcactgcaactgaagaaactcattctgttctaacaagtgatcaagtgggaatcaatggaagcatgaacccatccatccatccaatgtttcctgcagatccaaaatttgatagcagtgccacaccacagccttttcctcataattatgctgcctttgctccaatgatgcagtgcaactgcaaccaagatacccacagatcattggtcaacatgtcatccaccttctccagcatgcttgtttccacgttgttgtcaaaccctgccatccatgcagctgccaggctcgcagcatcatactggccagcagctgaaggtaacactccgattgatccgaatcaagaaaatcttgcagatggtgttcaaggaaggagcatagggtctcctccaagcatggcttctattgtagcagctacagttgctgcagcatctgcatggtgggcaacacaaggtcttctccctttcttcgccccacccatggctttttcatttgtgccagctcccagtgctgccttccccacagttgatgttccacgaccttcagagaaagatagagattgcccagctgaaaatgcacagaaggaatgccaagaagctcgaaaacagggacagtttgaaggtttcagagttgccgcttcttcagagtatgatgggagtggaaaaggcgaggtgtctgtccacacagagttaaagatatctcctgtccagaatgctgatgccacgtctgccgcaggagctgacacgactgatgcattcatgaataagaaaaagcaggaccgctcttcatgcggttctaacacaccttcaagtagtgatgtagatgtggacaatgtccctgagaaagagggcaatggtaatgagaaggcgaagcaagcctcctgcagcaactcttcagctggtgacactaaccaccgcagatttagaagcagtggaagcacgagtgattcatggaaggaagtttccgaagagggtcgtctggctttccatgcgctgttcagtagagaaaagcttccgcaaagcttttctcccccacaagcagaaggctcgaaggaagttggcaaggaggaggaagatgaagtcaccacagtggcagttgacctcaacaagagtaccacaagcattgatcatgacctcgacacaattggtgagccaagggcttcctttcccaatgaactgtcgcccctgaagctgaaattgcgccgaacaggcttcaaaccatacaagagatgttctgtggaagcgaaggagaatagggtgccggctagcgacgaggttggtaccaagaggattcgtcttgatagtgaagcatcaacatgagcgatttctacatggttaccgctcggacttcctctgccgccatgaagtttatgacaaagttgtatttacatctaaactagtataggacttaaagaccttgcaatgcaatgcttcatgaaactgttgtgtgctgtattttagtacttgtgaagcagcccggtagactgcttttaaacctttatctcgtagactctgatttaagcatcaagcaactattgaactttatatttttggcgggaaggaaaataattattttttgatttattttgcagggtcatgcatttacatagcactcttgatgcaaaagtttatttcgtaaagttgtagtggaatatgctgagtgagaaggtgaactatttatgactaatatcgtccctgtcctagctaatcgccctactcgactaataatcctcgccccttctcctctatctcgctccactaataatttgaaagtattgttccctgtaattcttgtttgtttctcatgtatgtgcttccattcatttttagtatgtccttagtctttgacagtgccataaataactttaattgtttctgctgtggggtattcatataatacacacacatgagaacctgcgaccattcagtgaagtgctccctatctaccaactattctttaattcaataatcatttcttttagtcttgcatatagatcattctttcatccagtgtttcagtattttagtttttttatactatgaatttgtagagttttcttggttggacctgcaacctttcagtttcagtcctctgttaagaaactagatgggtcggcaattaaacaacaacatgttttatcgtctgttcttgcgaccttgagatttttttttaaaaaaatcaagaattcattgcaggcagctgtaaatgaaatgtttctgttgtctgctgaaactggattcaccagttaatttccaaggtagttctctctgtgtatatatgttggagaattcagacaagtactaccactttgtttcagggaatggtcttttaccatgttgcatgcttcagctttagatgaattgctgtggttacagttttgttcatgctgcataatgtttgcctatagatatgcattgaaaccttaaataaacctatacaaaaattccacttggtatttgaatttgccaattaattaatgtaaacagatagctatataagctgctgctacttttatttgtcatactaagaattcccttgattcatagtagttgcatgctctgctgtgtgatatttgtggatgacctattgttgacactaattcgggcattgtaacataattacaatcaatatttttgagaaatatattgcaaccttcaggcaatatacgcatgtttttgcctgtcatgttgttggttgtagttaagtccattattgttactctttggagtctgtgctgttggggttgggtaggtatgtgagtctgttgttgcctccacagatctccaataaatcacacaagatgagagctgttgctggtgtgtcctacctcgtcattctttgacggttgctattcaggtagcccttgcaataattaaattaagacaggggaagagagaaggaaaggggaacaatgaggaaatgctcatatggctctggaattcaataaattagtcatataatgatattggtccaaaatttaagttttggctttggcctaattagaagaatgtaaccatgaagggtcttattttcagtcatgctctacgcagacaataatatgaggtgaaggatgaaataataccataagatttgattatggaatgtgtttttttggttaaa

SEQ ID NO: 16456 - DNA, 4833 bp, Zea Mays
gctcgatagatttcaggggccggagctcgagtaaaccacgagaaaagatagtggctgagatttctcgcggcgctcgccgcgagagcgacccccacaggtcgccgcccctccgcggcccgcgcagcgcacagcatacagtcagcacacgcagcagctgccaccacagcgaacagcaaagcacctccgactcggagtcgcggcgagagccgagaaccttctcattcatcttcctcttctatccatcctgcctgcctgcttgcctccgtattccagctagatctccgggcagccgattgaccgagaagtttgtggttgtggcggcggcggagagggaaacggggagcgggagggcggcgcggatgccactgctgcgccggcgccggcggggccggtgatgcccgccgtggcggtcgcttgaggccgccgtgcgtgggaggtggacgggggagcgaggcggtgcggaccgaggttgcgttgggttggattcgattgggctgcgtctgctgagagtaaggacaattggatcaatttaagtaggtctgggcacacaaatttgaactattaacgcattgggagtgcttgtgtgttagaggtctaggaggagctatgaggtactacttccgtcaggtccagcgtttggttggagatatggaaggaggagctctcttgtttatagatgacctcaactccaagtgacaaagtgaacagctgttgaacttcccgtctatttctgtttctttttgctggatttggagatggaggtgaattcctctggtgaggaaacggtgataaaggtaaggaagccatacacaataaccaagcagcgggagcggtggacagaggctgagcacaaacggttccttgaagccttgaaactttatggcagagcatggcagcgcatagaagagcatgttgggacaaagacggccgtgcagatcagaagtcacgctcaaaagttcttcaccaagtttgagctgggaagagatggatgagtggggggaaaatccatccttcaatctccactcaagtgaagcaaatgttggaatttggagcaggcattctagctgtcactaatccactatgctaatttggaaaaggaagctattaacaatggtacttctccggggcaagcccatgacattgacataccgccaccacggcctaaaagaaaggctaacagtccatatcctcgaaaaagtggtctcagctctgagacaccaaccaaagaacttccaagtgacaagtcaacaaaaccaaatatgcccttgagcaatgagaatgtactaatggcaggtgatgcatctcttcagaaatttcaaaggaaggagttgtctggaaaagaaagttgctcggaagttcttaatctcttccgtgatgccccatctccatcattttcttcagttaacaaaagctcttcaaatcatggtgcaccgattgaggcaagtaaaacaaaaatccgagatatgaccattatggaaaatagttctcttaaccccaacatgcaagaggatgtaaaggaaatcaatgatcaggagatggaaaggcttaatggtacccaaatcagctctaaatgtgaacactctcatgagggatatttggacatctcaatgcaacaaatgaagctaaagccagagtctgtggagacaacatatgtggacaaacaaaccgcaagagcttcacactccctagcggagagaactgggacaactagcattccggtcactgcaactgaagaaactcattctgttctaacaagtgatcaagtgggaatcaatggaagcatgaacccatccatccatccaatgtttcctgcagatccaaaatttgatagcagtgccacaccacagccttttcctcataattatgctgcctttgctccaatgatgcagtgcaactgcaaccaagatacccacagatcattggtcaacatgtcatccaccttctccagcatgcttgtttccacgttgttgtcaaaccctgccatccatgcagctgccaggctcgcagcatcatactggccagcagctgaaggtaacactccgattgatccgaatcaagaaaatcttgcagatggtgttcaaggaaggagcatagggtctcctccaagcatggcttctattgtagcagctacagttgctgcagcatctgcatggtgggcaacacaaggtcttctccctttcttcgccccacccatggctttttcatttgtgccagctcccagtgctgccttccccacagttgatgttccacgaccttcagagaaagatagagattgcccagctgaaaatgcacagaaggaatgccaagaagctcgaaaacagggacagtttgaaggtttcagagttgccgcttcttcagagtatgatgggagtggaaaaggcgaggtgtctgtccacacagagttaaagatatctcctgtccagaatgctgatgccacgtctgccgcaggagctgacacgactgatgcattcatgaataagaaaaagcaggaccgctcttcatgcggttctaacacaccttcaagtagtgatgtagatgtggacaatgtccctgagaaagagggcaatggtaatgagaaggcgaagcaagcctcctgcagcaactcttcagctggtgacactaaccaccgcagatttagaagcagtggaagcacgagtgattcatggaaggaagtttccgaagagggtcgtctggctttccatgcgctgttcagtagagaaaagcttccgcaaagcttttctcccccacaagcagaaggctcgaaggaagttggcaaggaggaggaagatgaagtcaccacagtggcagttgacctcaacaagagtaccacaagcattgatcatgacctcgacacaattggtgagccaagggcttcctttcccaatgaactgtcgcccctgaagctgaaattgcgccgaacaggcttcaaaccatacaagagatgttctgtggaagcgaaggagaatagggtgccggctagcgacgaggttggtaccaagaggattcgtcttgatagtgaagcatcaacatgagcgatttctacatggttaccgctcggacttcctctgccgccatgaagtttatgacaaagttgtatttacatctaaactagtataggacttaaagaccttgcaatgcaatgcttcatgaaactgttgtgtgctgtattttagtacttgtgaagcagcccggtagactgcttttaaacctttatctcgtagactctgatttaagcatcaagcaactattgaactttatatttttggcgggaaggaaaataattattttttgatttattttgcagggtcatgcatttacatagcactcttgatgcaaaagtttatttcgtaaagttgtagtggaatatgctgagtgagaaggtgaactatttatgactaatatcgtccctgtcctagctaatcgccctactcgactaataatcctcgccccttctcctctatctcgctccactaataatttgaaagtattgttccctgtaattcttgtttgtttctcatgtatgtgcttccattcatttttagtatgtccttagtctttgacagtgccataaataactttaattgtttctgctgtggggtattcatataatacacacacatgagaacctgcgaccattcagtgaagtgctccctatctaccaactattctttaattcaataatcatttcttttagtcttgcatatagatcattctttcatccagtgtttcagtattttagtttttttatactatgaatttgtagagttttcttggttggacctgcaacctttcagtttcagtcctctgttaagaaactagatgggtcggcaattaaacaacaacatgttttatcgtctgttcttgcgaccttgagatttttttttaaaaaaatcaagaattcattgcaggcagctgtaaatgaaatgtttctgttgtctgctgaaactggattcaccagttaatttccaaggtagttctctctgtgtatatatgttggagaattcagacaagtactaccactttgtttcagggaatggtcttttaccatgttgcatgcttcagctttagatgaattgctgtggttacagttttgttcatgctgcataatgtttgcctatagatatgcattgaaaccttaaataaacctatacaaaaattccacttggtatttgaatttgccaattaattaatgtaaacagatagctatataagctgctgctacttttatttgtcatactaagaattcccttgattcatagtagttgcatgctctgctgtgtgatatttgtggatgacctattgttgacactaattcgggcattgtaacataattacaatcaatatttttgagaaatatattgcaaccttcaggcaatatacgcatgtttttgcctgtcatgttgttggttgtagttaagtccattattgttactctttggagtctgtgctgttggggttgggtaggtatgtgagtctgttgttgcctccacagatctccaataaatcacacaagatgagagctgttgctggtgtgtcctacctcgtcattctttgacggttgctattcaggtagcccttgcaataattaaattaagacaggggaagagagaaggaaaggggaacaatgaggaaatgctcatatggctctggaattcaataaattagtcatataatgatattggtccaaaatttaagttttggctttggcctaattagaagaatgtaaccatgaagggtcttattttcagtcatgctctacgcagacaataatatgaggtgaaggatgaaataataccataagatttgattatggaatgtgtttttttggttaaa

SEQ ID NO: 16457 - DNA, 4725 bp, Zea Mays
gcgtgacgagcctcatctccctagcaaaccaagaacaaaagccatccatccgttttgctccgtagagcgagagcgagacagacggttggggaagagtcaggcgagccagcagcagcagcttgctctgccgacgttacaattccgggaatgcgggagggcgtgctcgatagatttcaggggccggagctcgagtaaaccacgagaaaagatagtggctgagatttctcgcggcgctcgccgcgagagcgacccccacaggtcgccgcccctccgcggcccgcgcagcgcacagcatacagtcagcacacgcagcagctgccaccacagcgaacagcaaagcacctccgactcggagtcgcggcgagagccgagaaccttctcattcatcttcctcttctatccatcctgcctgcctgcttgcctccgtattccagctagatctccgggcagccgattgaccgagaagtttgtggttgtggcggcggcggagagggaaacggggagcgggagggcggcgcggatgccactgctgcgccggcgccggcggggccggtgatgcccgccgtggcggtcgcttgaggccgccgtgcgtgggaggtggacgggggagcgaggcggtgcggaccgaggttgcgttgggttggattcgattgggctgcgtctgctgagagtaaggacaattggatcaatttaagtaggtctgggcacacaaatttgaactattaacgcattgggagtgcttgtgtgttagaggtctaggaggagctatgaggtactacttccgtcaggtccagcgtttggttggagatatggaaggaggagctctcttgtttatagatgacctcaactccaagtgacaaagtgaacagctgttgaacttcccgtctatttctgtttctttttgctggatttggagatggaggtgaattcctctggtgaggaaacggtgataaaggtaaggaagccatacacaataaccaagcagcgggagcggtggacagaggctgagcacaaacggttccttgaagccttgaaactttatggcagagcatggcagcgcatagaagagcatgttgggacaaagacggccgtgcagatcagaagtcacgctcaaaagttcttcaccaagttggaaaaggaagctattaacaatggtacttctccggggcaagcccatgacattgacataccgccaccacggcctaaaagaaaggctaacagtccatatcctcgaaaaagtggtctcagctctgagacaccaaccaaagaacttccaagtgacaagtcaacaaaaccaaatatgcccttgagcaatgagaatgtactaatggcaggtgatgcatctcttcagaaatttcaaaggaaggagttgtctggaaaagaaagttgctcggaagttcttaatctcttccgtgatgccccatctccatcattttcttcagttaacaaaagctcttcaaatcatggtgcaccgattgaggcaagtaaaacaaaaatccgagatatgaccattatggaaaatagttctcttaaccccaacatgcaagaggatgtaaaggaaatcaatgatcaggagatggaaaggcttaatggtacccaaatcagctctaaatgtgaacactctcatgagggatatttggacatctcaatgcaacaaatgaagctaaagccagagtctgtggagacaacatatgtggacaaacaaaccgcaagagcttcacactccctagcggagagaactgggacaactagcattccggtcactgcaactgaagaaactcattctgttctaacaagtgatcaagtgggaatcaatggaagcatgaacccatccatccatccaatgtttcctgcagatccaaaatttgatagcagtgccacaccacagccttttcctcataattatgctgcctttgctccaatgatgcagtgcaactgcaaccaagatacccacagatcattggtcaacatgtcatccaccttctccagcatgcttgtttccacgttgttgtcaaaccctgccatccatgcagctgccaggctcgcagcatcatactggccagcagctgaaggtaacactccgattgatccgaatcaagaaaatcttgcagatggtgttcaaggaaggagcatagggtctcctccaagcatggcttctattgtagcagctacagttgctgcagcatctgcatgttgatgttccacgaccttcagagaaagatagagattgcccagctgaaaatgcacagaaggaatgccaagaagctcgaaaacagggacagtttgaaggtttcagagttgccgcttcttcagagtatgatgggagtggaaaaggcgaggtgtctgtccacacagagttaaagatatctcctgtccagaatgctgatgccacgtctgccgcaggagctgacacgactgatgcattcatgaataagaaaaagcaggaccgctcttcatgcggttctaacacaccttcaagtagtgatgtagatgtggacaatgtccctgagaaagagggcaatggtaatgagaaggcgaagcaagcctcctgcagcaactcttcagctggtgacactaaccaccgcagatttagaagcagtggaagcacgagtgattcatggaaggaagtttccgaagagggtcgtctggctttccatgcgctgttcagtagagaaaagcttccgcaaagcttttctcccccacaagcagaaggctcgaaggaagttggcaaggaggaggaagatgaagtcaccacagtggcagttgacctcaacaagagtaccacaagcattgatcatgacctcgacacaattggcttcaaaccatacaagagatgttctgtggaagcgaaggagaatagggtgccggctagcgacgaggttggtaccaagaggattcgtcttgatagtgaagcatcaacatgagcgatttctacatggttaccgctcggacttcctctgccgccatgaagtttatgacaaagttgtatttacatctaaactagtataggacttaaagaccttgcaatgcaatgcttcatgaaactgttgtgtgctgtattttagtacttgtgaagcagcccggtagactgcttttaaacctttatctcgtagactctgatttaagcatcaagcaactattgaactttatatttttggcgggaaggaaaataattattttttgatttattttgcagggtcatgcatttacatagcactcttgatgcaaaagtttatttcgtaaagttgtagtggaatatgctgagtgagaaggtgaactatttatgactaatatcgtccctgtcctagctaatcgccctactcgactaataatcctcgccccttctcctctatctcgctccactaataatttgaaagtattgttccctgtaattcttgtttgtttctcatgtatgtgcttccattcatttttagtatgtccttagtctttgacagtgccataaataactttaattgtttctgctgtggggtattcatataatacacacacatgagaacctgcgaccattcagtgaagtgctccctatctaccaactattctttaattcaataatcatttcttttagtcttgcatatagatcattctttcatccagtgtttcagtattttagtttttttatactatgaatttgtagagttttcttggttggacctgcaacctttcagtttcagtcctctgttaagaaactagatgggtcggcaattaaacaacaacatgttttatcgtctgttcttgcgaccttgagatttttttttaaaaaaatcaagaattcattgcaggcagctgtaaatgaaatgtttctgttgtctgctgaaactggattcaccagttaatttccaaggtagttctctctgtgtatatatgttggagaattcagacaagtactaccactttgtttcagggaatggtcttttaccatgttgcatgcttcagctttagatgaattgctgtggttacagttttgttcatgctgcataatgtttgcctatagatatgcattgaaaccttaaataaacctatacaaaaattccacttggtatttgaatttgccaattaattaatgtaaacagatagctatataagctgctgctacttttatttgtcatactaagaattcccttgattcatagtagttgcatgctctgctgtgtgatatttgtggatgacctattgttgacactaattcgggcattgtaacataattacaatcaatatttttgagaaatatattgcaaccttcaggcaatatacgcatgtttttgcctgtcatgttgttggttgtagttaagtccattattgttactctttggagtctgtgctgttggggttgggtaggtatgtgagtctgttgttgcctccacagatctccaataaatcacacaagatgagagctgttgctggtgtgtcctacctcgtcattctttgacggttgctattcaggtagcccttgcaataattaaattaagacaggggaagagagaaggaaaggggaacaatgaggaaatgctcatatggctctggaattcaataaattagtcatataatgatattggtccaaaatttaagttttggctttggcctaattagaagaatgtaaccatgaagggtcttattttcagtcatgctctacgcagacaataatatgaggtgaaggatgaaataataccataagatttgattatggaatgtgtttttttggttaaa

SEQ ID NO: 16458 - DNA, 4569 bp, Zea Mays
cacaataaatacttctacacgcacttttcaaaagctgagtagcaggatgagcgtgacgagcctcatctccctagcaaaccaagaacaaaagccatccatccgttttgctccgtagagcgagagcgagacagacggttggggaagagtcaggcgagccagcagcagcagcttgctctgccgacgttacaattccgggaatgcgggagggcgtgctcgatagatttcaggggccggagctcgagtaaaccacgagaaaagatagtggctgagatttctcgcggcgctcgccgcgagagcgacccccacaggtcgccgcccctccgcggcccgcgcagcgcacagcatacagtcagcacacgcagcagctgccaccacagcgaacagcaaagcacctccgactcggagtcgcggcgagagccgagaaccttctcattcatcttcctcttctatccatcctgcctgcctgcttgcctccgtattccagctagatctccgggcagccgattgaccgagaagtttgtggttgtggcggcggcggagagggaaacggggagcgggagggcggcgcggatgccactgctgcgccggcgccggcggggccggtgatgcccgccgtggcggtcgcttgaggccgccgtgcgtgggaggtggacgggggagcgaggcggtgcggaccgaggttgcgttgggttggattcgattgggctgcgtctgctgagagtaaggacaattggatcaatttaagtaggtctgggcacacaaatttgaactattaacgcattgggagtgcttgtgtgttagaggtctaggaggagctatgaggtactacttccgtcaggtccagcgtttggttggagatatggaaggaggagctctcttgtttatagatgacctcaactccaagtgacaaagtgaacagctgttgaacttcccgtctatttctgtttctttttgctggatttggagatggaggtgaattcctctggtgaggaaacggtgataaaggtaaggaagccatacacaataaccaagcagcgggagcggtggacagaggctgagcacaaacggttccttgaagccttgaaactttatggcagagcatggcagcgcatagaagagcatgttgggacaaagacggccgtgcagatcagaagtcacgctcaaaagttcttcaccaagttggaaaaggaagctattaacaatggtacttctccggggcaagcccatgacattgacataccgccaccacggcctaaaagaaaggctaacagtccatatcctcgaaaaagtggtctcagctctgagacaccaaccaaagaacttccaagtgacaagtcaacaaaaccaaatatgcccttgagcaatgagaatgtactaatggcaggtgatgcatctcttcagaaatttcaaaggaaggagttgtctggaaaagaaagttgctcggaagttcttaatctcttccgtgatgccccatctccatcattttcttcagttaacaaaagctcttcaaatcatggtgcaccgattgaggcaagtaaaacaaaaatccgagatatgaccattatggaaaatagttctcttaaccccaacatgcaagaggatgtaaaggaaatcaatgatcaggagatggaaaggcttaatggtacccaaatcagctctaaatgtgaacactctcatgagggatatttggacatctcaatgcaacaaatgaagctaaagccagagtctgtggagacaacatatgtggacaaacaaaccgcaagagcttcacactccctagcggagagaactgggacaactagcattccggtcactgcaactgaagaaactcattctgttctaacaagtgatcaagtgggaatcaatggaagcatgaacccatccatccatccaatgtttcctgcagatccaaaatttgatagcagtgccacaccacagccttttcctcataattatgctgcctttgctccaatgatgcagtgcaactgcaaccaagatacccacagatcattggtcaacatgtcatccaccttctccagcatgcttgtttccacgttgttgtcaaaccctgccatccatgcagctgccaggctcgcagcatcatactggccagcagctgaaggtaacactccgattgatccgaatcaagaaaatcttgcagatggtgttcaaggaaggagcatagggtctcctccaagcatggcttctattgtagcagctacagttgctgcagcatctgcatggtgggcaacacaaggtcttctccctttcttcgccccacccatggctttttcatttgtgccagctcccagtgctgccttccccacagttgatgttccacgaccttcagagaaagatagagattgcccagctgaaaatgcacagaaggaatgccaagaagctcgaaaacagggacagtttgaaggtttcagagttgccgcttcttcagagtatgatgggagtggaaaaggcgaggtgtctgtccacacagagttaaagatatctcctgtccagaatgctgatgccacgtctgccgcaggagctgacacgactgatgcattcatgaataagaaaaagcaggaccgctcttcatgcggttctaacacaccttcaagtagtgatgtagatgtggacaatgtccctgagaaagagggcaatggtaatgagaaggcgaagcaagcctcctgcagcaactcttcagctggtgacactaaccaccgcagatttagaagcagtggaagcacgagtgattcatggaaggaagtttccgaagaggttgtaatctaccaacactatgccaattcactctgcccaaacctttgagcatgccgcactgcctttctaattcactttttttgttggcagggtcgtctggctttccatgcgctgttcagtagagaaaagcttccgcaaagcttttctcccccacaagcagaaggctcgaaggaagttggcaaggaggaggaagatgaagtcaccacagtggcagttgacctcaacaagagtaccacaagcattgatcatgacctcgacacaattgggtcatgcatttacatagcactcttgatgcaaaagtttatttcgtaaagttgtagtggaatatgctgagtgagaaggtgaactatttatgactaatatcgtccctgtcctagctaatcgccctactcgactaataatcctcgccccttctcctctatctcgctccactaataatttgaaagtattgttccctgtaattcttgtttgtttctcatgtatgtgcttccattcatttttagtatgtccttagtctttgacagtgccataaataactttaattgtttctgctgtggggtattcatataatacacacacatgagaacctgcgaccattcagtgaagtgctccctatctaccaactattctttaattcaataatcatttcttttagtcttgcatatagatcattctttcatccagtgtttcagtattttagtttttttatactatgaatttgtagagttttcttggttggacctgcaacctttcagtttcagtcctctgttaagaaactagatgggtcggcaattaaacaacaacatgttttatcgtctgttcttgcgaccttgagatttttttttaaaaaaatcaagaattcattgcaggcagctgtaaatgaaatgtttctgttgtctgctgaaactggattcaccagttaatttccaaggtagttctctctgtgtatatatgttggagaattcagacaagtactaccactttgtttcagggaatggtcttttaccatgttgcatgcttcagctttagatgaattgctgtggttacagttttgttcatgctgcataatgtttgcctatagatatgcattgaaaccttaaataaacctatacaaaaattccacttggtatttgaatttgccaattaattaatgtaaacagatagctatataagctgctgctacttttatttgtcatactaagaattcccttgattcatagtagttgcatgctctgctgtgtgatatttgtggatgacctattgttgacactaattcgggcattgtaacataattacaatcaatatttttgagaaatatattgcaaccttcaggcaatatacgcatgtttttgcctgtcatgttgttggttgtagttaagtccattattgttactctttggagtctgtgctgttggggttgggtaggtatgtgagtctgttgttgcctccacagatctccaataaatcacacaagatgagagctgttgctggtgtgtcctacctcgtcattctttgacggttgctattcaggtagcccttgcaataattaaattaagacaggggaagagagaaggaaaggggaacaatgaggaaatgctcatatggctctggaattcaataaattagtcatataatgatattggtccaaaatttaagttttggctttggcctaattagaagaatgtaaccatgaagggtcttattttcagtcatgctctacgcagacaataatatgaggtgaaggatgaaataataccataagatttgattatggaatgtgtttttttggttaaa

SEQ ID NO: 16459 - DNA, 1106 bp, Zea Mays
gatttctcgcggcgctcgccgcgagagcgacccccacaggtcgccgcccctccgcggcccgcgcagcgcacagcatacagtcagcacacgcagcagctgccaccacagcgaacagcaaagcacctccgactcggagtcgcggcgagagccgagaaccttctcattcatcttcctcttctatccatcctgcctgcctgcttgcctccgtattccagctagatctccgggcagccgattgaccgagaagtttgtggttgtggcggcggcggagagggaaacggggagcgggagggcggcgcggatgccactgctgcgccggcgccggcggggccggtgatgcccgccgtggcggtcgcttgaggccgccgtgcgtgggaggtggacgggggagcgaggcggtgcggaccgaggttgcgttgggttggattcgattgggctgcgtctgctgagtggcccaggctcttggaggacagcaatggatcagtgacatcttgacacttctttcctggacggggatccgacaatttttgctgatttgggatgatgtaagcaatattgtgttaacacaggaggcggatattcacacctggctgcatacttcctctgagtaaggacaattggatcaatttaagtaggtctgggcacacaaatttgaactattaacgcattgggagtgcttgtgtgttagaggtctaggaggagctatgaggtactacttccgtcaggtccagcgtttggttggagatatggaaggaggagctctcttgtttatagatgacctcaactccaagtgacaaagtgaacagctgttgaacttcccgtctatttctgtttctttttgctggatttggagatggaggtgaattcctctggtgaggaaacggtgataaaggtaaggaagccatacacaataaccaagcagcgggagcggtggacagaggctgagcacaaacggttccttgaagccttgaaactttatggcagagcatggcagcgcatagaagagcatgttgggacaaagacggccgtgcagatcagaagtcacgctcaaaagttcttcaccaagtaatggaaggagaagcaggtgaagtacaaagttgacatga

SEQ ID NO: 16460 - DNA, 989 bp, Zea Mays
ccgacgttacaattccgggaatgcgggagggcgtgctcgatagatttcaggggccggagctcgagtaaaccacgagaaaagatagtggctgagatttctcgcggcgctcgccgcgagagcgacccccacaggtcgccgcccctccgcggcccgcgcagcgcacagcatacagtcagcacacgcagcagctgccaccacagcgaacagcaaagcacctccgactcggagtcgcggcgagagccgagaaccttctcattcatcttcctcttctatccatcctgcctgcctgcttgcctccgtattccagctagatctccgggcagccgattgaccgagaagtttgtggttgtggcggcggcggagagggaaacggggagcgggagggcggcgcggatgccactgctgcgccggcgccggcggggccggtgatgcccgccgtggcggtcgcttgaggccgccgtgcgtgggaggtggacgggggagcgaggcggtgcggaccgaggttgcgttgggttggattcgattgggctgcgtctgctgagagtaaggacaattggatcaatttaagtagaggtctaggaggagctatgaggtactacttccgtcaggtccagcgtttggttggagatatggaaggaggagctctcttgtttatagatgacctcaactccaagtgacaaagtgaacagctgttgaacttcccgtctatttctgtttctttttgctggatttggagatggaggtgaattcctctggtgaggaaacggtgataaaggtaaggaagccatacacaataaccaagcagcgggagcggtggacagaggctgagcacaaacggttccttgaagccttgaaactttatggcagagcatggcagcgcatagaagagcatgttgggacaaagacggccgtgcagatcagaagtcacgctcaaaagttcttcaccaagtaatggaaggagaagcaggtgaagtacaaagttgacatga

SEQ ID NO: 16461 - DNA, 1045 bp, Zea Mays
gatttctcgcggcgctcgccgcgagagcgacccccacaggtcgccgcccctccgcggcccgcgcagcgcacagcatacagtcagcacacgcagcagctgccaccacagcgaacagcaaagcacctccgactcggagtcgcggcgagagccgagaaccttctcattcatcttcctcttctatccatcctgcctgcctgcttgcctccgtattccagctagatctccgggcagccgattgaccgagaagtttgtggttgtggcggcggcggagagggaaacggggagcgggagggcggcgcggatgccactgctgcgccggcgccggcggggccggtgatgcccgccgtggcggtcgcttgaggccgccgtgcgtgggaggtggacgggggagcgaggcggtgcggaccgaggttgcgttgggttggattcgattgggctgcgtctgctgagagtaaggacaattggatcaatttaagtaggtctgggcacacaaatttgaactattaacgcattgggagtgcttgtgtgttagaggtctaggaggagctatgaggtactacttccgtcaggtccagcgtttggttggagatatggaaggaggagctctcttgtttatagatgacctcaactccaagtgacaaagtgaacagctgttgaacttcccgtctatttctgtttctttttgctggatttggagatggaggtgaattcctctggtgaggaaacggtgataaaggtaaggaagccatacacaataaccaagcagcgggagcggtggacagaggctgagcacaaacggttccttgaagccttgaaactttatggcagagcatggcagcgcatagaagagcatgttgggacaaagacggccgtgcagatcagaagtcacgctcaaaagttcttcaccaagatgatcccaaatgtcagtgggatgggccgatggggtgccaaatcctgaaccagccaatcttaagagtcttcatggaacaaaaagtgttggctcaatgaggttgcattgtccctctctgtggcatatttgccaatt

SEQ ID NO: 16462 - DNA, 4713 bp, Zea Mays
caaaagcaggctgtcctctagatgctcaagacttattccatcacgcaccaccttagggccttggaatgaccggtagccaacggaacaagggattgttggaactggaccgccgacacatggcgtatccgttggggccgcccgcacacacggtgtgcccacctaggctgtcgggccgcgacacacgcgcccgcacgtatagcagcgggctttaggtctctcgggccaacactccccccaaaaagctagccttttagggggttgcaccctcaaccatataaaccatgctatctcaccatcaccacacaatgtgggactattcccaacaatctccccctcacacattgtgagccgagatttgtctgagaatgcactgggccaacctgactttgataccaattgttggaactggaccgccgacacatggcgtatccattggggctgtccgcacacacggtgtgcccacccaggctgtcgggccgcgacacacgcgcccgcacgtatagcagcgggctttaggtctctcgggccaacactccccccaaaaagctagccttttagggggttgcaccctcaaccatataaaccatgttatctcaccatcaccacacaatgtgggactattcccaatagggatgtcaccgacgcaagggagaagggagtggcccccgagcctggagtaggagtaggcaccaacgtggggctgtggggggttgaggcgccggggagggaggggagtttaggggttgggaagcacatactgaaggcttgtcaggttgctggttacttttttcttgtaagtaaatatccctagatacatatgtaaaaaaggaactatgaatttcatgtactttatagggctccaacacttgacttttgtgtgcctcaggtttgtgttttagggatggtgtggctgaatgggaactccatcttatgccttgcaccagaagtgtttgctaaagttaataaaaaactattgcttctcgattagttgcccaggatcttcacctcaaatcgtgggttagagacatcagctcaccatatcaactatgtcaaatgtgatatcctttgttctggtgttgtttagccgaaggttactggcatacttatttttccaagtgttactatttgcttcccttcgaagccacaaaggggattcatggcttgcatccgatcatcaggttcttgcatctgcatgaaagcttttgcaaaaatgatagctgcccaactgcctgtgtccactaagacattgtggaccacaaaaccttttatgacacatgatatcaccatgacatcatcgtgtgggtaatccttgaggtaaaggtcttcttgagaaaaaggtgattagaatatgagaccatttggatcttatgtagggcccttggatcccaacatgctgcatccttctctgcgcttccttcttctgcctcttgttgctgggcacaaagcttgatcctctgtgatagggaggataagttgttttcgaccttgtgaagaagcaccaaagctagcgttgcttgttatgttcttcgaagttgcgagttaatcggaagtgggcgccaatgttggtcacctattcagattcctatgaagaaccaaaacagggcaacacaattaaagtaacgatgccttcctttaatccactccttgtgaagaggttgactagaggaagaatgtttggatggacgataataaataaggaaacaaaggtataaagacatccgatataagtcgatatgtgtattctcttcttcttattcctttgtcacgaaaggttacaatgataccttggagaatccagacaatggtccgaagccctatacatatgaactgcaagatctactgagggtatcattgtcttttccttccaaagacgtaaggtgcacgtcacctgatctccacttcgcctccctgttgttgttccagatccgctaaagagctttggttaattgttgatgtcgaagccttcacttctggttagcaaccttcggttgaggcacgctgtgacgaaggttaatctgaaaacagatcacaaaacaacttgaaacttgttagtgtgaggaccttcggctaagacatactcctaacaaccattagacgatcaaaggctgagtaatactcatcaatagacatatcatgttgctcaatgatatgagtttgctgcataaaggtgtgtaagagtgtaccactatcctgaacaaagcgttccttcaaatgtgaccaaatagctttagcagttgtgaatttgacaaactcattatcatggatggtttgctattcactattgcaaccataaccttgccatcattaatttgccatgttttggtcgctgcagcattgctaagatcatcagcaagaaccggtggagcttcagtcaggtgaaagagtaaactacgaactctcaatacagtctgaacacaaaaggcccactcggggtagttctgaccatcaaacacgatattgacaactatagtattgattgacataacgatgaaaaagcaactgaatttataaacagagaactgagtaccaaatcaccgaaggcagatcagatccaaccagttactagatgttctgagttggagcacatgagtgtagggtaccagactgtgcacaatcctgacaaaatacaactggaatgtcccagcagcagcagccccaacgacaagacgactatggtgaaaacgttgcacccgacggctagcacagcaaatgacaaaggaggtggccacagtgccctacaaccaggccagattggttcaagtcgacgaagaactttggtccagtttgaccagatgatggtgcgggagccccaagcggacgcgagcacatgctagagatgaaggcgtgcaacgatgctccccggcggacgcatatcgagcggggaagatctgtcggtggtggtcgcgacacccaggcagacgtgctgctgagcggtgtcgccgcaagtggtgaggacgacccgcgacagatgaggcgcgacgacgccgagggtgaagcgaccgtgggaaaatgatcgcgacggccgaaaaaatgggtggggttagagggcgggattaaagctaatcctaaccctaacctgccttgttaccatgttacctttggaaatgacgaaggataataagtccataggggttgtagagatcatatctatagaccaacatgccttagcaataggatgggcctaatgggccttaacaatatgagctttagatcttaaattttgtggctgaaaaatagtgcgttactagccctgtatagacattctaaaaaatgtagtcatgtggtaactgtttgatgtatatagatgggtctctatgttttctgtatttccccattgtataaggggtttagtgcatatttacaagtgctattcataacatggtaccagagacagaaattagggttagattttttctctaaacctaatcttttctttcctacgcacttgcctgctcgctgtggttctgttcacatttcggattcttcttggcgactctccaatcgcgtggcttcatacaggccatcgcgttcgtcgcctcgtcatccaccacaccgcacactcatctattgcatgttgtagaacaatagtcatagaagctgaaggagagtaacgatcagtaggatgccgaagacgattactacttctaagagacggctctggtgtagaagcaggagaagaaattgacccaataggagaggacaaatcaataggagcaaatgacatgattattacaggggaataggggatgattctcaatttattacctttttgtgaaggcacgtcttagtgaatagtttcttatgtccgatcttggtcctcttttgtattttcttgggattgaggtttcctctacttcggagggcttctatctctctcagaagaaatacattcaagggcttcttaatcgacttctcttactaatcaccgcactatcgagactcccatggagctcaacgtttgtcctcgtgccactgatggtaagcctctttcggatcctactcgctatcgtcacattgtaggtagcctagtctatcttggtgttactcgccctgatttttttgtatctttgtgcatattctgagttagtttgtttttgcccccacttagcttcattacaataatcttattcatgttctatgttatcttcgtgggattatttctcggcgtctattcttttcttgctctagctccttgcagcttcatgtctactgtgatgcgacttgggctagtgattcctcagatcatcagtctctttctgtctattgtgttttttggtggttccctcattgcttggaagactaagaagcagttagcagtttcctgtttgagtacaaaggctgagttgcatgctatggctcttgaggtggcagatgtgacttgactatggtggttgcttgttgatttttgtgtctataccgattctctttttgtctgacagtactggtgctattagcattgctcgtggttcagtaaagcatgagcttactgagcatattggtgttgatgcttaatatacacgagcataggtttaggatgatatcattgatctttgcctttagagcttcagttggctgatttcttcatcaagacacaaactggatcaacattgattctatctcttcaaactcaatgtggtagaaaaagcaaaagcgcgatgtcctttctgctcccgccccttccgctcccgtcccttccactcccgtcccctgacc

SEQ ID NO: 16463 - DNA, 1392 bp, Zea Mays
gaattacagaaacctagcacccgaacacaccacgtccaaacataggagcaagtgagcaaccaaccattggaggcacttaattagcttgtggtgctcatagctaggaatcatacatgggcagtagtagagctctgttcttggcgaccgtcatggccgtggccatggccatggtcttctcaccctactaccttgccgtgcaagggctaaaagtaaactgtttcgacttgcatggagggaaatgcgacaaagagacgtgcaccatggtttgcaaggcgaccgggtacgtcgaccctgtcgtgaaatgctccaacccccctgggaaaagcggccagtgctgttgctttgtgaagtgctgcgggggagatgcttcggttccaagcctgctgtgagactcgtacgtattggtagctagctatatacgctgcttgcgtgatctgaataaatggttgatctgaataaatggttcctaataaatctttgactattgtttcttctcgttaattatatatgtacagaacgtcagcaaattttgtaatgctattgaagttcatatacgaatcttgtcgaagtcattccacatatcagatgtggaagctctatttcttacccgagaactagtaggtgtgtcctcttgtcgaagtcattccacatatcagatgtggaagctctatttcttacccgagaactagtatgtgtgtctgtctcctcgacctctgccacatcagggtcggaatctataatgataggatcagttgaaggaattgcaacctcactgccaccgatttggccagccacggtgtcgtcatcggcgaccatcaagcacgtacaaatcacaagcacaatattaacaacttatcaaagtcggagctccagatcgatccctcacgactataaacacagaacaagaaggcactagattagggttcgaactcagatcacaagtacatatcataagcacaagcaccaaattaagaacttaccaaagttggagcaccatatcggtcccctcacgactacaaacacagaacaagaaggcactagattagggttctaacacatatcacaagcacaagcaaaagattagcaacttaccaaagtcatagcaccagatcggtccctcacggctacaaacacataacaagaaggcactagattagggagcacaaacacagatcacaagcacaagcacaagattagcaacttaccaaagttggagcacaagatcgattcctcacggctacgaacacagaacaaaaggcactagattagggttcgccggttcgagcacagatctagaggcgccgagggaggcggtgctttcacaatcgctagagggttcgagagagatcgagtgagagaggagcttgagagagagagagaatgagagaggag

SEQ ID NO: 16464 - DNA, 230 bp, Zea Mays
caggaactccacaacacttttagaagagtattttacttccccaccaagcaccgaaaaaatacaaatgagttacaactcaacattcgccttctatttggaaccttttcctttcaacaaattaaagtggtatgataacagcaagatgtgctattgttctttttttgacaaaccacagtaacttgtgtgttaaactacgataccttttgaacatcggcaattgctgcttgaag

SEQ ID NO: 16465 - DNA, 2417 bp, Zea Mays
gggatctccaaccacacgacatatgtagcacttaacccttgcatatgtctaccattcccacgggtcctccactacgtgaaccggtccgcgccacccgagagtacggtactccaccatccagccacgtgccaggtgggtacacgccactcccgccatctctccactcccagtgcgcgattgtcttttcacatatggagtagccgggttcaggcttacccatgacgaggtatgtggccagttaaaaggtcctagatcaacaggcctacgatcggtacggtccttgaacgacacagacgggcgacctgtccagctcaacgtctggtctcattttaaacaaattctcaaagtttgatacctgacagaggtaccctgcttgaatgatgaattcatccccgcggaggatgcctccatcatcccaagccctttttcttttttaaaaaatcatgagtcatagatcaaaaacatttttcttaatctataagcataactaagcattactagtttttataaaataggtaacaaggtatgataatcaatctttcaaggatggtaatgcatcaagtgtttaatcattcaactcctattacctaatgcagcatataagtgataaaattttgtaatacaaggaaggtggcaaatgcaccggggcttgcctgggataacactatgttagtgttgttagatgatggccacttgacgatcaacttttattctgacacccgcttagttcatctagcttcaggatcatcggccgacatcgtcttgtgagttgttttgatccacacccttcgcttcgcacgattttcaactagcgtaccacaacatgctccgactcgatttcaacaagaacgaagacggccaccagttcgagcataccatcgaacacctaaggagcgttgaacttaaccttcttctccacctaattctccaaggattttactccatatcgcacacatcaacacacataaaacctcacatcagcagggtattaataagaactagtaaaacaacaaaggaatttagaaatcaccatgggagcagcagaggtggtcggccatgggaacaagggaggggctgggggcatccacttgctgcagaaaaggggagggcactgcttgctgcgatattctgtcgaacacgtcgagggcgcgacacgatggggtttcatggttgttgctgctataccgtgaccgggcttgaagataatctagtgcaggagcaaccggcaatggcgaggtggaggtccggccatcaggggcgccagccatggagggagtcccctgcgctgaaccagagaggaggggtcgcccggcttggaggagcagagagtgccatggtttggggcgtcagcttggagaggggtagcgagcagcatcggcttggagagctagagccagggagggacaagggcagctgctgttccacagctgtaaccagagaaggagacgccagggggaggagcagagggcgcggccatgggcgactaggggaatggagtgcgccataggagggagaaatggatggagcggggagcaggacggatgccgcggccagaggaagtcgaggtcgacggcgtccatggctggggcaggggcgagcgccagagaataggaacggcgagcagggagggcggtcggtgctgttgccagcagcaggaagcgccgccatggaaagcaagggcggcagctagaggatgagaacaagcgtcggcttgtgcaggtgatgaggacgtacgggaggttccagaaattgagtacgtggaagaattccggaaatttctgggcatgaggtggatgagatcggcaccacgaatggtggcttcacgaaggggataagtcagagggtttaggcggtggaagggagaaaagaaattcagattttttttttattttctccaatttttgttacaaaagactacacagataatttagttcacagattaggtctgcgcgagatgtaaccgaacgaaacaaaagataccagtcaaactagtacagactgcgcttgatttaatttagagcagataatttactggacgaataaatttcaattataaatcctcaaacgcgatttctcagtagacgagggagacgaaattattttgcaccaaaaactttagttgtcgagatccgcttaatttacctgggacaagatggtattgtttcattgatttatctgagatcaaataaattcgcacgccaccaaatacttggatttcgctgccataaatagcgtgcaggatgaaaccaacctcaattatctactttgtgtgtgttttcctcgaataacacgtgcagtccagatttatggaatcaatcgatacccaaattttacactcgctagcacatcggacatgcgacagcggagtgacggaaagcgcgacacgtagtgaagagttgaatcggtggccgatttgg

SEQ ID NO: 16466 - DNA, 1137 bp, Zea Mays
gtttatgcaaacaaactacctacattctaccagcacacaagcacgaaaacaaacccaagttgcactagcggtcaaattaagaagaacacaggccacataaacatatgtctaaaggacataacaaacaaaactaaaaattgcttataggacagtcatgcttcacacatttcctaattatttattatcggaataaagatgagggaagcacgttcgttcacaatcaccaattattagaataaaggtgagagaagcatatttgtgcacaaacgacaaacacaatgcaacaatcaggatgcatgcttgtcctattcgtcctcacgaatttcgccaacataatgtggcaatagcgttctatatcggtggcatatccacgttctctctcggtatattgctagtcgtcagctacacatacgagttcgaggttagtgtacctgtagaaaattccatcacagcccaattctcaatgatgcaattcacacataacagtttatcacagtttatactccatatattgctatatggaggccagctcctcattaagcgccgagccacgcataggcgctgctgccacactttaaccatagggcagctcattatggtaactcaccttcttacctgagcgtaggtgcgtcgttgcaaatacattacacttctcagtattcccatgtctgtatatccatacacatccatgggatactaaatcccggaaaagtaattactccacatcgcagccttcatatatacatatgtgtaacatgtatataatcaagcgccacaattaagcactcccctagaccgacgtttgttcagtcatgctctcacaactcacgttacctgagcgtcgatccattcaaaactgaatggcctcaaaaataacaatacacatgtatgcattacccccggttgtgggttagtggtttttcaactaagccacctgatagtccttagtatagggcttaacaaaggatgtcgctagcattatagtttttcaaatctgtttttcaaaagcaaacaatgtgtttagttgaaaataggttttctaaaaccaaaacttttgttttgaaaatacgtatgtgaccgtattatacttaatcatgctccgataccagctgtggcagaacctcccaagttatcggg

SEQ ID NO: 16467 - DNA, 1817 bp, Zea Mays
gggatctccaaccacacgacatatgtagcacttaacccttgcatatgtctaccattcccacgggtcctccactacgtgaaccggtccgcgccacccgagagtacggtactccaccatccagccacgtgccaggtgggtacacgccactcccgccatctctccactcccagtgcgcgattgtcttttcacatatggagtagccgggttcaggcttacccatgacgaggtatgtggccagttaaaaggtcctagatcaacaggcctacgatcggtacggtccttgaacgacacagacgggcgacctgtccagctcaacgtctggtctcattttaaacaaattctcaaagtttgatacctgacagaggtaccctgcttgaatgatgaattcatccccgcggaggatgcctccatcatcccaagccctttttcttttttaaaaaatcatgagtcatagatcaaaaacatttttcttaatctataagcataactaagcattactagtttttataaaataggtaacaaggtatgataatcaatctttcaaggatggtaatgcatcaagtgtttaatcattcaactcctattacctaatgcagcatataagtgataaaattttgtaatacaaggaaggtggcaaatgcaccggggcttgcctgggataacactatgttagtgttgttagatgatggccacttgacgatcaacttttattctgacacccgcttagttcatctagcttcaggatcatcggccgacatcgtcttgtgagttgttttgatccacacccttcgcttcgcacgattttcaactagcgtacctaattagatgtacaatgcacatgtataaacataaggaaaaataacacaacatattacacacaataaataattaagcacaatgacaaggcgctgcaacacttgtgagaaaatactagacgccaacaaatgactaagtacaacaaggacgaccacgggttctaacccaaacatcgagaaactttaaacgaatacaagtcctatcgtacttaggtagagtataatacaaaagattcatccgattaaattcactataactggcttctaggactaacatatggagagaagcaaactaacacatttaacacaattagcctaaacagacttatcagctaattattgaaatgctacatttatctcttgcattattatttataccacacatcgctcatgcagaactaatttaattttacttcgtattactgatttcaccatacttacacaaatctaaatagtcgcaactcatttacattcatcaaggtatttacctcctccttaattcaatcaagtctaaagcaaacatttagaaagaatgaactgaccatatataacaaagaatttggataaacacttcatatgcaacaagttttcatcaatcaaggatcaaggattgactaatccttcctaggcaaacaaaaatgacaccaagaaatcagtttaacacatgcagattttctagacagcagcatagtggttaactgttttattcataacttacacaatattcatccaaaaatagtaaactaagactttttggaaagcttataaaatcctctataattttggtattatcatcacaatgagattcgacatttaaaaatgtcaaacagtactaaacgcaatttctgtccagatttggacagaattcgactacttacttcattaattcataactagagtttcaggcacccaaatcaggtgattctagactttttagaaagctagtaaaattgtctacaacttatttataaacatctcaaggtaattcaatgtgtatcgaag

SEQ ID NO: 16468 - DNA, 955 bp, Zea Mays
ctccagaagcgactgcccatctctgcccaggacaagaagtggtcagaacggaccgtggtccgtgaggccaccctcgcggcgccacgtcggcgcttctcgcatgggcagaagatgcacatgtgtcggagcagctgaggttgccgactccgccgcccgtggaaatgggacccggccggcagcatttcccagctgggcgcagagatcctggcagtggcatcctcatccaaagacctcgagtagtagatgatggtctcctaaagcttgaggaactgcaatgaaagacccaagaactgaaagtgaaaacggctggtgctgctatactatatgcctaccgtgtagggaggcgtggtgatcggcctgtgcacggcgttccaggtgtggagcatcgggcgcaaggggcctgtgctcgtgtccgtgttcaacccgttccagacggtcttctcggcgttcgtctccttcgtcttcttcgctttgtggggatcgtgctcatgttcgctggactgcatgtacgtggtgatctgggccaagaacagggaggacgacatgttcgccggtctggaactggatgcgatgtagagaggccgctgcttcgatgacgacgagccaggcaaaaaccgtctggttgcgctagctactagcaccagtagtgcgagatcttttaggccctgttcggttgttccggattggagccacggattaattcctagccggattacttctctaatttatatagattttgatgagctggaatgaatcctggcttattccggtacaaccgaacgagcccttagtgttaaattaaaggaatgcgtctggatgtaatgtacgtacgtctggttcgctttgctgaaggatcgaggaggcgttgagcttgctcacagtacgttttgtcggattttctacatacacttcttccgttctgctggccttatttcatttctttccttttttttct

SEQ ID NO: 16469 - DNA, 2820 bp, Zea Mays
ccaaatacaggataacttcattggagaaaaactacattcctaaaatgattgtccctgaggatcttgggatacctcttgatctacttgacatgagtgtatacaatccccgggatgttcagtcgcgcatggctcctgaagatgaagagctattgcgtgatgatgaggtcctcacccctattaaacaagaaggtacaaggaaaagggagaggcccactgacaaaggtgtttcttggctggtcaaaacacaatacatatctccactaagtactgatgcaaccaaaatgtcccttactgagaagcaagcaaaggaaaggcgagaaacaagggagggtcgcaatgctttcctagacaatcttaatgatagagagaaacagatcaaagccattgaagaatccttcagagcagccaagtcaaggcctgttcaccagactaaacgtggcatgcaagctgagtgggttatgcctttgctacctgattttgataggtacgaggagccgtttgttatggtgaattttgatggcgatccaactgctgattctgagcagtacaacaaacttgagagacctgtacgtgatgaatgtgaatcccgggctgtgatgaaaagttttagtgtcagtggttcagacccttcaaaacaggagaagtttttggcatacatggccccagcaccccatgagctcgccagagacttggatgatgaaaacgatgatatccagtattcctggctaagagaatatcactgggaagtgagaggagatgataaagatgatcctacaacataccttgtcacatttgataaggaggagggtgcaaaatatttgcctctccctactaagctagttttgcagaagaagaaggcgaaggaggggaggtctggggatgaaattgagcattttccagtaccttcccttattactgtgaacaaaacaggtcatgttggtaccatggagcgcggagaatcttctggcatgcatgtgaattcaaagccacggagacctcatgttgatgatgatcttgatgagcattcaaagcgttctagggtagaagatattgaccaatatagtggagaagaatattctgagtgatgaactgtaaatcataattatcttgcaccaacgaattttatcagtacatgtgaagccttaaaaggtttcaagcaataggcacaagtggtttcatggtgcatggtcatgcagtgaaagaaaatgtctgacaacaagaggacattggggcttggccaatttgttgatctctgtagtgataatagaaagcgtcacattgttctaaagaagttgtcttcaaagtcttggatgatgcgtatattgcagttgctccacatgttccaggatagtgaaattttattcatggttgcctgataaagtgtggaattatataaattttcagcataaattgttttattattaacgttcgtttttgcctaaaataatgcataagtatatgagatgataaaagggtaatcatgaagcattctgtggtccggtggcccttaagttgcaattctattccagcacaaagtgacaatgatatgatgacttttggtctggtattattaattctggacagtaattcagtagctgtggtaacggcaaaatacctcagggttaagctggcatgcaggttactgttttcattttatgtagcctggaggaccattttctgctggcagccaggtttggctgagttttatggatgctaagatatggttcccctcaagtgacagcattgtattgtggtatgtctgacatcttgtacactaatgccatcagcaatcattttgggcttcatgtctgatgttagttgttgacatcataactcatggaatgttgcaaaggaatgatgctgtagctgtagctgtaatgtgaacggactgtaattcacaaatttcttgatttgttttacataggatgtccatatgctctttaatagacctttaccagttgtttactacaggttctttcaatccctgcattatacagtcttttgtgatacatgttacatcctgtgtagttcttcaactccttatgatttatagaatatttcaattttagattcttaaaatactgtttgctttatctatactcttgtggatttgttttacagtcatccgattagttttgtaaacattcatgtttttctaattaccaggtagcatgtccttgagtaacttattaagcagttcaatttgtctgctgatagttatggtatagtcaaagttggcaggctgccaacaacataactccaatttccattctttttagtcctggctgatctatactgcatgtacttctatttccattctggatttagcatctggaatataggattgtttcaatgcaacagtctcgctagtgcttattgacctttcagttgctctacatgtttctgattgggatcatcccagctgggaagagagtccgaatcatatctctagatctgtgtctgcttgtcccgtcaatttgtgattacctgttcaattcatgtgtctattaaagcttgatgccagtgcccttaaaacaaacgtgttgctacgcatgttgttggtgctattaaaaaatagttttggtgtgtgacctagcttgttgtcatgcgcctgtggtttgaagaacgttatgctgttgtatgggcaatgtttgcgtaatgcccaggggaacggtgccaattgctggaacaaattcgggtaaggtgacgtggtgagctgctgtctgtagtgtgtggacaactgcagtagtaccatggttcacaggcagtgacaagcttcttaagcatacaaacgaaggaagatagacacaacctaacaag

SEQ ID NO: 16470 - DNA, 3007 bp, Zea Mays
aataaatctgattagatatctaaacccgtgcaaaattcattcaatcctggacgaaaaaggcaggcagaatcacaagctgtcgtgaaattctcatcgccccttccttccttcctgctcctcgccaaatcgccgagacgccgactacctcgcgctcccatagatctggtagaataggtgccggtggcctcggacgtgcagtggtagaggcttctgcggtggcggcgacggaggagaagggggagcgagcagtgtccgcggggcgcggtgtctgtgtgctggggctcgggttccgaggaaccctagccgccgcgcgatggcgtcttacaggccgtacgcaccgccgcctccgcagggcagctacccgccgcagatgaatccgtacgcgccgccgcaggcgccctacaacaggatgccggcgccgccctaccacgctgggcccccgcccccgccgccacccggtccgccaccacctcaccaaccgcagttcaatttcggtcccgggcctccgcagcagcacccgcccccgccgatgtactaccagccaccgccaccaccctatggcgggaacagtaacccgcctcctcctcctccttcagcgccacccccgcctccgtccccaccccctgctgctccaccccctccgcctccggcccaggcaccgtctgctcaggccctgctgccctcaaaggagcagcagcctaaggcaacgctgccaagagaggagacggaggaggagcgtcgtgcacggaagaagcgggagttcgagaagcagcgggtggaggaacgcaagcagcagcagatgatgcggcagacgcaggccaccattctgcagaagacgcagcaggtgcgtgcttctcagcagcagccgcagagccgccaccaccaccaccagcctccgagtatcttccgggcagcagcaattggctctcgggcagtggcaactgggtctcgcccagcatcagcgccgaatgctgagaggtttgagaaccggttaaaaaagccaacaacgttcctctgcaagcacaaatttaggaatgaactcccagatccaagtgctcagttgaaatggctacccttgaataaggataaggaccgatataccaaatacaggataacttcattggagaaaaactacattcctaaaatgattgtccctgaggatcttgggatacctcttgatctacttgacatgagtgtatacaatccccgggatgttcagtcgcgcatggctcctgaagatgaagagctattgcgtgatgatgaggtcctcacccctattaaacaagaaggtacaaggaaaagggagaggcccactgacaaaggtgtttcttggctggtcaaaacacaatacatatctccactaagtactgatgcaaccaaaatgtcccttactgagaagcaagcaaaggaaaggcgagaaacaagggagggtcgcaatgctttcctagacaatcttaatgatagagagaaacagatcaaagccattgaagaatccttcagagcagccaagtcaaggcctgttcaccagactaaacgtggcatgcaagctgagtgggttatgcctttgctacctgattttgataggtacgaggagccgtttgttatggtgaattttgatggcgatccaactgctgattctgagcagtacaacaaacttgagagacctgtacgtgatgaatgtgaatcccgggctgtgatgaaaagttttagtgtcagtggttcagacccttcaaaacaggagaagtttttggcatacatggccccagcaccccatgagctcgccagagacttggatgatgaaaacgatgatatccagtattcctggctaagagaatatcactgggaagtgagaggagatgataaagatgatcctacaacataccttgtcacatttgataaggaggagggtgcaaaatatttgcctctccctactaagctagttttgcagaagaagaaggcgaaggaggggaggtctggggatgaaattgagcattttccagtaccttcccttattactgtgaacaaaacaggtcatgttggtaccatggagcgcggagaatcttctggcatgcatgtgaattcaaagccacggagacctcatgttgatgatgatcttgatgagcattcaaagcgttctagggtagaagatattgaccaatatagtggagaagaatattctgagtgatgaactgtaaatcataattatcttgcaccaacgaattttatcagtacatgtgaagccttaaaaggtttcaagcaataggcacaagtggtttcatggtgcatggtcatgcagtgaaagaaaatgtctgacaacaagaggacattggggcttggccaatttgttgatctctgtagtgataatagaaagcgtcacattgttctaaagaagttgtcttcaaagtcttggatgatgcgtatattgcagttgctccacatgttccaggatagtgaaattttattcatggttgcctgataaagtgtggaattatataaattttcagcataaattgttttattattaacgttcgtttttgcctaaaataatgcataagtatatgagatgataaaagggtaatcatgaagcattctgtggtccggtggcccttaagttgcaattctattccagcacaaagtgacaatgatatgatgacttttggtctggtattattaattctggacagtaattcagtagctgtggtaacggcaaaatacctcagggttaagctggcatgcaggttactgttttcattttatgtagcctggaggaccattttctgctggcagccaggtttggctgagttttatggatgctaagatatggttcccctcaagtgacagcattgtattgtggggaacggtgccaattgctggaacaaattcgggtaaggtgacgtggtgagctgctgtctgtagtgtgtggacaactgcagtagtaccatggttcacaggcagtgacaagcttcttaagcatacaaacgaaggaagatagacacaacctaacaag

SEQ ID NO: 16471 - DNA, 3920 bp, Zea Mays
aataaatctgattagatatctaaacccgtgcaaaattcattcaatcctggacgaaaaaggcaggcagaatcacaagctgtcgtgaaattctcatcgccccttccttccttcctgctcctcgccaaatcgccgagacgccgactacctcgcgctcccatagatctggtagaataggtgccggtggcctcggacgtgcagtggtagaggcttctgcggtggcggcgacggaggagaagggggagcgagcagtgtccgcggggcgcggtgtctgtgtgctggggctcgggttccgaggaaccctagccgccgcgcgatggcgtcttacaggccgtacgcaccgccgcctccgcagggcagctacccgccgcagatgaatccgtacgcgccgccgcaggcgccctacaacaggatgccggcgccgccctaccacgctgggcccccgcccccgccgccacccggtccgccaccacctcaccaaccgcagttcaatttcggtcccgggcctccgcagcagcacccgcccccgccgatgtactaccagccaccgccaccaccctatggcgggaacagtaacccgcctcctcctcctccttcagcgccacccccgcctccgtccccaccccctgctgctccaccccctccgcctccggcccaggcaccgtctgctcaggccctgctgccctcaaaggagcagcagcctaaggcaacgctgccaagagaggagacggaggaggagcgtcgtgcacggaagaagcgggagttcgagaagcagcgggtggaggaacgcaagcagcagcagatgatgcggcagacgcaggccaccattctgcagaagacgcagcaggtgcgtgcttctcagcagcagccgcagagccgccaccaccaccaccagcctccgagtatcttccgggcagcagcaattggctctcgggcagtggcaactgggtctcgcccagcatcagcgccgaatgctgagaggtttgagaaccggttaaaaaagccaacaacgttcctctgcaagcacaaatttaggaatgaactcccagatccaagtgctcagttgaaatggctacccttgaataaggataaggaccgatataccaaatacaggataacttcattggagaaaaactacattcctaaaatgattgtccctgaggatcttgggatacctcttgatctacttgacatgagtgtatacaatccccgggatgttcagtcgcgcatggctcctgaagatgaagagctattgcgtgatgatgaggtcctcacccctattaaacaagaaggtacaaggaaaagggagaggcccactgacaaaggtgtttcttggctggtcaaaacacaatacatatctccactaagtactgatgcaaccaaaatgtcccttactgagaagcaagcaaaggaaaggcgagaaacaagggagggtcgcaatgctttcctagacaatcttaatgatagagagaaacagatcaaagccattgaagaatccttcagagcagccaagtcaaggcctgttcaccagactaaacgtggcatgcaagctgagtgggttatgcctttgctacctgattttgataggtacgaggagccgtttgttatggtgaattttgatggcgatccaactgctgattctgagcagtacaacaaacttgagagacctgtacgtgatgaatgtgaatcccgggctgtgatgaaaagttttagtgtcagtggttcagacccttcaaaacaggagaagtttttggcatacatggccccagcaccccatgagctcgccagagacttggatgatgaaaacgatgatatccagtattcctggctaagagaatatcactgggaagtgagaggagatgataaagatgatcctacaacataccttgtcacatttgataaggaggagggtgcaaaatatttgcctctccctactaagctagttttgcagaagaagaaggcgaaggaggggaggtctggggatgaaattgagcattttccagtaccttcccttattactgtgaacaaaacaggtcatgttggtaccatggagcgcggagaatcttctggcatgcatgtgaattcaaagccacggagacctcatgttgatgatgatcttgatgagcattcaaagcgttctagggtagaagatattgaccaatatagtggagaagaatattctgagtgatgaactgtaaatcataattatcttgcaccaacgaattttatcagtacatgtgaagccttaaaaggtttcaagcaataggcacaagtggtttcatggtgcatggtcatgcagtgaaagaaaatgtctgacaacaagaggacattggggcttggccaatttgttgatctctgtagtgataatagaaagcgtcacattgttctaaagaagttgtcttcaaagtcttggatgatgcgtatattgcagttgctccacatgttccaggatagtgaaattttattcatggttgcctgataaagtgtggaattatataaattttcagcataaattgttttattattaacgttcgtttttgcctaaaataatgcataagtatatgagatgataaaagggtaatcatgaagcattctgtggtccggtggcccttaagttgcaattctattccagcacaaagtgacaatgatatgatgacttttggtctggtattattaattctggacagtaattcagtagctgtggtaacggcaaaatacctcagggttaagctggcatgcaggttactgttttcattttatgtagcctggaggaccattttctgctggcagccaggtttggctgagttttatggatgctaagatatggttcccctcaagtgacagcattgtattgtggtatgtctgacatcttgtacactaatgccatcagcaatcattttgggcttcatgtctgatgttagttgttgacatcataactcatggaatgttgcaaaggaatgatgctgtagctgtagctgtaatgtgaacggactgtaattcacaaatttcttgatttgttttacataggatgtccatatgctctttaatagacctttaccagttgtttactacaggttctttcaatccctgcattatacagtcttttgtgatacatgttacatcctgtgtagttcttcaactccttatgatttatagaatatttcaattttagattcttaaaatactgtttgctttatctatactcttgtggatttgttttacagtcatccgattagttttgtaaacattcatgtttttctaattaccaggtagcatgtccttgagtaacttattaagcagttcaatttgtctgctgatagttatggtatagtcaaagttggcaggctgccaacaacataactccaatttccattctttttagtcctggctgatctatactgcatgtacttctatttccattctggatttagcatctggaatataggattgtttcaatgcaacagtctcgctagtgcttattgacctttcagttgctctacatgtttctgattgggatcatcccagctgggaagagagtccgaatcatatctctagatctgtgtctgcttgtcccgtcaatttgtgattacctgttcaattcatgtgtctattaaagcttgatgccagtgcccttaaaacaaacgtgttgctacgcatgttgttggtgctattaaaaaatagttttggtgtgtgacctagcttgttgtcatgcgcctgtggtttgaagaacgttatgctgttgtatgggcaatgtttgcgtaatgcccaggggaacggtgccaattgctggaacaaattcgggtaaggtgacgtggtgagctgctgtctgtagtgtgtggacaactgcagtagtaccatggttcacaggcagtgacaagcttcttaagcatacaaacgaaggaagatagacacaacctaacaag

SEQ ID NO: 16472 - DNA, 1696 bp, Zea Mays
caaaattcattcaatcctggacgaaaaaggcaggcagaatcacaagctgtcgtgaaattctcatcgccccttccttccttcctgctcctcgccaaatcgccgagacgccgactacctcgcgctcccatagatctggtagaataggtgccggtggcctcggacgtgcagtggtagaggcttctgcggtggcggcgacggaggagaagggggagcgagcagtgtccgcggggcgcggtgtctgtgtgctggggctcgggttccgaggaaccctagccgccgcgcgatggcgtcttacaggccgtacgcaccgccgcctccgcagggcagctacccgccgcagatgaatccgtacgcgccgccgcaggcgccctacaacaggatgccggcgccgccctaccacgctgggcccccgcccccgccgccacccggtccgccaccacctcaccaaccgcagttcaatttcggtcccgggcctccgcagcagcacccgcccccgccgatgtactaccagccaccgccaccaccctatggcgggaacagtaacccgcctcctcctcctccttcagcgccacccccgcctccgtccccaccccctgctgctccaccccctccgcctccggcccaggcaccgtctgctcaggccctgctgccctcaaaggagcagcagcctaaggcaacgctgccaagagaggagacggaggaggagcgtcgtgcacggaagaagcgggagttcgagaagcagcgggtggaggaacgcaagcagcagcagatgatgcggcagacgcaggccaccattctgcagaagacgcagcaggtgcgtgcttctcagcagcagccgcagagccgccaccaccaccaccagcctccgagtatcttccgggcagcagcaattggctctcgggcagtggcaactgggtctcgcccagcatcagcgccgaatgctgagaggtttgagaaccggttaaaaaagccaacaacgttcctctgcaagcacaaatttaggaatgaactcccagatccaagtgctcagttgaaatggctacccttgaataaggataaggaccgatataccaaatacaggataacttcattggagaaaaactacattcctaaaatgattgtccctgaggatcttgggatacctcttgatctacttgacatgagtgtatacaatccccgggatgttcagtcgcgcatggctcctgaagatgaagagctattgcgtgatgatgaggtcctcacccctattaaacaagaaggtacaaggaaaagggagaggcccactgacaaaggtgtttcttggctggtcaaaacacaatacatatctccactaagtactgatgcaaccaaaatgtcccttactgagaagcaagcaaaggaaaggcgagaaacaagggagggtcgcaatgctttcctagacaatcttaatgatagagagaaacagatcaaagccattgaagaatccttcagagcagccaagtcaaggcctgttcaccagactaaacgtggcatgcaagctgagtgggttatgcctttgctacctgattttgataggtacgaggagccgtttgttatggtgaattttgatggcgatccaactgctgattctgagcagtacaacaaacttgagagacctgtacgtgatgaatgtgaatcccggatcagtgttgcagggacttgcatgtttttcactgat

SEQ ID NO: 16473 - DNA, 112 bp, Zea Mays
gagccagagaatatgctgcttgagggagtcagagttgagacttcgggggaataatccttagtttatcggctggtatagatgcggctgggctaatattaggagttatgagcat

SEQ ID NO: 16474 - DNA, 978 bp, Zea Mays
tttagttgtgcacagcccaatactgcctgcaaaaactgaggcaaattctggtagtatgatttacgagaggcaggcaaccaagtttactcaaatagttgatgaggaaaatggcaagcagagcaggtggcgatggcaaggaagccataaacgagcaggtaatcgccaacacctacgccaacatgcgcaccgaaatgaaccagctctacacaaagatcacggagctggagatggaggtcagcgagcactccctcgtgatgggcgcgatcgagccgctggacccctcgaggcgatgctacaggatgatcggcggcgtcctagtggagaggaccatcagggaggtcatgcctgccgtgaagcgcaacaaggagggcctggaagaggtgattgcccgcatgcacgaggcgctggagaggaagaagaaggagataaccgagtttgagctcaagtacaagatcaggatccggaaggctgatagcgacgctgaggatgaaggcggcaagaaggaaggcactgcgcagggagtccttgttggtcctgccggacagtaatctaagttgattagagagacctgcgtgctacaagctatttatgcttggaccacagtaaggtggttgttgctcctctctgccaatgtgtgtgtttagggggtgacgacatgcttctgtagaaccagcgattttgtgtttaaactggaatggttttgacaaggtgcgatgtgtttctgcatttgttcttcaggttcaggtgtttcggttaaccaaatgtatttcttgcttgctgataatgatggcacatctctagtttcgcagggctgcagtctgtgtctggaggcccctttttattatcttttcagataattcctcggaagtcgtctttatgattatttggacttaactggtgcagaaaatatgcagtgcttggaggttggtgaactcctgacagttgagctgctattaatggttttgaggattaattgag

SEQ ID NO: 16475 - DNA, 1192 bp, Zea Mays
ctcatttaagagcgctgtacatgcccttagtcttttttttccctcgtagagtatttacgcagaagcatctcctggagacctggactgatggaaaaaaaggccccatggcccatccaggcctgcctcaggcccaggcaatttttttttattgcccagtctagtgcctacctgccttctctagttctctcccctacacgccgcgtgcgcgcgccgtgctctctctcgctcgtggggacagctgcgcgaccgccgccgccctacgccaggcgcccaggtcttcggcagtaccttcgccggcgacgaactagcacccacaggaaaatggcaagcagagcaggtggcgatggcaaggaagccataaacgagcaggtaatcgccaacacctacgccaacatgcgcaccgaaatgaaccagctctacacaaagatcacggagctggagatggaggtcagcgagcactccctcgtgatgggcgcgatcgagccgctggacccctcgaggcgatgctacaggatgatcggcggcgtcctagtggagaggaccatcagggaggtcatgcctgccgtgaagcgcaacaaggagggcctggaagaggtgattgcccgcatgcacgaggcgctggagaggaagaagaaggagataaccgagtttgagctcaagtacaagatcaggatccggaaggctgatagcgacgctgaggatgaaggcggcaagaaggaaggcactgcgcagggagtccttgttggtcctgccggacagtaatctaagttgattagagagacctgcgtgctacaagctatttatgcttggaccacagtaaggtggttgttgctcctctctgccaatgtgtgtgtttagggggtgacgacatgcttctgtagaaccagcgattttgtgtttaaactggaatggttttgacaaggtgcgatgtgtttctgcatttgttcttcaggttcaggtgtttcggttaaccaaatgtatttcttgcttgctgataatgatggcacatctctagtttcgcagggctgcagtctgtgtctggaggcccctttttattatcttttcagataattcctcggaagtcgtctttatgattatttggacttaactggtgcagaaaatatgcagtgcttggaggttggtgaactcctgacagttgagctgctattaatggttttgaggattaattgag

SEQ ID NO: 16476 - DNA, 2166 bp, Zea Mays
gcaagttccttgaaaacaaccaaacttaagaaagaatgcatttgattttaacgaaggtttagcataaggatttgaccaacctaatattgtattatatcgtttcacagctgaatctgatccataagcaattgaaggctgcacagtgatgcaactgcatgttccgacctgtacctgaacatttggcagccagctgcgcacggtgtaaagccaccacgtcacggatccatccagctcagctgctgcatagtccagtttgccaccaaccaaagggtagaaccgtcatttcgtacggtagttcatcaagggaaatgaccccatgccttaaacacatttctgctgcaaccttctttttttttatgcccggcactgcagcgaggcaggagggcgaccggaatttcccatctctccttctcatcattcctttcgggatttcccctcctggttcccatcgatcagagggcccggcgctgttgcctttcgcattcgattcctttcgggtcggatttgtggcggagctcttgatttgctccgtccctgccagaggaggagggcttgctggatcagggatcgagcaaggaagcagccatgagcggcggcggaagcttgagataatgaggcagagctcgtgttccatgcaactgaccaataagactgaccattatgtagcattcaaggtcaaaacaaccaacccaaagcagtactgtgtgcgtcctaatattggtgttgtattacctggctcaacttgcaatgttacagtgacaatgcaagcacagaaggcttcaccacctgacatgcagtgcaaggacaagttcctagttcaaagcgttgtggccgagaatggtgtgacagctcaagatattaatgcagcaatgttcaataaggagccagggaaagttgtcgatgaattcaagctgcgtgtggtttatgtgccaacaactatgcccaacccaatccctgaagaatctgaactagggagttccactccctcattttcacaagaaaacgggatcgatcattccatgacgccactatctgtatctagatcgtctgctgaaacagcaaaggagaagccctctgaggtagccctttatggttgtctcattagacatcagcgctattgaattaaaaagcagaaatcttgctggatcgatatatcttttttcttatgtttagatctctcacatgattatggtttggtctcaaataatccagcactggcatggtaactttttagctgaatgttactatcacatctatttatgactagaatggatttgtggttttctgagagttttgatctgattcactatccattttaaatatttgacaaatattaatgcctctttatcactaaactctgtacttttaggaagagaggcaaactaaatgtaacgtaagtaggtcagggaacacatccattgtcagttttctatacctgacgccttcatgatttctcattcacacgcaccatcttgctcatatagcttagacatgaatactcatcctatgagtagtaacacattggaatgatctctgcagtttttgcttcttcatgtctgatcttttgagtccttgacagcagaaagccacatgtttgtgtataacttgtaacatactttatgaagtttcacgttttttttgactaattcactggtttatgactgctaggcaacttctgtgatctccaagctaactgaggagaaaatgtctgctgttcagcagaaccagaaattacgccaagagctggagcttctacggaaagagagcagcaaaaccggcggcggtttctccatcaccttcttgtttgtcgtgggcctcctgggcatcgtcgttggctacatcctcaagagaacatagtggaacggtgtctccagcagatctctactactcccattaaaggacacccacccaccccacaggtggggtggtatgcctctctctccccatgtgttttcgctcctaatcggagcgccctgttctaacgtgtaacaacagcagcactcctagaggctagaggccttcggtttgtgtacatcattatggtggtccatacttattttttttcttccagaattcatttcggagttggtagacttgttttaacgggaatgtttgaactgttgccagtctgatgaatttgccagatattttgcatcgtttcacctg

SEQ ID NO: 16477 - DNA, 678 bp, Zea Mays
ctgtgagcgcgtaaggaagaagtggaagccggcagctgtcagtgcggaactgcttcatccggggctcggtggtgcggtacgtgctgctcccgcaggacggcgtggacgtggacatcctgcacgacgccaccaggagggaggcgcgcggaggctgatcggcatcggcatcggcccccctcacctgtgctgcttctcccccggggaggagattgatctgccttgccctgatctcgtctggttgtacgaaacatatgctgatctgagtggccccaactcccccagcacacacttgatccaccacccacccagctccctgcctggtacttgcatgttccttgctgtgtgtgtgtgtgttcagcacacacttgatccaccacccacccagctccctgcctggtacttgcatgttccttgctgtgtgtgtgtgtgttcagcacacacttgatccaccacccacccagctccctgcctggtacttgcatgttccttgctgtttgtgtgtgtgtctgtcagtcagtaatgctgtttgaccaagagggttagcgtaaccgaacaagccctaacggagtaacggacgctgtagcggttgatgaatcacaagagtcccaatgtaagcggggttgaatcacaagaatcccaagggatgtcaatggcgaattacccgtcaggggatggctc

SEQ ID NO: 16478 - DNA, 2164 bp, Zea Mays
gttgatttggtgtcaggaaagctttgtccgagttatataggaccgtctactatcttagcccgagttggcagcttggcttagcacctacaattgtcggagtctacgatcagagtacaccatgtattccatgtctttatgttgaggaagtatttgcggaatccagaccatcaaatcgagctagagccgattcttgtgttgcaagaccagactctagagtgtcgtctgctgcgtatcttagaatcctaggagcttgaggagctgatgcggcagaagtacccgaacttttctttatgtgtgagttttgttgattcattgatctttccttgtcgttccgatagaagcgtcggaattcgaggtcgaattctttttaagggggtagagtgtgatacccaattttctgaaaagaagttaaatttatttttcccttttcttttgtgatctgtgtagttggagttttttaggaagcattcaccaataaaacagtagattacttgttggatttgtgcgctggggtcgggagcagacgtgagagcgagtttgggccctggatctcgatccggcggtggggagcccattagttcccccccttaaccctagccgccccctccctctcactcccccatccctttggccgcccctcccccctctctcttcctctcttccactcttgcagccgccccaattcctctccttcttccccaagtgattgcagctccacccctcaaccctagccccccacctcttcctctccaaggtggagccttcccgcttggtgtccgtcgtgtgggtgcgagtcttccatgggagtttggagggaggaagaaggaagaaaagaaggaggaagggaggaacccaaggtgattttcgtgatcattttgttgtatttgtgctgcaatccaattggttatatgtttacctatgcgatttggtagaggtgttgtccagaaatttagtgggtggacgaacagcagtagttctagggatttctgggaatttttcgtgggcaattagtggggatcagtgggagaatcatgtagagctttgtcatacctttccaacgagtacttatgcgctcgattcggagttataatttaggagatatcattgtttaaatccggttatgttgctgtccaaaaaacagatttttcaggtgggtgaacagcagtagtattagcagtttctgggaatttttcgtgggtaattagtgttaaccagtatgataatcatgtagggctttgtcttatctttccaatgagtacttatgcgcttgatttggaattatattttaaaagatatcgctgtttgaatccgggtatgtcgctgccaaaagacaaaaaaacagattacagggttcatcttgtggactattttgggctaattaaatgttggaatttaattataaattatatacaaaacttgtggggaattttatgtagatgcctctggagtttttgtttgttaccactgatgtcataattttaaagttatgaaattattaagcagcgtcgctgcagtttggtgggagtggggagagatgtaacccgcggcggggtttgagtttgtgcgtaggtgcggcgtcgtttatgagcctgattatgtgaaattggtgcactaagttgtgtgtcaaaaacaggtggtagacttccggatcgtacttagggatttgcccgaactcccggtaaaggcaagtaaatacagtggtggttgctaccgtttggtttgcatcctaatccctgtcattgagtatgcataagttataattatgttaatcattgaattctatgatgaagtttatttgtttgaaagtattaattctcaattgtctaatattgtggatgatcataatttggtaatgatatacgtggttgattcccatcttggatgaagttgaagtatctttttgaatcacgttatatgaagtgttgtaggcatgacatgcacatcgcatcatccatcttgcattttgaagttatgtcgcgatcttatggtccgactgtaccggtacatttttagcattgtacgttgcccgaggaggggtacgatgcggcttcatatccttagagatatgaaggcagaagtcattcttgcatttgcagacatttgcactcatgaggcatatatgaagtgtgacattactatgttactattgtggtttccacctgcg

SEQ ID NO: 16479 - DNA, 1425 bp, Zea Mays
attcgacccaggtcagttcaggttctgactgagtgcgccgtcctggatggttccagattctccgggagcttcgcgaggagaccgcggctatgagggggagccagatgcaggtttctcccgctcaggctcagctgttgtcaatgcttgtgcaaatccttggggcgcgccgttgcattgaagttggggtattcatcattagctgttgcactggcccttcctgaatctggtcacttggttgcttgtgagagggatgacagatgcctagaagttgccaagaagtactaccaacgtgctggtgttgcacataagattgatgtgaaacatgctttggctgcggattctctaagatctcttcttgattgcggcgaagcttccagctatgacttcgcatttgttgatgctgacaagagaatgtatgaggaatattatgaacttctactgaagctagtaagagttggtggtttaattgtaatggacaatgtcctttggtatggaagggttgccgatctactggttgatgaccaaaagacgatcagtataaggaacttcaacaagaaagttttagaggacaagcgtgtcgatatcagcatggtgccaattggagatgggatgacaatttgccggaagctagtagatacttgagttcacaacgtttttgtgtagatgcggaaaacttcttaccaaggtcaagccctgaaaaatcaaactgtggcctgggctctactaaccacagtggtggggaagcagttggtggcagtaattttgattcgctgcttagaacgctgagatgagtgtggcgtgtcttgcacacagtataacttgaattcaagtacaaaaccagtgttatggtgttttgttgatagaccacagtttcatctcaggtgtatatggaactatggaagtgtggtgcacgtattaaattgtgagtcgtgatcatccattttatatctaatggttgctctatatattttacaaacaacatcttctattactacactctgtcacttctaccctgctcaaaaggtgttttttttgtaaaatgtataaagtagcgagggatgttaaatcatgatttgatatgtgcaccatataattctcttgataaccacctcctggaccacatgctaggaattgcaagcagatgacaagtacttctattgcagcattttgctgtgacctgtgaaccaatccacagagttttgatcgttagcattcctgaagcttgttttggaatgcattggacacatgaatgtcatgtttaggctactgactgtaaaatttcgctgaattccagataatttgtgaactgaatggctggtcaaaattgctcaaacaaatcttccaaatcctagacatagtatggtttactctttttctccagaggtgttttgtggcacctcgctgtcccatcgctcgtgatttctg

SEQ ID NO: 16480 - DNA, 1840 bp, Zea Mays
attcgacccaggtcagttcaggtttctcccgctcaggctcagctgttgtcaatgcttgtgcaaatccttggggcgcgccgttgcattgaagttggtgtgtttactgggtattcatcattagctgttgcactggcccttcctgaatctggtcacttggttgcttgtgagagggatgacagatgcctagaagttgccaagaagtactaccaacgtgctggtgttgcacataaggtaattgatgttaatattcacctcttgtaccttggatagaaagttaaatcattttttatgattcttaagccagctctagatttttttgcataacaaagtaaatatgcttaaagtagtccaataacctttttgtgcaaatttgaaaattcttccaagcaaactacttttcaagctcttctcttttatttttttatatctgtatcattgttcttatattgttttctgtgtgtcttgactattaagttctgcacagcagtgcagaaaactagaaaaaaaatctggtacaccgcatattgcatctttttcgttagaaatctaatcttcatgatactaagcacttaagcagtaattctctttcataaccaactctacgcattcaaagccgaaatgctatctggatctgccctacaatgattgatgtgaaacatgctttggctgcggattctctaagatctcttcttgattgcggcgaagcttccagctatgacttcgcatttgttgatgctgacaagagaatgtatgaggaatattatgaacttctactgaagctagtaagagttggtggtttaattgtaatggacaatgtcctttggtatggaagggttgccgatctactggttgatgaccaaaagacgatcagtataaggaacttcaacaagaaagttttagaggacaagcgtgtcgatatcagcatggtgccaattggagatgggatgacaatttgccggaagctagtagatacttgagttcacaacgtttttgtgtagatgcggaaaacttcttaccaaggtcaagccctgaaaaatcaaactggtatgcattaatcaagtaaaaatgattataggtgatgaacctcttggcattgacaatatctgtactgcaaatgttgctagtggcctgggctctactaaccacagtggtggggaagcagttggtggcagtaattttgattcgctgcttagaacgctgagatgagtgtggcgtgtcttgcacacagtataacttgaattcaagtacaaaaccagtgttatggtgttttgttgatagaccacagtttcatctcaggtgtatatggaactatggaagtgtggtgcacgtattaaattgtgagtcgtgatcatccattttatatctaatggttgctctatatattttacaaacaacatcttctattactacactctgtcacttctaccctgctcaaaaggtgttttttttgtaaaatgtataaagtagcgagggatgttaaatcatgatttgatatgtgcaccatataattctcttgataaccacctcctggaccacatgctaggaattgcaagcagatgacaagtacttctattgcagcattttgctgtgacctgtgaaccaatccacagagttttgatcgttagcattcctgaagcttgttttggaatgcattggacacatgaatgtcatgtttaggctactgactgtaaaatttcgctgaattccagataatttgtgaactgaatggctggtcaaaattgctcaaacaaatcttccaaatcctagacatagtatggtttactctttttctccagaggtgttttgtggcacctcgctgtcccatcgctcgtgatttctg

SEQ ID NO: 16481 - DNA, 1838 bp, Zea Mays
attcgacccaggtcagttcaggttctgactgagtgcgccgtcctggatggttccagattctccgggagcttcgcgaggagaccgcggctatgagggggagccagatgcaggtttctcccgctcaggctcagctgttgtcaatgcttgtgcaaatccttggggcgcgccgttgcattgaagttggggtattcatcattagctgttgcactggcccttcctgaatctggtcacttggttgcttgtgagagggatgacagatgcctagaagttgccaagaagtactaccaacgtgctggtgttgcacataaggtaattgatgttaatattcacctcttgtaccttggatagaaagttaaatcattttttatgattcttaagccagctctagatttttttgcataacaaagtaaatatgcttaaagtagtccaataacctttttgtgcaaatttgaaaattcttccaagcaaactacttttcaagctcttctcttttatttttttatatctgtatcattgttcttatattgttttctgtgtgtcttgactattaagttctgcacagcagtgcagaaaactagaaaaaaaatctggtacaccgcatattgcatctttttcgttagaaatctaatcttcatgatactaagcacttaagcagtaattctctttcataaccaactctacgcattcaaagccgaaatgctatctggatctgccctacaatgattgatgtgaaacatgctttggctgcggattctctaagatctcttcttgattgcggcgaagcttccagctatgacttcgcatttgttgatgctgacaagagaatgtatgaggaatattatgaacttctactgaagctagtaagagttggtggtttaattgtaatggacaatgtcctttggtatggaagggttgccgatctactggttgatgaccaaaagacgatcagtataaggaacttcaacaagaaagttttagaggacaagcgtgtcgatatcagcatggtgccaattggagatgggatgacaatttgccggaagctagtagatacttgagttcacaacgtttttgtgtagatgcggaaaacttcttaccaaggtcaagccctgaaaaatcaaactgtggcctgggctctactaaccacagtggtggggaagcagttggtggcagtaattttgattcgctgcttagaacgctgagatgagtgtggcgtgtcttgcacacagtataacttgaattcaagtacaaaaccagtgttatggtgttttgttgatagaccacagtttcatctcaggtgtatatggaactatggaagtgtggtgcacgtattaaattgtgagtcgtgatcatccattttatatctaatggttgctctatatattttacaaacaacatcttctattactacactctgtcacttctaccctgctcaaaaggtgttttttttgtaaaatgtataaagtagcgagggatgttaaatcatgatttgatatgtgcaccatataattctcttgataaccacctcctggaccacatgctaggaattgcaagcagatgacaagtacttctattgcagcattttgctgtgacctgtgaaccaatccacagagttttgatcgttagcattcctgaagcttgttttggaatgcattggacacatgaatgtcatgtttaggctactgactgtaaaatttcgctgaattccagataatttgtgaactgaatggctggtcaaaattgctcaaacaaatcttccaaatcctagacatagtatggtttactctttttctccagaggtgttttgtggcacctcgctgtcccatcgctcgtgatttctg

SEQ ID NO: 16482 - DNA, 2384 bp, Zea Mays
ctgtgcaggaaggtgattcgacccaggtcagttcagaccatgtggaaacactgggggacgatagaaattaataacgtagaaggaggcgccgtggaaactcgctgccgccggcggtgagagcccgccgagaaacgagatcattttttccaatgcgagcggcggcgccaggaaaggcaagcaactgatatcactgccacgtgggcccttccccttcgaggagcggcgcaaccgcgcttcgcgttatccgaattccgaaaaaaaccaacagcgcgggcgtggggtaactgacgtgtgggccgagaaacatgtcgtctcacctcgccgcggccgcttccgcccttcctctccctcttcctccgccggcggtcgccgcgccttcccgcgccctccgagctctaatcctgtcccggggcggcgccgccgccgtatgctccagtctgcgccgcggcggcacgccggcatgcctcgtgcgtcgcctgtgctcccaccactccgccgcggcggcggcgacggcgttggaggaggcgcggcgcgggcggaagcagctcggaatgacgcctgcgctctacgactacctcctcgccaacgtccgcgagcaccccattctccgggagcttcgcgaggagaccgcggctatgagggggagccagatgcaggtttctcccgctcaggctcagctgttgtcaatgcttgtgcaaatccttggggcgcgccgttgcattgaagttggggtattcatcattagctgttgcactggcccttcctgaatctggtcacttggttgcttgtgagagggatgacagatgcctagaagttgccaagaagtactaccaacgtgctggtgttgcacataaggtaattgatgttaatattcacctcttgtaccttggatagaaagttaaatcattttttatgattcttaagccagctctagatttttttgcataacaaagtaaatatgcttaaagtagtccaataacctttttgtgcaaatttgaaaattcttccaagcaaactacttttcaagctcttctcttttatttttttatatctgtatcattgttcttatattgttttctgtgtgtcttgactattaagttctgcacagcagtgcagaaaactagaaaaaaaatctggtacaccgcatattgcatctttttcgttagaaatctaatcttcatgatactaagcacttaagcagtaattctctttcataaccaactctacgcattcaaagccgaaatgctatctggatctgccctacaatgattgatgtgaaacatgctttggctgcggattctctaagatctcttcttgattgcggcgaagcttccagctatgacttcgcatttgttgatgctgacaagagaatgtatgaggaatattatgaacttctactgaagctagtaagagttggtggtttaattgtaatggacaatgtcctttggtatggaagggttgccgatctactggttgatgaccaaaagacgatcagtataaggaacttcaacaagaaagttttagaggacaagcgtgtcgatatcagcatggtgccaattggagatgggatgacaatttgccggaagctagtagatacttgagttcacaacgtttttgtgtagatgcggaaaacttcttaccaaggtcaagccctgaaaaatcaaactgtggcctgggctctactaaccacagtggtggggaagcagttggtggcagtaattttgattcgctgcttagaacgctgagatgagtgtggcgtgtcttgcacacagtataacttgaattcaagtacaaaaccagtgttatggtgttttgttgatagaccacagtttcatctcaggtgtatatggaactatggaagtgtggtgcacgtattaaattgtgagtcgtgatcatccattttatatctaatggttgctctatatattttacaaacaacatcttctattactacactctgtcacttctaccctgctcaaaaggtgttttttttgtaaaatgtataaagtagcgagggatgttaaatcatgatttgatatgtgcaccatataattctcttgataaccacctcctggaccacatgctaggaattgcaagcagatgacaagtacttctattgcagcattttgctgtgacctgtgaaccaatccacagagttttgatcgttagcattcctgaagcttgttttggaatgcattggacacatgaatgtcatgtttaggctactgactgtaaaatttcgctgaattccagataatttgtgaactgaatggctggtcaaaattgctcaaacaaatcttccaaatcctagacatagtatggtttactctttttctccagaggtgttttgtggcacctcgctgtcccatcgctcgtgatttctg

SEQ ID NO: 16483 - DNA, 1890 bp, Zea Mays
ggtagtgggcctgtgcaggaaggtgattcgacccaggtcagttcagattctccgggagcttcgcgaggagaccgcggctatgagggggagccagatgcaggtttctcccgctcaggctcagctgttgtcaatgcttgtgcaaatccttggggcgcgccgttgcattgaagttggggtattcatcattagctgttgcactggcccttcctgaatctggtcacttggttgcttgtgagagggatgacagatgcctagaagttgccaagaagtactaccaacgtgctggtgttgcacataaggtaattgatgttaatattcacctcttgtaccttggatagaaagttaaatcattttttatgattcttaagccagctctagatttttttgcataacaaagtaaatatgcttaaagtagtccaataacctttttgtgcaaatttgaaaattcttccaagcaaactacttttcaagctcttctcttttatttttttatatctgtatcattgttcttatattgttttctgtgtgtcttgactattaagttctgcacagcagtgcagaaaactagaaaaaaaatctggtacaccgcatattgcatctttttcgttagaaatctaatcttcatgatactaagcacttaagcagtaattctctttcataaccaactctacgcattcaaagccgaaatgctatctggatctgccctacaatggtaataattggtattatatgatagagtcaatttatgcttttatactctaaaatttctgtgtggattggtgtgtaaaaaatcattagattgatgtgaaacatgctttggctgcggattctctaagatctcttcttgattgcggcgaagcttccagctatgacttcgcatttgttgatgctgacaagagaatgtatgaggaatattatgaacttctactgaagctagtaagagttggtggtttaattgtaatggacaatgtcctttggtatggaagggttgccgatctactggttgatgaccaaaagacgatcagtataaggaacttcaacaagaaagttttagaggacaagcgtgtcgatatcagcatggtgccaattggagatgggatgacaatttgccggaagctagtagatacttgagttcacaacgtttttgtgtagatgcggaaaacttcttaccaagtggcctgggctctactaaccacagtggtggggaagcagttggtggcagtaattttgattcgctgcttagaacgctgagatgagtgtggcgtgtcttgcacacagtataacttgaattcaagtacaaaaccagtgttatggtgttttgttgatagaccacagtttcatctcaggtgtatatggaactatggaagtgtggtgcacgtattaaattgtgagtcgtgatcatccattttatatctaatggttgctctatatattttacaaacaacatcttctattactacactctgtcacttctaccctgctcaaaaggtgttttttttgtaaaatgtataaagtagcgagggatgttaaatcatgatttgatatgtgcaccatataattctcttgataaccacctcctggaccacatgctaggaattgcaagcagatgacaagtacttctattgcagcattttgctgtgacctgtgaaccaatccacagagttttgatcgttagcattcctgaagcttgttttggaatgcattggacacatgaatgtcatgtttaggctactgactgtaaaatttcgctgaattccagataatttgtgaactgaatggctggtcaaaattgctcaaacaaatcttccaaatcctagacatagtatggtttactctttttctccagaggtgttttgtggcacctcgctgtcccatcgctcgtgatttctg

SEQ ID NO: 16484 - DNA, 2441 bp, Zea Mays
accgagaagggatttcggtagtgggcctgtgcaggaaggtgattcgacccaggtcagttcagaccatgtggaaacactgggggacgatagaaattaataacgtagaaggaggcgccgtggaaactcgctgccgccggcggtgagagcccgccgagaaacgagatcattttttccaatgcgagcggcggcgccaggaaaggcaagcaactgatatcactgccacgtgggcccttccccttcgaggagcggcgcaaccgcgcttcgcgttatccgaattccgaaaaaaaccaacagcgcgggcgtggggtaactgacgtgtgggccgagaaacatgtcgtctcacctcgccgcggccgcttccgcccttcctctccctcttcctccgccggcggtcgccgcgccttcccgcgccctccgagctctaatcctgtcccggggcggcgccgccgccgtatgctccagtctgcgccgcggcggcacgccggcatgcctcgtgcgtcgcctgtgctcccaccactccgccgcggcggcggcgacggcgttggaggaggcgcggcgcgggcggaagcagctcggaatgacgcctgcgctctacgactacctcctcgccaacgttctgactgagtgcgccgtcctggatggttccagattctccgggagcttcgcgaggagaccgcggctatgagggggagccagatgcaggtttctcccgctcaggctcagctgttgtcaatgcttgtgcaaatccttggggcgcgccgttgcattgaagttggtgtgtttactgggtattcatcattagctgttgcactggcccttcctgaatctggtcacttggttgcttgtgagagggatgacagatgcctagaagttgccaagaagtactaccaacgtgctggtgttgcacataaggtaattgatgttaatattcacctcttgtaccttggatagaaagttaaatcattttttatgattcttaagccagctctagatttttttgcataacaaagtaaatatgcttaaagtagtccaataacctttttgtgcaaatttgaaaattcttccaagcaaactacttttcaagctcttctcttttatttttttatatctgtatcattgttcttatattgttttctgtgtgtcttgactattaagttctgcacagcagtgcagaaaactagaaaaaaaatctggtacaccgcatattgcatctttttcgttagaaatctaatcttcatgatactaagcacttaagcagtaattctctttcataaccaactctacgcattcaaagccgaaatgctatctggatctgccctacaatgattgatgtgaaacatgctttggctgcggattctctaagatctcttcttgattgcggcgaagcttccagctatgacttcgcatttgttgatgctgacaagagaatgtatgaggaatattatgaacttctactgaagctagtaagagttggtggtttaattgtaatggacaatgtcctttggtatggaagggttgccgatctactggttgatgaccaaaagacgatcagtataaggaacttcaacaagaaagttttagaggacaagcgtgtcgatatcagcatggtgccaattggagatgggatgacaatttgccggaagctagtagatacttgagttcacaacgtttttgtgtagatgcggaaaacttcttaccaaggtcaagccctgaaaaatcaaactgtggcctgggctctactaaccacagtggtggggaagcagttggtggcagtaattttgattcgctgcttagaacgctgagatgagtgtggcgtgtcttgcacacagtataacttgaattcaagtacaaaaccagtgttatggtgttttgttgatagaccacagtttcatctcaggtgtatatggaactatggaagtgtggtgcacgtattaaattgtgagtcgtgatcatccattttatatctaatggttgctctatatattttacaaacaacatcttctattactacactctgtcacttctaccctgctcaaaaggtgttttttttgtaaaatgtataaagtagcgagggatgttaaatcatgatttgatatgtgcaccatataattctcttgataaccacctcctggaccacatgctaggaattgcaagcagatgacaagtacttctattgcagcattttgctgtgacctgtgaaccaatccacagagttttgatcgttagcattcctgaagcttgttttggaatgcattggacacatgaatgtcatgtttaggctactgactgtaaaatttcgctgaattccagataatttgtgaactgaatggctggtcaaaattgctcaaacaaatcttccaaatcctagacatagtatggtttactctttttctccagaggtgttttgtggcacctcgctgtcccatcgctcgtgatttctg

SEQ ID NO: 16485 - DNA, 1432 bp, Zea Mays
gaccgagaagggatttcggtagtgggcctgtgcaggaaggtgattcgacccaggtcagttcagattctccgggagcttcgcgaggagaccgcggctatgagggggagccagatgcaggtttctcccgctcaggctcagctgttgtcaatgcttgtgcaaatccttggggcgcgccgttgcattgaagttggggtattcatcattagctgttgcactggcccttcctgaatctggtcacttggttgcttgtgagagggatgacagatgcctagaagttgccaagaagtactaccaacgtgctggtgttgcacataagattgatgtgaaacatgctttggctgcggattctctaagatctcttcttgattgcggcgaagcttccagctatgacttcgcatttgttgatgctgacaagagaatgtatgaggaatattatgaacttctactgaagctagtaagagttggtggtttaattgtaatggacaatgtcctttggtatggaagggttgccgatctactggttgatgaccaaaagacgatcagtataaggaacttcaacaagaaagttttagaggacaagcgtgtcgatatcagcatggtgccaattggagatgggatgacaatttgccggaagctagtagatacttgagttcacaacgtttttgtgtagatgcggaaaacttcttaccaaggtcaagccctgaaaaatcaaactgtggcctgggctctactaaccacagtggtggggaagcagttggtggcagtaattttgattcgctgcttagaacgctgagatgagtgtggcgtgtcttgcacacagtataacttgaattcaagtacaaaaccagtgttatggtgttttgttgatagaccacagtttcatctcaggtgtatatggaactatggaagtgtggtgcacgtattaaattgtgagtcgtgatcatccattttatatctaatggttgctctatatattttacaaacaacatcttctattactacactctgtcacttctaccctgctcaaaaggtgttttttttgtaaaatgtataaagtagcgagggatgttaaatcatgatttgatatgtgcaccatataattctcttgataaccacctcctggaccacatgctaggaattgcaagcagatgacaagtacttctattgcagcattttgctgtgacctgtgaaccaatccacagagttttgatcgttagcattcctgaagcttgttttggaatgcattggacacatgaatgtcatgtttaggctactgactgtaaaatttcgctgaattccagataatttgtgaactgaatggctggtcaaaattgctcaaacaaatcttccaaatcctagacatagtatggtttactctttttctccagaggtgttttgtggcacctcgctgtcccatcgctcgtgatttctg

SEQ ID NO: 16486 - DNA, 2427 bp, Zea Mays
gagtggaccgagaagggatttcggtagtgggcctgtgcaggaaggtgattcgacccaggtcagttcagaccatgtggaaacactgggggacgatagaaattaataacgtagaaggaggcgccgtggaaactcgctgccgccggcggtgagagcccgccgagaaacgagatcattttttccaatgcgagcggcggcgccaggaaaggcaagcaactgatatcactgccacgtgggcccttccccttcgaggagcggcgcaaccgcgcttcgcgttatccgaattccgaaaaaaaccaacagcgcgggcgtggggtaactgacgtgtgggccgagaaacatgtcgtctcacctcgccgcggccgcttccgcccttcctctccctcttcctccgccggcggtcgccgcgccttcccgcgccctccgagctctaatcctgtcccggggcggcgccgccgccgtatgctccagtctgcgccgcggcggcacgccggcatgcctcgtgcgtcgcctgtgctcccaccactccgccgcggcggcggcgacggcgttggaggaggcgcggcgcgggcggaagcagctcggaatgacgcctgcgctctacgactacctcctcgccaacgtccgcgagcaccccattctccgggagcttcgcgaggagaccgcggctatgagggggagccagatgcaggtttctcccgctcaggctcagctgttgtcaatgcttgtgcaaatccttggggcgcgccgttgcattgaagttggtgtgtttactgggtattcatcattagctgttgcactggcccttcctgaatctggtcacttggttgcttgtgagagggatgacagatgcctagaagttgccaagaagtactaccaacgtgctggtgttgcacataaggtaattgatgttaatattcacctcttgtaccttggatagaaagttaaatcattttttatgattcttaagccagctctagatttttttgcataacaaagtaaatatgcttaaagtagtccaataacctttttgtgcaaatttgaaaattcttccaagcaaactacttttcaagctcttctcttttatttttttatatctgtatcattgttcttatattgttttctgtgtgtcttgactattaagttctgcacagcagtgcagaaaactagaaaaaaaatctggtacaccgcatattgcatctttttcgttagaaatctaatcttcatgatactaagcacttaagcagtaattctctttcataaccaactctacgcattcaaagccgaaatgctatctggatctgccctacaatgattgatgtgaaacatgctttggctgcggattctctaagatctcttcttgattgcggcgaagcttccagctatgacttcgcatttgttgatgctgacaagagaatgtatgaggaatattatgaacttctactgaagctagtaagagttggtggtttaattgtaatggacaatgtcctttggtatggaagggttgccgatctactggttgatgaccaaaagacgatcagtataaggaacttcaacaagaaagttttagaggacaagcgtgtcgatatcagcatggtgccaattggagatgggatgacaatttgccggaagctagtagatacttgagttcacaacgtttttgtgtagatgcggaaaacttcttaccaaggtcaagccctgaaaaatcaaactgtggcctgggctctactaaccacagtggtggggaagcagttggtggcagtaattttgattcgctgcttagaacgctgagatgagtgtggcgtgtcttgcacacagtataacttgaattcaagtacaaaaccagtgttatggtgttttgttgatagaccacagtttcatctcaggtgtatatggaactatggaagtgtggtgcacgtattaaattgtgagtcgtgatcatccattttatatctaatggttgctctatatattttacaaacaacatcttctattactacactctgtcacttctaccctgctcaaaaggtgttttttttgtaaaatgtataaagtagcgagggatgttaaatcatgatttgatatgtgcaccatataattctcttgataaccacctcctggaccacatgctaggaattgcaagcagatgacaagtacttctattgcagcattttgctgtgacctgtgaaccaatccacagagttttgatcgttagcattcctgaagcttgttttggaatgcattggacacatgaatgtcatgtttaggctactgactgtaaaatttcgctgaattccagataatttgtgaactgaatggctggtcaaaattgctcaaacaaatcttccaaatcctagacatagtatggtttactctttttctccagaggtgttttgtggcacctcgctgtcccatcgctcgtgatttctg

SEQ ID NO: 16487 - DNA, 1852 bp, Zea Mays
gagagtggaccgagaagggatttcggtagtgggcctgtgcaggaaggtgattcgacccaggtcagttcagattctccgggagcttcgcgaggagaccgcggctatgagggggagccagatgcaggtttctcccgctcaggctcagctgttgtcaatgcttgtgcaaatccttggggcgcgccgttgcattgaagttggggtattcatcattagctgttgcactggcccttcctgaatctggtcacttggttgcttgtgagagggatgacagatgcctagaagttgccaagaagtactaccaacgtgctggtgttgcacataaggtaattgatgttaatattcacctcttgtaccttggatagaaagttaaatcattttttatgattcttaagccagctctagatttttttgcataacaaagtaaatatgcttaaagtagtccaataacctttttgtgcaaatttgaaaattcttccaagcaaactacttttcaagctcttctcttttatttttttatatctgtatcattgttcttatattgttttctgtgtgtcttgactattaagttctgcacagcagtgcagaaaactagaaaaaaaatctggtacaccgcatattgcatctttttcgttagaaatctaatcttcatgatactaagcacttaagcagtaattctctttcataaccaactctacgcattcaaagccgaaatgctatctggatctgccctacaatgattgatgtgaaacatgctttggctgcggattctctaagatctcttcttgattgcggcgaagcttccagctatgacttcgcatttgttgatgctgacaagagaatgtatgaggaatattatgaacttctactgaagctagtaagagttggtggtttaattgtaatggacaatgtcctttggtatggaagggttgccgatctactggttgatgaccaaaagacgatcagtataaggaacttcaacaagaaagttttagaggacaagcgtgtcgatatcagcatggtgccaattggagatgggatgacaatttgccggaagctagtagatacttgagttcacaacgtttttgtgtagatgcggaaaacttcttaccaaggtcaagccctgaaaaatcaaactgtggcctgggctctactaaccacagtggtggggaagcagttggtggcagtaattttgattcgctgcttagaacgctgagatgagtgtggcgtgtcttgcacacagtataacttgaattcaagtacaaaaccagtgttatggtgttttgttgatagaccacagtttcatctcaggtgtatatggaactatggaagtgtggtgcacgtattaaattgtgagtcgtgatcatccattttatatctaatggttgctctatatattttacaaacaacatcttctattactacactctgtcacttctaccctgctcaaaaggtgttttttttgtaaaatgtataaagtagcgagggatgttaaatcatgatttgatatgtgcaccatataattctcttgataaccacctcctggaccacatgctaggaattgcaagcagatgacaagtacttctattgcagcattttgctgtgacctgtgaaccaatccacagagttttgatcgttagcattcctgaagcttgttttggaatgcattggacacatgaatgtcatgtttaggctactgactgtaaaatttcgctgaattccagataatttgtgaactgaatggctggtcaaaattgctcaaacaaatcttccaaatcctagacatagtatggtttactctttttctccagaggtgttttgtggcacctcgctgtcccatcgctcgtgatttctg

SEQ ID NO: 16488 - DNA, 1949 bp, Zea Mays
gagagtggaccgagaagggatttcggtagtgggcctgtgcaggaaggtgattcgacccaggtcagttcagattctccgggagcttcgcgaggagaccgcggctatgagggggagccagatgcaggtttctcccgctcaggctcagctgttgtcaatgcttgtgcaaatccttggggcgcgccgttgcattgaagttggtgtgtttactgggtattcatcattagctgttgcactggcccttcctgaatctggtcacttggttgcttgtgagagggatgacagatgcctagaagttgccaagaagtactaccaacgtgctggtgttgcacataaggtaattgatgttaatattcacctcttgtaccttggatagaaagttaaatcattttttatgattcttaagccagctctagatttttttgcataacaaagtaaatatgcttaaagtagtccaataacctttttgtgcaaatttgaaaattcttccaagcaaactacttttcaagctcttctcttttatttttttatatctgtatcattgttcttatattgttttctgtgtgtcttgactattaagttctgcacagcagtgcagaaaactagaaaaaaaatctggtacaccgcatattgcatctttttcgttagaaatctaatcttcatgatactaagcacttaagcagtaattctctttcataaccaactctacgcattcaaagccgaaatgctatctggatctgccctacaatggtaataattggtattatatgatagagtcaatttatgcttttatactctaaaatttctgtgtggattggtgtgtaaaaaatcattagattgatgtgaaacatgctttggctgcggattctctaagatctcttcttgattgcggcgaagcttccagctatgacttcgcatttgttgatgctgacaagagaatgtatgaggaatattatgaacttctactgaagctagtaagagttggtggtttaattgtaatggacaatgtcctttggtatggaagggttgccgatctactggttgatgaccaaaagacgatcagtataaggaacttcaacaagaaagttttagaggacaagcgtgtcgatatcagcatggtgccaattggagatgggatgacaatttgccggaagctagtagatacttgagttcacaacgtttttgtgtagatgcggaaaacttcttaccaaggtcaagccctgaaaaatcaaactgtggcctgggctctactaaccacagtggtggggaagcagttggtggcagtaattttgattcgctgcttagaacgctgagatgagtgtggcgtgtcttgcacacagtataacttgaattcaagtacaaaaccagtgttatggtgttttgttgatagaccacagtttcatctcaggtgtatatggaactatggaagtgtggtgcacgtattaaattgtgagtcgtgatcatccattttatatctaatggttgctctatatattttacaaacaacatcttctattactacactctgtcacttctaccctgctcaaaaggtgttttttttgtaaaatgtataaagtagcgagggatgttaaatcatgatttgatatgtgcaccatataattctcttgataaccacctcctggaccacatgctaggaattgcaagcagatgacaagtacttctattgcagcattttgctgtgacctgtgaaccaatccacagagttttgatcgttagcattcctgaagcttgttttggaatgcattggacacatgaatgtcatgtttaggctactgactgtaaaatttcgctgaattccagataatttgtgaactgaatggctggtcaaaattgctcaaacaaatcttccaaatcctagacatagtatggtttactctttttctccagaggtgttttgtggcacctcgctgtcccatcgctcgtgatttctg

SEQ ID NO: 16489 - DNA, 2006 bp, Zea Mays
ggagagtggaccgagaagggatttcggtagtgggcctgtgcaggaaggtgattcgacccaggtcagttcagaccatgtggaaacactgggggacgatagaaattaataacgtagaaggaggcgccgtggaaactcgctgccgccggcggtgagagcccgccgagaaacgagatcattttttccaatgcgagcggcggcgccaggaaaggcaagcaactgatatcactgccacgtgggcccttccccttcgaggagcggcgcaaccgcgcttcgcgttatccgaattccgaaaaaaaccaacagcgcgggcgtggggtaactgacgtgtgggccgagaaacatgtcgtctcacctcgccgcggccgcttccgcccttcctctccctcttcctccgccggcggtcgccgcgccttcccgcgccctccgagctctaatcctgtcccggggcggcgccgccgccgtatgctccagtctgcgccgcggcggcacgccggcatgcctcgtgcgtcgcctgtgctcccaccactccgccgcggcggcggcgacggcgttggaggaggcgcggcgcgggcggaagcagctcggaatgacgcctgcgctctacgactacctcctcgccaacgtccgcgagcaccccattctccgggagcttcgcgaggagaccgcggctatgagggggagccagatgcaggtttctcccgctcaggctcagctgttgtcaatgcttgtgcaaatccttggggcgcgccgttgcattgaagttggggtattcatcattagctgttgcactggcccttcctgaatctggtcacttggttgcttgtgagagggatgacagatgcctagaagttgccaagaagtactaccaacgtgctggtgttgcacataagattgatgtgaaacatgctttggctgcggattctctaagatctcttcttgattgcggcgaagcttccagctatgacttcgcatttgttgatgctgacaagagaatgtatgaggaatattatgaacttctactgaagctagtaagagttggtggtttaattgtaatggacaatgtcctttggtatggaagggttgccgatctactggttgatgaccaaaagacgatcagtataaggaacttcaacaagaaagttttagaggacaagcgtgtcgatatcagcatggtgccaattggagatgggatgacaatttgccggaagctagtagatacttgagttcacaacgtttttgtgtagatgcggaaaacttcttaccaaggtcaagccctgaaaaatcaaactgtggcctgggctctactaaccacagtggtggggaagcagttggtggcagtaattttgattcgctgcttagaacgctgagatgagtgtggcgtgtcttgcacacagtataacttgaattcaagtacaaaaccagtgttatggtgttttgttgatagaccacagtttcatctcaggtgtatatggaactatggaagtgtggtgcacgtattaaattgtgagtcgtgatcatccattttatatctaatggttgctctatatattttacaaacaacatcttctattactacactctgtcacttctaccctgctcaaaaggtgttttttttgtaaaatgtataaagtagcgagggatgttaaatcatgatttgatatgtgcaccatataattctcttgataaccacctcctggaccacatgctaggaattgcaagcagatgacaagtacttctattgcagcattttgctgtgacctgtgaaccaatccacagagttttgatcgttagcattcctgaagcttgttttggaatgcattggacacatgaatgtcatgtttaggctactgactgtaaaatttcgctgaattccagataatttgtgaactgaatggctggtcaaaattgctcaaacaaatcttccaaatcctagacatagtatggtttactctttttctccagaggtgttttgtggcacctcgctgtcccatcgctcgtgatttctg

SEQ ID NO: 16490 - DNA, 2018 bp, Zea Mays
gggagagtggaccgagaagggatttcggtagtgggcctgtgcaggaaggtgattcgacccaggtcagttcagaccatgtggaaacactgggggacgatagaaattaataacgtagaaggaggcgccgtggaaactcgctgccgccggcggtgagagcccgccgagaaacgagatcattttttccaatgcgagcggcggcgccaggaaaggcaagcaactgatatcactgccacgtgggcccttccccttcgaggagcggcgcaaccgcgcttcgcgttatccgaattccgaaaaaaaccaacagcgcgggcgtggggtaactgacgtgtgggccgagaaacatgtcgtctcacctcgccgcggccgcttccgcccttcctctccctcttcctccgccggcggtcgccgcgccttcccgcgccctccgagctctaatcctgtcccggggcggcgccgccgccgtatgctccagtctgcgccgcggcggcacgccggcatgcctcgtgcgtcgcctgtgctcccaccactccgccgcggcggcggcgacggcgttggaggaggcgcggcgcgggcggaagcagctcggaatgacgcctgcgctctacgactacctcctcgccaacgtccgcgagcaccccattctccgggagcttcgcgaggagaccgcggctatgagggggagccagatgcaggtttctcccgctcaggctcagctgttgtcaatgcttgtgcaaatccttggggcgcgccgttgcattgaagttggtgtgtttactgggtattcatcattagctgttgcactggcccttcctgaatctggtcacttggttgcttgtgagagggatgacagatgcctagaagttgccaagaagtactaccaacgtgctggtgttgcacataagattgatgtgaaacatgctttggctgcggattctctaagatctcttcttgattgcggcgaagcttccagctatgacttcgcatttgttgatgctgacaagagaatgtatgaggaatattatgaacttctactgaagctagtaagagttggtggtttaattgtaatggacaatgtcctttggtatggaagggttgccgatctactggttgatgaccaaaagacgatcagtataaggaacttcaacaagaaagttttagaggacaagcgtgtcgatatcagcatggtgccaattggagatgggatgacaatttgccggaagctagtagatacttgagttcacaacgtttttgtgtagatgcggaaaacttcttaccaaggtcaagccctgaaaaatcaaactgtggcctgggctctactaaccacagtggtggggaagcagttggtggcagtaattttgattcgctgcttagaacgctgagatgagtgtggcgtgtcttgcacacagtataacttgaattcaagtacaaaaccagtgttatggtgttttgttgatagaccacagtttcatctcaggtgtatatggaactatggaagtgtggtgcacgtattaaattgtgagtcgtgatcatccattttatatctaatggttgctctatatattttacaaacaacatcttctattactacactctgtcacttctaccctgctcaaaaggtgttttttttgtaaaatgtataaagtagcgagggatgttaaatcatgatttgatatgtgcaccatataattctcttgataaccacctcctggaccacatgctaggaattgcaagcagatgacaagtacttctattgcagcattttgctgtgacctgtgaaccaatccacagagttttgatcgttagcattcctgaagcttgttttggaatgcattggacacatgaatgtcatgtttaggctactgactgtaaaatttcgctgaattccagataatttgtgaactgaatggctggtcaaaattgctcaaacaaatcttccaaatcctagacatagtatggtttactctttttctccagaggtgttttgtggcacctcgctgtcccatcgctcgtgatttctg

SEQ ID NO: 16491 - DNA, 2707 bp, Zea Mays
cgagctcgctcctctgcatgctgcgaacgctggagtggttggacgcagcgccagcgggtgtgggtgacatcacgcgcgccctctgcctgcctctccgtctgcggcgaacgcaacaatcccttccgagtgccgactgccgagtctcgagcgccccggccgcgaagtggaagaggctggccggtggccgcgctctgggcccatatcgccagtgagacacgggccaggtgagcggcctcccatttgcgtggcctgcctgcctgcctggctatgaaggcagcggagcgaaacgaaaagacggagggagcagacaaaaccccacctccacttctccgtcagaccatcacatctctgcgagactgcgaccctcccctgcctgcttcttcttcttctccaccgcaagagccgagccgggcctagagggaggacagcgatccatctaacgtctgcttgccggtctgcaatggactgcagctctgacgagtcgtcagagctaagcgagacagatatcgacgactacgccgacaagtcgtactcggacctcaagtccggcaagttcgtggcgaggctgggcagcgacaggttcaggtgcccgttctgtccggggaagaagaagcaggactaccgctacagcgagctgctccagcacgccgtcggggtgggcgcatccaaccgtgccgcgaaggtgaaggcgaaccaccaggccctggcgaaacttctcaaggaggaccacgccgacgcggcggccacactgccagcatggcaggccatcgcgctaagcaacgcgccgaagccggcgcaggaccaggaagcgttcgtttggccctggacgggcgtcctcgcgaacgtcccggccggacaagcccaggagggtggagctacactgatggagcagctagctgagttcaaacccgtgcagatcactgccgtgtgcggtgccgatgggtatgccggctacgtcgttgttctgttcaccaaggattggatcgggttcaagaacgccttggcattccagaactgtttcaagtcacggcgcttgggtaaacaggactggaaggagacgaagggacacgtagagcaagtgtttggatggctagcaaaggaagaggattacagatcggatgacccagtcggtaggttcttgtcagcgaatggtgacctgaagacggtgtctgaactggagcaggagatgtccagcaagactgacaacctcatagatagtctggctcgacagatcaccgctaaaagcaagtacctgcaggaactggagtgcaagtgtaaccaaatgaatctctcccttcagaaagccatggaagagagcgatttgctgcacaaacgttataatgaagaaatgaggaatatgcagtctgctgtccgtgagcatacacggagggtttttcaggagactgaagaactcagaaatcagctggttgagaaagagagcaacatccagaggaggtccagggaactaaatgaactagtcgctcaaactgacatggaaagaagaaaactggaggaagagaggaaaaagaattgagcaacagagagctgacgaacgggcgctacagcttcttgagaaacataagaaagagaaggaggacgctctcaacagaatcctgcagctagagaggcaggtggacgagaagcagaagctggagctggatatcgagcagcttaaaggcaaactggaggtggtgaaacacatggcgggagaaggcgtggatgtgaagaaacgttctgaggagctgacagcagaactgaacgaaaggatcgaagagatggaagacctggaagctctcaaccaaactcttgttgttaaacataggatgaccaacgatgagattcaagatgccaagaaagagttgatcacgggtttgacagatatgttaggtcctcgtagcaacattgggatcaagaggatgggtgagctggacgagaagcccttcgttctgtcctgcaagcagaggtacggacaagacgccgaaatgaaagccgctgaactcgtctccctgtggcaagagcatctgaaggaccctaattggcatcctttcaagatagtgaccacaggctcaactaaagagcaaatcatcgatgacaaggatgagaagctggcgggcttgaagaagcagctcggcgagaaggtctacgaggccgtggctaccgcgctgctagagatcaacgagtacaacgctagcggcagctacgtggtgtccgagctctggaacaacagggagaaccgcaaggccagcgtaacggaagccatacagcacgtcctgaagcaatggaaggcgcagaggcgtcgaagatgagagaccctgcgcctcactggatcaagtcaagtttgggtgccagctgactatcagtgtcatcatcagcaagtccagacacctattgaagatgatctatccgcggctgtgtttttccttggcgggcgcgtgcttcgttggtttcatttagcacttcctctcttctttttttgggtcggaaatgaaataggatatcgccagcagtcggtagtactggttttaaagtacttacattccccacaagaactgcgaaaatgagactggtgatgcgccatttggccccccgcaacagatttttgtagacagtggttgctgctagcattttgcgctcttctttgaagagctaaaactatctccctgaagcaatttgtgcaatgaatgaactggtgtctgatgatgtagca

SEQ ID NO: 16492 - DNA, 9175 bp, Zea Mays
gtacaacatttaccaattaccatacatatccaaccccaacactgaattaggagattatggagggttagaaaatacaagacgtgagagaagacgcatcaaatgcgaggagactttaagaagaagggcaaaaaaacaacgagttgctgatgcatacagatcagataccaaatctgcccgggctgatggaacgcggatcggacatacagaatgcgtgcgtctctctcgggcggcacctccggccacgccactgatgattggtgggcaaaagaaacacatgagagacaaataaataaatacacatacacttgaaattttgaacaggccgtttgaacgagtcgtcgtccccggcgtgtttccatccatgggccatggcacccggatattcctagcttataccatgaacgagatatgtatgactcggattacgccatggcaacacgccaacaacacctgagatgtttctgcacgcgccgctggtccggtggccactgagaaaacgaacaagagagccggcagcatatgcctgccgcagcgcgcaaccgtccgagacccgccgtctgacagccgcggagctgcgaagccgaggtggcaactcctgtccccagattctggagaatgaacccattgcggttcccttcctcatcagccaaaacatcaaaccccgtcgaaaaccaccaccaccgagccagatgcggagatcttcagcagcctgcacaagagtattccggtgaagctgttgttagtcactcattcatcgtcagttgagaatgaacgcacgctgcaagagagagccctccccttttggcgcttctctgtttggaagcaaacgcatcagcgaagcgtttccaggccgccagcgccaggcgaagacaagcattcggggctggccgcgatgacattgcgacatggacagccgcgcgtgtcctatgcgcagtctcaagggggcatatgcccgaatcatgctccagttattcctcgacacccgccttggtcttgtaagcgctcttcaacctattgcatgcgtggcgtgcagaccggacctgaccttgtgcgttcctaacatgcacggttgtcgtactaggggcaagaggcgagggatcttttagagtagagtgagattcaagacactgatttaactttcagatcgaatatttcagatgggacttccattctcgtaggagatgtgtggcagtgccaatattaaaaaacttcagaaactgatagtcagaaacagtatatatttatatttttttcatcagaagtaccctagtccctaacttagaatatgagtgaaagaaaatctctactgacacacacacacaaaaaaaaaaaatagaatgcatgaaacgacgtcttcattgctctttcgtgactagagggagtacctgattagcccatttgatggaatggcttgttgctgtttcctagtagagataacatgcagattaatgaaaattaagcatcttccctcctcctctcttatttactccatctgggaggatcactgctgggttttcagttttctcaacccaaatcaaatttccagtaagccacgcctttgttgtttccccatctagaccttaatgaatgaaagaaactgtcagcttaagaaagaaagaaagatcattatgtatatgtacaagtagaacctcgggagtacctactatagtgcttgtttaaagccagactattttacctccaacattggaaatgcctgctattatagtgtttttttaagcctcttgggagaatatggttgtcagtatatacatctgcatgtaaactggcatgcccaaaaacgcaccgtctatgcatatatatataataatactgatgccatctatgctagctatgcatctcccttcccatatatactgcggctctaccgcaaaacgttcacaaaatccactggggggaaaaggatggccatgaggcccatgagctactatgaagaccactcgatgtcatcatctcatgccgatgacacggatgaaaggaagagcacggtttcagcctcccccgaggctagcgccgacgaggagtcgttctcattctttgggctgctttactacgccgacacggtagattggctcctcatggccctgggaacccttgggtctatcatccacggcatggcattcccggtcgggtatctcctccttggaaaggcgctcgatgccttcggaactaacataaatgatccggagggcatggtccatgcgctctacaaggtggtcccctttgtgtggtacatggcagcagccactcttccagctggaatggttgagatctcctgctggatatactcaagtgagagacagttagcacgcatgcggctcgcgtttctgagatcaatccttaatcaagaggttggggccttcgacactgacttgactactgcaaccatcatcaccggagtaaccaactacatgagtgtcatacaagatgcaataggagagaagctgggtcatttcgtcgcaagcttctccactttctttgctggtgtcataattgcgtttatcagctgctggcaagttgcaatgctttccttcctggtcattccacttatcctcatcatcggagcagcatacacgaaaaagttgaatgtcttatctttgtcacgcaatgctattgtttcagaggcagtatcagttgtagagcagactttgtcacatatcaagaccgtcttctccttcgttggagagagctgggccatgaagtcctttgtccagtgcatggaaagccaatttaatctaagcaagaaggaagcattgataaagggaataggacttggaatgttccaagcagtgactttttgttcatgggcactgatggtttggattggggcagttgcagtaaccaaaaacaaggcaacaggaggtggcacgatagctgctatcatgagcatcctctttggtgcaatatcaattacctatgccgcaccagaccttcagaccttcaatcaggcaaaaactgcaggaaaagaggtcttcaaggtgataaagagaaagccatccataagttatgcaaaaagtggattagtactagacaagattcatggagagatcaaattccgtagggtgcactttgcatatccttcccgccaggataagccaattctccaaggattctcattgtccatccccgcaggcaaagtcatcgctctggtaggaagcagtggctgtggaaagagcactgtcatttcactacttcaaaggttttatgatccaacttcaggtgacatactcattgatggccacagtatcaagaaaattgatctgaaatcgctgcgcagaaacatagcttcagtctctcaggaaccatcactattttctggtaacataaaggacaacttgaagattggtaaaatggatgcaagtgacaaggagataactgaagcagcaagaacagctaatgttcattcattcatatccaaactaccaaatgagtacttgaccgaggtacttcagtacttcaccacttcccatggaaacttataaatacttggggtcgtcgatcatcttatttaaccaaatatggatcagggttttgacttttgactcatgatttgttaaattccaacaagatctctcaaggaccaaagtcgactgagtaatgcattaataatagaactttaaaattacagatagtcgcaatttattcccataggagaatcatggatttttccacattattagacattcaaagatttaaaaatgatccccactgggacttcctacaattaaattgtttcaggtaggagaaaggggtgtgcagttatcgggtggccagaaacaaagaatagctattgcaagggcaatgttgaaggatccaccaatcctacttctggacgaagcaacaagtgcccttgattcagaatcagagaagctagttcaagatgcacttgagagagcaatgcgtggaaggactgttatcttgatagcccacaggatgtccacaattgtaaatgctgacactatagttgtcgtcgaaaatggaagagtagcacacactgggacacatcatgagttgcttgacaaaagcacattctactccaatgtatgcagcatgcaaaatatagacaaggaagctgaaaataaagtggcaaggtaaagttaaatgtagccaatggaaagttttacttgaccaatgttttatactcagttaagaaattcttcaatatgacttatcgcttcaaaagtaaatgtgtcatgcatgggttggggtgtaccttagaatatcaatgaataaagttttttcaaactggacgccagcagtttgaaataaaagcaagagttactatttacaaatgatgaacagaacaggaaactgccaaaaaaatgaaaacacatcaactcctcaataggaagtttagtgataatagtacatataagtacgattactaagtagaacttatggattgtttggtttgaggaatgatgtagtccatcattttctcactcctcacttttttgtttggtttgtggaatggagtgagttaatccatcaccacctcattcatcatagttagttgtttagtactaatatgtggaatgaaatcatcccaccaaatttgaggaatggacccatgatgcaccacttcattttggatagagtgattcatcaaaccaaacaactcattaatgtttttagttccactgattaaacagcactcctgataacatggaggaacaaattggcgaagcacacatcaagcagtcctccacaaatcagggaccaaacaaaaagctagaaagactggagtcaaaacaaccaagaaatgagaatgtaaaggaaacaccccctttcttcagactttggtatggattgcgtaaagaggacattatgaagattctagttggctcctcagcagcagccatctctggaatctcgaagcctttgtttggttatttcatcatgacaattggcgtggcatattatgacccgaatgcaaaaaaggaagtcaccaagtattctttgatattcttcacagcagggatggttacaatggtgagtaacatcttgcagcactatatttatggtatcattggagaaagggcaatgaaaaacataagggaggcactcttttcagctgttctccgaaatgagcttggttggtttgagaaaccaaataatggcgtaggatttcttacctcacgcattgtcagtgacacgtcaacagtcaagaccatcatatcagacagaatggcagttattgtgcaatgcatcgcttcaattctgatagcaacaatagtaagcatgaaggtcaattggagaatggctttagtttcatgggcagtcatgccatgccatttcattggtggccttattcaagccaagtcagcaaaaggattttatggtgactctgctattgctcaccgggaacttgtctccctagcttcagaagctgctagcaacatccggactgtggcatcctttgtttatgaagatgaaataatcaagaaagcagaattgtcactgcaagaacccttgaggatcaccaagattgagagcatgaagtatggggtcatccaagggatctcgctctgcctctggaatattgcacatgcagtggccctatggtacaccacagttttggttcagaggaagcaagccaaatttgagaacagcataagatcataccagatattctcactcacagtaccttccatcacagaattatggaccctcattcctatggtcatgtcagccatttcaatactgaatcctgtatttgacacacttgacagagagacacaaatcgtcccggataaaccagaaaacccaggcaaagggtggctcgtcggtagaaccgagtttcaggatgtgagcttcaattatccatctagaccagaggtgaccattctggatggcttcaatctaattatagaacctggccaaagagtagcattggttggccccagtggtgcaggaaaatcctctgtactggctttaatactgagattctacgatcctgctagaggtagattgttaattgacaacaagaacataaaggactacaatctccgatggctcaggaagcagattgggctagttcaacaagaaccaatcctgttcaacacatccatcagagataacattagctatggaagtgaaagcccttcagagactgaaatcatccaggctgcaatggaggcaaacattcacgaattcatcagtggtctaccagaagggtatggcactgttgttggagacaaagggagccagctttcaggagggcagaaacagagaattgctattgcaagaacaatactgaagaggcctgccattctgcttcttgatgaggcaaccagcgcacttgatggtgaatctgagagggtggttatgagctctttagggaccaaggtgtggaaggacaaagatgagcaagccagtacgattacaagtatcacagttgcacatagactgtccacagtcataaatgctgatacgatagttgtgatggagaaaggaaaggttgttgaacttggtaatcaccaagagttgatctctgctgaagatggcgtttactcaagattgttccacttgcaaagcaacatgaaagaatgaccatctattcaagttccattatggccaaagaccaaagacacttagcaagaatagctttaggagattaagcattgctcaaatgcacttgctgtcacaagttgtaataacatagctatatcatcatatatcgatgatgcatagtccaccagttagggtaaaaaaataactatatattacttgaatggtatctgtttggaagatagagtaacagatggaagatagagtaacagaacttaagacaggaaagggattcagtaatatgctggtttccgatcatgcagtccatcaaccagtttaaccgtctttcaaggttgaggacaacttgaacaaagttctctccaagaaactagctgaatatctatttctaaagaaataggcaataaatataacatagaaaaaaagaaaatgtccttaacaattaagctacctaaaataatgcatatcgaaaatagaaccacctaaattcggtacatgggacagcaaatagcaaagctgagacacttatttctaatgaactgattaattataaatctataagatacatcaagttcacataatgatcagactattcagccaaatcagaactggaatcagagaattaggccgttggatgactattgtgaaagttccaggcactaacatgaagacttgcaacagaaactgccttgtttattactggacaccttgctcttgcagtcttgttgacgtaatttctttttttttatgtagcagaaatatcaaacatgtttaccaagacatcaagtatatgtacgactgtacgagtaagatagccggcgtatttatttggaatttggaatgaccgaggaatatgtagactaaggacggattccaatagaaaagtggcatggcctattctggattagacttgtagctggagtagagtaatgtaacttgtagatgaaaacagagatgtctcatgcactacaatttggttatgaggacaaaagattcatgcttagtatttcctaaaattgtgacttttactgcaaaattgaagttggagacatcatcaagaaagtttactttcatgtctgaatacgcaggttggacatgctgcatcatgtcagcaaaggagtcatgaacaaaaatgggagtcactaggattgaacaatagataacattatgaatcttgatagtatcattggtgcaaatttgtagctatgtggttgttactgtgtgtactagtgctataaagctcagtgtgccagctactcactttttgcacattaacagaagatccaggaaagcagtgccactcatccaaaatgataggcccactgaatcatctgaacctaagattgcagatggcaaggaaagcacgcgagcagcatccatggcaccagaaacagaagccgaagacagatcgtttgcattctttggtctgtttgctacggtggatgcaatagattggctgctcatgatatcaggaaccatggggtccatacatgacatggggtcttcaatgtcgtactacatagtagggaaatctcttgatgtggccgggaacaacatgggcaataacgaggccactgtccatgaactctctaaggttacctcagatctgatttattttcaagctaccctgttaaataccatttgattctgctgtttgattttagtgttgtttcactaacagtatctactttacatgttcctgtttgcagttaattccatatatgtgaaccttagcaattgttacccttcctggcggaatgattggtgagtaaagccttgaagttctaactttgctattttatcaacgatgtaagcaaaagaaagcagactggtaattatgctttgctgcccttgcatgaagcatactgaaggtctgaattatgcttatgctagtctgaaaatcaaattgactaaactaactggtatacattagtgtatatgaagaacagtagaactatttaagtcagcaacatggtacacctccgttctacaatgtaagatgtcttactcctaagtcaaccttctctagttttaaccaggtcgatgaaaaaatattaacatctacaataccaaataaatgcactatcgagatatatttcatggtgggtggaactaatttgatgatgtagatatttatgtttttttctataaacttgtcaaagtcagagaagtttgagtgtttgacagcaaggctagagctggattgagtgtaagctggagtattgaatcatttgaattacttcaaagtagctgcataagcaaaactcccaaaaaataagttatgcagcgaggaacaaagcgatcgccccaatcacatctcataatactaactaacgatgtttatttaagagcgagaaaggtattaattatgagattatggttgcatcaacatttgacatcacaatcacaaagaaaacgaggactctgaccctatccagctatcgcgccaatagagaaacggcgtaccatggaaactagggaaccgaagtatttgaagctattattttccgggagacgaatgggaaatatacgcagaaattgcactcacccgctcaccagtcgtaccgcctcctccacctcccccctcgtgtttagtcccttctccctccgcgctcctccagttgttgcg

SEQ ID NO: 16493 - DNA, 8904 bp, Zea Mays
gtacaacatttaccaattaccatacatatccaaccccaacactgaattaggagattatggagggttagaaaatacaagacgtgagagaagacgcatcaaatgcgaggagactttaagaagaagggcaaaaaaacaacgagttgctgatgcatacagatcagataccaaatctgcccgggctgatggaacgcggatcggacatacagaatgcgtgcgtctctctcgggcggcacctccggccacgccactgatgattggtgggcaaaagaaacacatgagagacaaataaataaatacacatacacttgaaattttgaacaggccgtttgaacgagtcgtcgtccccggcgtgtttccatccatgggccatggcacccggatattcctagcttataccatgaacgagatatgtatgactcggattacgccatggcaacacgccaacaacacctgagatgtttctgcacgcgccgctggtccggtggccactgagaaaacgaacaagagagccggcagcatatgcctgccgcagcgcgcaaccgtccgagacccgccgtctgacagccgcggagctgcgaagccgaggtggcaactcctgtccccagattctggagaatgaacccattgcggttcccttcctcatcagccaaaacatcaaaccccgtcgaaaaccaccaccaccgagccagatgcggagatcttcagcagcctgcacaagagtattccggtgaagctgttgttagtcactcattcatcgtcagttgagaatgaacgcacgctgcaagagagagccctccccttttggcgcttctctgtttggaagcaaacgcatcagcgaagcgtttccaggccgccagcgccaggcgaagacaagcattcggggctggccgcgatgacattgcgacatggacagccgcgcgtgtcctatgcgcagtctcaagggggcatatgcccgaatcatgctccagttattcctcgacacccgccttggtcttgtaagcgctcttcaacctattgcatgcgtggcgtgcagaccggacctgaccttgtgcgttcctaacatgcacggttgtcgtactaggggcaagaggcgagggatcttttagagtagagtgagattcaagacactgatttaactttcagatcgaatatttcagatgggacttccattctcgtaggagatgtgtggcagtgccaatattaaaaaacttcagaaactgatagtcagaaacagtatatatttatatttttttcatcagaagtaccctagtccctaacttagaatatgagtgaaagaaaatctctactgacacacacacacaaaaaaaaaaaatagaatgcatgaaacgacgtcttcattgctctttcgtgactagagggagtacctgattagcccatttgatggaatggcttgttgctgtttcctagtagagataacatgcagattaatgaaaattaagcatcttccctcctcctctcttatttactccatctgggaggatcactgctgggttttcagttttctcaacccaaatcaaatttccagtaagccacgcctttgttgtttccccatctagaccttaatgaatgaaagaaactgtcagcttaagaaagaaagaaagatcattatgtatatgtacaagtagaacctcgggagtacctactatagtgcttgtttaaagccagactattttacctccaacattggaaatgcctgctattatagtgtttttttaagcctcttgggagaatatggttgtcagtatatacatctgcatgtaaactggcatgcccaaaaacgcaccgtctatgcatatatatataataatactgatgccatctatgctagctatgcatctcccttcccatatatactgcggctctaccgcaaaacgttcacaaaatccactggggggaaaaggatggccatgaggcccatgagctactatgaagaccactcgatgtcatcatctcatgccgatgacacggatgaaaggaagagcacggtttcagcctcccccgaggctagcgccgacgaggagtcgttctcattctttgggctgctttactacgccgacacggtagattggctcctcatggccctgggaacccttgggtctatcatccacggcatggcattcccggtcgggtatctcctccttggaaaggcgctcgatgccttcggaactaacataaatgatccggagggcatggtccatgcgctctacaaggtggtcccctttgtgtggtacatggcagcagccactcttccagctggaatggttgagatctcctgctggatatactcaagtgagagacagttagcacgcatgcggctcgcgtttctgagatcaatccttaatcaagaggttggggccttcgacactgacttgactactgcaaccatcatcaccggagtaaccaactacatgagtgtcatacaagatgcaataggagagaagctgggtcatttcgtcgcaagcttctccactttctttgctggtgtcataattgcgtttatcagctgctggcaagttgcaatgctttccttcctggtcattccacttatcctcatcatcggagcagcatacacgaaaaagttgaatgtcttatctttgtcacgcaatgctattgtttcagaggcagtatcagttgtagagcagactttgtcacatatcaagaccgtcttctccttcgttggagagagctgggccatgaagtcctttgtccagtgcatggaaagccaatttaatctaagcaagaaggaagcattgataaagggaataggacttggaatgttccaagcagtgactttttgttcatgggcactgatggtttggattggggcagttgcagtaaccaaaaacaaggcaacaggaggtggcacgatagctgctatcatgagcatcctctttggtgcaatgtaataattacacaaactcactgattggttcagtcactagaaaaaaattcttttccaaatatagttaccattcaaacaaaacactgaagcaactcacatcctttagccaaagttgccattattttttaatttgcatgtattctatatttaatggattttcctactacattgattcagatcaattacctatgccgcaccagaccttcagaccttcaatcaggcaaaaactgcaggaaaagaggtcttcaaggtgataaagagaaagccatccataagttatgcaaaaagtggattagtactagacaagattcatggagagatcaaattccgtagggtgcactttgcatatccttcccgccaggataagccaattctccaaggattctcattgtccatccccgcaggcaaagtcatcgctctggtaggaagcagtggctgtggaaagagcactgtcatttcactacttcaaaggttttatgatccaacttcaggtatgcttctacaatcttatcagtgcaactatatacatgatctacttcaccatttttcgactaaaacctgaacaaaaagggttatatattgtttattactcgtacttttgtgaagcattagtaactgtaagcttaagtagtattaaaatgcttcagtcatgtaagaaggcctaatactgcaggtgacatactcattgatggccacagtatcaagaaaattgatctgaaatcgctgcgcagaaacatagcttcagtctctcaggaaccatcactattttctggtaacataaaggacaacttgaagattggtaaaatggatgcaagtgacaaggagataactgaagcagcaagaacagctaatgttcattcattcatatccaaactaccaaatgagtacttgaccgaggtacttcagtacttcaccacttcccatggaaacttataaatacttggggtcgtcgatcatcttatttaaccaaatatggatcagggttttgacttttgactcatgatttgttaaattccaacaagatctctcaaggaccaaagtcgactgagtaatgcattaataatagaactttaaaattacagatagtcgcaatttattcccataggagaatcatggatttttccacattattagacattcaaagatttaaaaatgatccccactgggacttcctacaattaaattgtttcaggtaggagaaaggggtgtgcagttatcgggtggccagaaacaaagaatagctattgcaagggcaatgttgaaggatccaccaatcctacttctggacgaagcaacaagtgcccttgattcagaatcagagaagctagttcaagatgcacttgagagagcaatgcgtggaaggactgttatcttgatagcccacaggatgtccacaattgtaaatgctgacactatagttgtcgtcgaaaatggaagagtagcacacactgggacacatcatgagttgcttgacaaaagcacattctactccaatgaacaaattggcgaagcacacatcaagcagtcctccacaaatcagggaccaaacaaaaagctagaaagactggagtcaaaacaaccaagaaatgagaatgtaaaggaaacaccccctttcttcagactttggtatggattgcgtaaagaggacattatgaagattctagttggctcctcagcagcagccatctctggaatctcgaagcctttgtttggttatttcatcatgacaattggcgtggcatattatgacccgaatgcaaaaaaggaagtcaccaagtattctttgatattcttcacagcagggatggttacaatggtgagtaacatcttgcagcactatatttatggtatcattggagaaagggcaatgaaaaacataagggaggcactcttttcagctgttctccgaaatgagcttggttggtttgagaaaccaaataatggcgtaggatttcttacctcacgcattgtcagtgacacgtcaacagtcaagaccatcatatcagacagaatggcagttattgtgcaatgcatcgcttcaattctgatagcaacaatagtaagcatgaaggtcaattggagaatggctttagtttcatgggcagtcatgccatgccatttcattggtggccttattcaagccaagtcagcaaaaggattttatggtgactctgctattgctcaccgggaacttgtctccctagcttcagaagctgctagcaacatccggactgtggcatcctttgtttatgaagatgaaataatcaagaaagcagaattgtcactgcaagaacccttgaggatcaccaagattgagagcatgaagtatggggtcatccaagggatctcgctctgcctctggaatattgcacatgcagtggccctatggtacaccacagttttggttcagaggaagcaagccaaatttgagaacagcataagatcataccagatattctcactcacagtaccttccatcacagaattatggaccctcattcctatggtcatgtcagccatttcaatactgaatcctgtatttgacacacttgacagagagacacaaatcgtcccggataaaccagaaaacccaggcaaagggtggctcgtcggtagaaccgagtttcaggatgtgagcttcaattatccatctagaccagaggtgaccattctggatggcttcaatctaattatagaacctggccaaagagtagcattggttggccccagtggtgcaggaaaatcctctgtactggctttaatactgagattctacgatcctgctagaggtagattgttaattgacaacaagaacataaaggactacaatctccgatggctcaggaagcagattgggctagttcaacaagaaccaatcctgttcaacacatccatcagagataacattagctatggaagtgaaagcccttcagagactgaaatcatccaggctgcaatggaggcaaacattcacgaattcatcagtggtctaccagaagggtatggcactgttgttggagacaaagggagccagctttcaggagggcagaaacagagaattgctattgcaagaacaatactgaagaggcctgccattctgcttcttgatgaggcaaccagcgcacttgatggtgaatctgagagggtggttatgagctctttagggaccaaggtgtggaaggacaaagatgagcaagccagtacgattacaagtatcacagttgcacatagactgtccacagtcataaatgctgatacgatagttgtgatggagaaaggaaaggttgttgaacttggtaatcaccaagagttgatctctgctgaagatggcgtttactcaagattgttccacttgcaaagcaacatgaaagaatgaccatctattcaagttccattatggccaaagaccaaagacacttagcaagaatagctttaggagattaagcattgctcaaatgcacttgctgtcacaagttgtaataacatagctatatcatcatatatcgatgatgcatagtccaccagttagggtaaaaaaataactatatattacttgaatggtatctgtttggaagatagagtaacagatggaagatagagtaacagaacttaagacaggaaagggattcagtaatatgctggtttccgatcatgcagtccatcaaccagtttaaccgtctttcaaggttgaggacaacttgaacaaagttctctccaagaaactagctgaatatctatttctaaagaaataggcaataaatataacatagaaaaaaagaaaatgtccttaacaattaagctacctaaaataatgcatatcgaaaatagaaccacctaaattcggtacatgggacagcaaatagcaaagctgagacacttatttctaatgaactgattaattataaatctataagatacatcaagttcacataatgatcagactattcagccaaatcagaactggaatcagagaattaggccgttggatgactattgtgaaagttccaggcactaacatgaagacttgcaacagaaactgccttgtttattactggacaccttgctcttgcagtcttgttgacgtaatttctttttttttatgtagcagaaatatcaaacatgtttaccaagacatcaagtatatgtacgactgtacgagtaagatagccggcgtatttatttggaatttggaatgaccgaggaatatgtagactaaggacggattccaatagaaaagtggcatggcctattctggattagacttgtagctggagtagagtaatgtaacttgtagatgaaaacagagatgtctcatgcactacaatttggttatgaggacaaaagattcatgcttagtatttcctaaaattgtgacttttactgcaaaattgaagttggagacatcatcaagaaagtttactttcatgtctgaatacgcaggttggacatgctgcatcatgtcagcaaaggagtcatgaacaaaaatgggagtcactaggattgaacaatagataacattatgaatcttgatagtatcattggtgcaaatttgtagctatgtggttgttactgtgtgtactagtgctataaagctcagtgtgccagctactcactttttgcacattaacagaagatccaggaaagcagtgccactcatccaaaatgataggcccactgaatcatctgaacctaagattgcagatggcaaggaaagcacgcgagcagcatccatggcaccagaaacagaagccgaagacagatcgtttgcattctttggtctgtttgctacggtggatgcaatagattggctgctcatgatatcaggaaccatggggtccatacatgacatggggtcttcaatgtcgtactacatagtagggaaatctcttgatgtggccgggaacaacatgggcaataacgaggccactgtccatgaactctctaaggttacctcagatctgatttattttcaagctaccctgttaaataccatttgattctgctgtttgattttagtgttgtttcactaacagtatctactttacatgttcctgtttgcagttaattccatatatgtgaaccttagcaattgttacccttcctggcggaatgattggtgagtaaagccttgaagttctaactttgctattttatcaacgatgtaagcaaaagaaagcagactggtaattatgctttgctgcccttgcatgaagcatactgaaggtctgaattatgcttatgctagtctgaaaatcaaattgactaaactaactggtatacattagtgtatatgaagaacagtagaactatttaagtcagcaacatggtacacctccgttctacaatgtaagatgtcttactcctaagtcaaccttctctagttttaaccaggtcgatgaaaaaatattaacatctacaataccaaataaatgcactatcgagatatatttcatggtgggtggaactaatttgatgatgtagatatttatgtttttttctataaacttgtcaaagtcagagaagtttgagtgtttgacagcaaggctagagctggattgagtgtaagctggagtattgaatcatttgaattacttcaaagtagctgcataagcaaaactcccaaaaaataagttatgcagcgaggaacaaagcgatcgccccaatcacatctcataatactaactaacgatgtttatttaagagcgagaaaggtattaattatgagattatggttgcatcaacatttgacatcacaatcacaaagaaaacgaggactctgaccctatccagctatcgcgccaatagagaaacggcgtaccatggaaactagggaaccgaagtatttgaagctattattttccgggagacgaatgggaaatatacgcagaaattgcactcacccgctcaccagtcgtaccgcctcctccacctcccccctcgtgtttagtcccttctccctccgcgctcctccagttgttgcg

SEQ ID NO: 16494 - DNA, 9067 bp, Zea Mays
gtacaacatttaccaattaccatacatatccaaccccaacactgaattaggagattatggagggttagaaaatacaagacgtgagagaagacgcatcaaatgcgaggagactttaagaagaagggcaaaaaaacaacgagttgctgatgcatacagatcagataccaaatctgcccgggctgatggaacgcggatcggacatacagaatgcgtgcgtctctctcgggcggcacctccggccacgccactgatgattggtgggcaaaagaaacacatgagagacaaataaataaatacacatacacttgaaattttgaacaggccgtttgaacgagtcgtcgtccccggcgtgtttccatccatgggccatggcacccggatattcctagcttataccatgaacgagatatgtatgactcggattacgccatggcaacacgccaacaacacctgagatgtttctgcacgcgccgctggtccggtggccactgagaaaacgaacaagagagccggcagcatatgcctgccgcagcgcgcaaccgtccgagacccgccgtctgacagccgcggagctgcgaagccgaggtggcaactcctgtccccagattctggagaatgaacccattgcggttcccttcctcatcagccaaaacatcaaaccccgtcgaaaaccaccaccaccgagccagatgcggagatcttcagcagcctgattagcccatttgatggaatggcttgttgctgtttcctagtagagataacatgcagattaatgaaaattaagcatcttccctcctcctctcttatttactccatctgggaggatcactgctgggttttcagttttctcaacccaaatcaaatttccagtaagccacgcctttgttgtttccccatctagaccttaatgaatgaaagaaactgtcagcttaagaaagaaagaaagatcattatgtatatgtacaagtagaacctcgggagtacctactatagtgcttgtttaaagccagactattttacctccaacattggaaatgcctgctattatagtgtttttttaagcctcttgggagaatatggttgtcagtatatacatctgcatgtaaactggcatgcccaaaaacgcaccgtctatgcatatatatataataatactgatgccatctatgctagctatgcatctcccttcccatatatactgcggctctaccgcaaaacgttcacaaaatccactggggggaaaaggatggccatgaggcccatgagctactatgaagaccactcgatgtcatcatctcatgccgatgacacggatgaaaggaagagcacggtttcagcctcccccgaggctagcgccgacgaggagtcgttctcattctttgggctgctttactacgccgacacggtagattggctcctcatggccctgggaacccttgggtctatcatccacggcatggcattcccggtcgggtatctcctccttggaaaggcgctcgatgccttcggaactaacataaatgatccggagggcatggtccatgcgctctacaaggtgaacttgctaaagccgtttatcacgtcattagcctttcaaatttctgattctattggcctgcagttgttttcaaattgcatgatgaggctttcccgcttgttgcttgaaggtggtcccctttgtgtggtacatggcagcagccactcttccagctggaatggttggtaagtcaagaatctgccatcctttccttccaatatgcatgtggattttccttgtgatgctttagaaagaacaaatataggggaggacgcaaaacgtgtattcctgtggtttttggtcagctggctctatgaaacaaagatatgaagtagaactgccagcattgctcgctgatttatttgcccaataagcataaaattagctcaactcaggagagattttattttacaggtgcgcttggaaattaattttccacttatattcaattatatatgacataaaaagcacatctctgaactttgacgagtccagtaaaggcgcactaattgcagaaaaagatatgtacagaaatattatttttgttaccagcatgtttagaaatgacaagcataggagatctactatagaaaaacaacatgacaacttttcagtggtgaaatgttgctaaccttttatcggatgaattggccgcatgcagagatctcctgctggatatactcaagtgagagacagttagcacgcatgcggctcgcgtttctgagatcaatccttaatcaagaggttggggccttcgacactgacttgactactgcaaccatcatcaccggagtaaccaactacatgagtgtcatacaagatgcaataggagagaaggtaatggatttcacaatcatatgagcattatactgatgcaagtcttttgaagctctgtggtcagatctgcatcttaagttcactcttctgcagctgggtcatttcgtcgcaagcttctccactttctttgctggtgtcataattgcgtttatcagctgctggcaagttgcaatgctttccttcctggtcattccacttatcctcatcatcggagcagcatacacgaaaaagttgaatgtcttatctttgtcacgcaatgctattgtttcagaggcagtatcagttgtagagcagactttgtcacatatcaagaccgtcttctccttcgttggagagagctgggccatgaagtcctttgtccagtgcatggaaagccaatttaatctaagcaagaaggaagcattgataaagggaataggacttggaatgttccaagcagtgactttttgttcatgggcactgatggtttggattggggcagttgcagtaaccaaaaacaaggcaacaggaggtggcacgatagctgctatcatgagcatcctctttggtgcaatatcaattacctatgccgcaccagaccttcagaccttcaatcaggcaaaaactgcaggaaaagaggtcttcaaggtgataaagagaaagccatccataagttatgcaaaaagtggattagtactagacaagattcatggagagatcaaattccgtagggtgcactttgcatatccttcccgccaggataagccaattctccaaggattctcattgtccatccccgcaggcaaagtcatcgctctggtaggaagcagtggctgtggaaagagcactgtcatttcactacttcaaaggttttatgatccaacttcaggtatgcttctacaatcttatcagtgcaactatatacatgatctacttcaccatttttcgactaaaacctgaacaaaaagggttatatattgtttattactcgtacttttgtgaagcattagtaactgtaagcttaagtagtattaaaatgcttcagtcatgtaagaaggcctaatactgcaggtgacatactcattgatggccacagtatcaagaaaattgatctgaaatcgctgcgcagaaacatagcttcagtctctcaggaaccatcactattttctggtaacataaaggacaacttgaagattggtaaaatggatgcaagtgacaaggagataactgaagcagcaagaacagctaatgttcattcattcatatccaaactaccaaatgagtacttgaccgaggtaggagaaaggggtgtgcagttatcgggtggccagaaacaaagaatagctattgcaagggcaatgttgaaggatccaccaatcctacttctggacgaagcaacaagtgcccttgattcagaatcagagaagctagttcaagatgcacttgagagagcaatgcgtggaaggactgttatcttgatagcccacaggatgtccacaattgtaaatgctgacactatagttgtcgtcgaaaatggaagagtagcacacactgggacacatcatgagttgcttgacaaaagcacattctactccaatgtatgcagcatgcaaaatatagacaaggaagctgaaaataaagtggcaaggtaaagttaaatgtagccaatggaaagttttacttgaccaatgttttatactcagttaagaaattcttcaatatgacttatcgcttcaaaagtaaatgtgtcatgcatgggttggggtgtaccttagaatatcaatgaataaagttttttcaaactggacgccagcagtttgaaataaaagcaagagttactatttacaaatgatgaacagaacaggaaactgccaaaaaaatgaaaacacatcaactcctcaataggaagtttagtgataatagtacatataagtacgattactaagtagaacttatggattgtttggtttgaggaatgatgtagtccatcattttctcactcctcacttttttgtttggtttgtggaatggagtgagttaatccatcaccacctcattcatcatagttagttgtttagtactaatatgtggaatgaaatcatcccaccaaatttgaggaatggacccatgatgcaccacttcattttggatagagtgattcatcaaaccaaacaactcattaatgtttttagttccactgattaaacagcactcctgataacatggaggaacaaattggcgaagcacacatcaagcagtcctccacaaatcagggaccaaacaaaaagctagaaagactggagtcaaaacaaccaagaaatgagaatgtaaaggaaacaccccctttcttcagactttggtatggattgcgtaaagaggacattatgaagattctagttggctcctcagcagcagccatctctggaatctcgaagcctttgtttggttatttcatcatgacaattggcgtggcatattatgacccgaatgcaaaaaaggaagtcaccaagtattctttgatattcttcacagcagggatggttacaatggtgagtaacatcttgcagcactatatttatggtatcattggagaaagggcaatgaaaaacataagggaggcactcttttcagctgttctccgaaatgagcttggttggtttgagaaaccaaataatggcgtaggatttcttacctcacgcattgtcagtgacacgtcaacagtcaagaccatcatatcagacagaatggcagttattgtgcaatgcatcgcttcaattctgatagcaacaatagtaagcatgaaggtcaattggagaatggctttagtttcatgggcagtcatgccatgccatttcattggtggccttattcaagccaagtcagcaaaaggattttatggtgactctgctattgctcaccgggaacttgtctccctagcttcagaagctgctagcaacatccggactgtggcatcctttgtttatgaagatgaaataatcaagaaagcagaattgtcactgcaagaacccttgaggatcaccaagattgagagcatgaagtatggggtcatccaagggatctcgctctgcctctggaatattgcacatgcagtggccctatggtacaccacagttttggttcagaggaagcaagccaaatttgagaacagcataagatcataccagatattctcactcacagtaccttccatcacagaattatggaccctcattcctatggtcatgtcagccatttcaatactgaatcctgtatttgacacacttgacagagagacacaaatcgtcccggataaaccagaaaacccaggcaaagggtggctcgtcggtagaaccgagtttcaggatgtgagcttcaattatccatctagaccagaggtgaccattctggatggcttcaatctaattatagaacctggccaaagagtagcattggttggccccagtggtgcaggaaaatcctctgtactggctttaatactgagattctacgatcctgctagaggtagattgttaattgacaacaagaacataaaggactacaatctccgatggctcaggaagcagattgggctagttcaacaagaaccaatcctgttcaacacatccatcagagataacattagctatggaagtgaaagcccttcagagactgaaatcatccaggctgcaatggaggcaaacattcacgaattcatcagtggtctaccagaagggtatggcactgttgttggagacaaagggagccagctttcaggagggcagaaacagagaattgctattgcaagaacaatactgaagaggcctgccattctgcttcttgatgaggcaaccagcgcacttgatggtgaatctgagagggtggttatgagctctttagggaccaaggtgtggaaggacaaagatgagcaagccagtacgattacaagtatcacagttgcacatagactgtccacagtcataaatgctgatacgatagttgtgatggagaaaggaaaggttgttgaacttggtaatcaccaagagttgatctctgctgaagatggcgtttactcaagattgttccacttgcaaagcaacatgaaagaatgaccatctattcaagttccattatggccaaagaccaaagacacttagcaagaatagctttaggagattaagcattgctcaaatgcacttgctgtcacaagttgtaataacatagctatatcatcatatatcgatgatgcatagtccaccagttagggtaaaaaaataactatatattacttgaatggtatctgtttggaagatagagtaacagatggaagatagagtaacagaacttaagacaggaaagggattcagtaatatgctggtttccgatcatgcagtccatcaaccagtttaaccgtctttcaaggttgaggacaacttgaacaaagttctctccaagaaactagctgaatatctatttctaaagaaataggcaataaatataacatagaaaaaaagaaaatgtccttaacaattaagctacctaaaataatgcatatcgaaaatagaaccacctaaattcggtacatgggacagcaaatagcaaagctgagacacttatttctaatgaactgattaattataaatctataagatacatcaagttcacataatgatcagactattcagccaaatcagaactggaatcagagaattaggccgttggatgactattgtgaaagttccaggcactaacatgaagacttgcaacagaaactgccttgtttattactggacaccttgctcttgcagtcttgttgacgtaatttctttttttttatgtagcagaaatatcaaacatgtttaccaagacatcaagtatatgtacgactgtacgagtaagatagccggcgtatttatttggaatttggaatgaccgaggaatatgtagactaaggacggattccaatagaaaagtggcatggcctattctggattagacttgtagctggagtagagtaatgtaacttgtagatgaaaacagagatgtctcatgcactacaatttggttatgaggacaaaagattcatgcttagtatttcctaaaattgtgacttttactgcaaaattgaagttggagacatcatcaagaaagtttactttcatgtctgaatacgcaggttggacatgctgcatcatgtcagcaaaggagtcatgaacaaaaatgggagtcactaggattgaacaatagataacattatgaatcttgatagtatcattggtgcaaatttgtagctatgtggttgttactgtgtgtactagtgctataaagctcagtgtgccagctactcactttttgcacattaacagaagatccaggaaagcagtgccactcatccaaaatgataggcccactgaatcatctgaacctaagattgcagatggcaaggaaagcacgcgagcagcatccatggcaccagaaacagaagccgaagacagatcgtttgcattctttggtctgtttgctacggtggatgcaatagattggctgctcatgatatcaggaaccatggggtccatacatgacatggggtcttcaatgtcgtactacatagtagggaaatctcttgatgtggccgggaacaacatgggcaataacgaggccactgtccatgaactctctaaggttacctcagatctgatttattttcaagctaccctgttaaataccatttgattctgctgtttgattttagtgttgtttcactaacagtatctactttacatgttcctgtttgcagttaattccatatatgtgaaccttagcaattgttacccttcctggcggaatgattggtgagtaaagccttgaagttctaactttgctattttatcaacgatgtaagcaaaagaaagcagactggtaattatgctttgctgcccttgcatgaagcatactgaaggtctgaattatgcttatgctagtctgaaaatcaaattgactaaactaactggtatacattagtgtatatgaagaacagtagaactatttaagtcagcaacatggtacacctccgttctacaatgtaagatgtcttactcctaagtcaaccttctctagttttaaccaggtcgatgaaaaaatattaacatctacaataccaaataaatgcactatcgagatatatttcatggtgggtggaactaatttgatgatgtagatatttatgtttttttctataaacttgtcaaagtcagagaagtttgagtgtttgacagcaaggctagagctggattgagtgtaagctggagtattgaatcatttgaattacttcaaagtagctgcataagcaaaactcccaaaaaataagttatgcagcgaggaacaaagcgatcgccccaatcacatctcataatactaactaacgatgtttatttaagagcgagaaaggtattaattatgagattatggttgcatcaacatttgacatcacaatcacaaagaaaacgaggactctgaccctatccagctatcgcgccaatagagaaacggcgtaccatggaaactagggaaccgaagtatttgaagctattattttccgggagacgaatgggaaatatacgcagaaattgcactcacccgctcaccagtcgtaccgcctcctccacctcccccctcgtgtttagtcccttctccctccgcgctcctccagttgttgcg

SEQ ID NO: 16495 - DNA, 8250 bp, Zea Mays
gtacaacatttaccaattaccatacatatccaaccccaacactgaattaggagattatggagggttagaaaatacaagacgtgagagaagacgcatcaaatgcgaggagactttaagaagaagggcaaaaaaacaacgagttgctgatgcatacagatcagataccaaatctgcccgggctgatggaacgcggatcggacatacagaatgcgtgcgtctctctcgggcggcacctccggccacgccactgatgattggtgggcaaaagaaacacatgagagacaaataaataaatacacatacacttgaaattttgaacaggccgtttgaacgagtcgtcgtccccggcgtgtttccatccatgggccatggcacccggatattcctagcttataccatgaacgagatatgtatgactcggattacgccatggcaacacgccaacaacacctgagatgtttctgcacgcgccgctggtccggtggccactgagaaaacgaacaagagagccggcagcatatgcctgccgcagcgcgcaaccgtccgagacccgccgtctgacagccgcggagctgcgaagccgaggtggcaactcctgtccccagattctggagaatgaacccattgcggttcccttcctcatcagccaaaacatcaaaccccgtcgaaaaccaccaccaccgagccagatgcggagatcttcagcagcctgcacaagagtattccggtgaagctgttgttagtcactcattcatcgtcagttgagaatgaacgcacgctgcaagagagagccctccccttttggcgcttctctgtttggaagcaaacgcatcagcgaagcgtttccaggccgccagcgccaggcgaagacaagcattcggggctggccgcgatgacattgcgacatggacagccgcgcgtgtcctatgcgcagtctcaagggggcatatgcccgaatcatgctccagttattcctcgacacccgccttggtcttgtaagcgctcttcaacctattgcatgcgtggcgtgcagaccggacctgaccttgtgcgttcctaacatgcacggttgtcgtactaggggcaagaggcgagggatcttttagagtagagtgagattcaagacactgatttaactttcagatcgaatatttcagatgggacttccattctcgtaggagatgtgtggcagtgccaatattaaaaaacttcagaaactgatagtcagaaacagtatatatttatatttttttcatcagaagtaccctagtccctaacttagaatatgagtgaaagaaaatctctactgacacacacacacaaaaaaaaaaaatagaatgcatgaaacgacgtcttcattgctctttcgtgactagagggagtacctgattagcccatttgatggaatggcttgttgctgtttcctagtagagataacatgcagattaatgaaaattaagcatcttccctcctcctctcttatttactccatctgggaggatcactgctgggttttcagttttctcaacccaaatcaaatttccagtaagccacgcctttgttgtttccccatctagaccttaatgaatgaaagaaactgtcagcttaagaaagaaagaaagatcattatgtatatgtacaagtagaacctcgggagtacctactatagtgcttgtttaaagccagactattttacctccaacattggaaatgcctgctattatagtgtttttttaagcctcttgggagaatatggttgtcagtatatacatctgcatgtaaactggcatgcccaaaaacgcaccgtctatgcatatatatataataatactgatgccatctatgctagctatgcatctcccttcccatatatactgcggctctaccgcaaaacgttcacaaaatccactggggggaaaaggatggccatgaggcccatgagctactatgaagaccactcgatgtcatcatctcatgccgatgacacggatgaaaggaagagcacggtttcagcctcccccgaggctagcgccgacgaggagtcgttctcattctttgggctgctttactacgccgacacggtagattggctcctcatggccctgggaacccttgggtctatcatccacggcatggcattcccggtcgggtatctcctccttggaaaggcgctcgatgccttcggaactaacataaatgatccggagggcatggtccatgcgctctacaaggtggtcccctttgtgtggtacatggcagcagccactcttccagctggaatggttgagatctcctgctggatatactcaagtgagagacagttagcacgcatgcggctcgcgtttctgagatcaatccttaatcaagaggttggggccttcgacactgacttgactactgcaaccatcatcaccggagtaaccaactacatgagtgtcatacaagatgcaataggagagaagctgggtcatttcgtcgcaagcttctccactttctttgctggtgtcataattgcgtttatcagctgctggcaagttgcaatgctttccttcctggtcattccacttatcctcatcatcggagcagcatacacgaaaaagttgaatgtcttatctttgtcacgcaatgctattgtttcagaggcagtatcagttgtagagcagactttgtcacatatcaagaccgtcttctccttcgttggagagagctgggccatgaagtcctttgtccagtgcatggaaagccaatttaatctaagcaagaaggaagcattgataaagggaataggacttggaatgttccaagcagtgactttttgttcatgggcactgatggtttggattggggcagttgcagtaaccaaaaacaaggcaacaggaggtggcacgatagctgctatcatgagcatcctctttggtgcaatatcaattacctatgccgcaccagaccttcagaccttcaatcaggcaaaaactgcaggaaaagaggtcttcaaggtgataaagagaaagccatccataagttatgcaaaaagtggattagtactagacaagattcatggagagatcaaattccgtagggtgcactttgcatatccttcccgccaggataagccaattctccaaggattctcattgtccatccccgcaggcaaagtcatcgctctggtaggaagcagtggctgtggaaagagcactgtcatttcactacttcaaaggttttatgatccaacttcaggtgacatactcattgatggccacagtatcaagaaaattgatctgaaatcgctgcgcagaaacatagcttcagtctctcaggaaccatcactattttctggtaacataaaggacaacttgaagattggtaaaatggatgcaagtgacaaggagataactgaagcagcaagaacagctaatgttcattcattcatatccaaactaccaaatgagtacttgaccgaggtaggagaaaggggtgtgcagttatcgggtggccagaaacaaagaatagctattgcaagggcaatgttgaaggatccaccaatcctacttctggacgaagcaacaagtgcccttgattcagaatcagagaagctagttcaagatgcacttgagagagcaatgcgtggaaggactgttatcttgatagcccacaggatgtccacaattgtaaatgctgacactatagttgtcgtcgaaaatggaagagtagcacacactgggacacatcatgagttgcttgacaaaagcacattctactccaatgaacaaattggcgaagcacacatcaagcagtcctccacaaatcagggaccaaacaaaaagctagaaagactggagtcaaaacaaccaagaaatgagaatgtaaaggaaacaccccctttcttcagactttggtatggattgcgtaaagaggacattatgaagattctagttggctcctcagcagcagccatctctggaatctcgaagcctttgtttggttatttcatcatgacaattggcgtggcatattatgacccgaatgcaaaaaaggaagtcaccaagtattctttgatattcttcacagcagggatggttacaatggtgagtaacatcttgcagcactatatttatggtatcattggagaaagggcaatgaaaaacataagggaggcactcttttcagctgttctccgaaatgagcttggttggtttgagaaaccaaataatggcgtaggatttcttacctcacgcattgtcagtgacacgtcaacagtcaagaccatcatatcagacagaatggcagttattgtgcaatgcatcgcttcaattctgatagcaacaatagtaagcatgaaggtcaattggagaatggctttagtttcatgggcagtcatgccatgccatttcattggtggccttattcaagccaagtcagcaaaaggattttatggtgactctgctattgctcaccgggaacttgtctccctagcttcagaagctgctagcaacatccggactgtggcatcctttgtttatgaagatgaaataatcaagaaagcagaattgtcactgcaagaacccttgaggatcaccaagattgagagcatgaagtatggggtcatccaagggatctcgctctgcctctggaatattgcacatgcagtggccctatggtacaccacagttttggttcagaggaagcaagccaaatttgagaacagcataagatcataccagatattctcactcacagtaccttccatcacagaattatggaccctcattcctatggtcatgtcagccatttcaatactgaatcctgtatttgacacacttgacagagagacacaaatcgtcccggataaaccagaaaacccaggcaaagggtggctcgtcggtagaaccgagtttcaggatgtgagcttcaattatccatctagaccagaggtgaccattctggatggcttcaatctaattatagaacctggccaaagagtagcattggttggccccagtggtgcaggaaaatcctctgtactggctttaatactgagattctacgatcctgctagaggtagattgttaattgacaacaagaacataaaggactacaatctccgatggctcaggaagcagattgggctagttcaacaagaaccaatcctgttcaacacatccatcagagataacattagctatggaagtgaaagcccttcagagactgaaatcatccaggctgcaatggaggcaaacattcacgaattcatcagtggtctaccagaagggtatggcactgttgttggagacaaagggagccagctttcaggagggcagaaacagagaattgctattgcaagaacaatactgaagaggcctgccattctgcttcttgatgaggcaaccagcgcacttgatggtgaatctgagagggtggttatgagctctttagggaccaaggtgtggaaggacaaagatgagcaagccagtacgattacaagtatcacagttgcacatagactgtccacagtcataaatgctgatacgatagttgtgatggagaaaggaaaggttgttgaacttggtaatcaccaagagttgatctctgctgaagatggcgtttactcaagattgttccacttgcaaagcaacatgaaagaatgaccatctattcaagttccattatggccaaagaccaaagacacttagcaagaatagctttaggagattaagcattgctcaaatgcacttgctgtcacaagttgtaataacatagctatatcatcatatatcgatgatgcatagtccaccagttagggtaaaaaaataactatatattacttgaatggtatctgtttggaagatagagtaacagatggaagatagagtaacagaacttaagacaggaaagggattcagtaatatgctggtttccgatcatgcagtccatcaaccagtttaaccgtctttcaaggttgaggacaacttgaacaaagttctctccaagaaactagctgaatatctatttctaaagaaataggcaataaatataacatagaaaaaaagaaaatgtccttaacaattaagctacctaaaataatgcatatcgaaaatagaaccacctaaattcggtacatgggacagcaaatagcaaagctgagacacttatttctaatgaactgattaattataaatctataagatacatcaagttcacataatgatcagactattcagccaaatcagaactggaatcagagaattaggccgttggatgactattgtgaaagttccaggcactaacatgaagacttgcaacagaaactgccttgtttattactggacaccttgctcttgcagtcttgttgacgtaatttctttttttttatgtagcagaaatatcaaacatgtttaccaagacatcaagtatatgtacgactgtacgagtaagatagccggcgtatttatttggaatttggaatgaccgaggaatatgtagactaaggacggattccaatagaaaagtggcatggcctattctggattagacttgtagctggagtagagtaatgtaacttgtagatgaaaacagagatgtctcatgcactacaatttggttatgaggacaaaagattcatgcttagtatttcctaaaattgtgacttttactgcaaaattgaagttggagacatcatcaagaaagtttactttcatgtctgaatacgcaggttggacatgctgcatcatgtcagcaaaggagtcatgaacaaaaatgggagtcactaggattgaacaatagataacattatgaatcttgatagtatcattggtgcaaatttgtagctatgtggttgttactgtgtgtactagtgctataaagctcagtgtgccagctactcactttttgcacattaacagaagatccaggaaagcagtgccactcatccaaaatgataggcccactgaatcatctgaacctaagattgcagatggcaaggaaagcacgcgagcagcatccatggcaccagaaacagaagccgaagacagatcgtttgcattctttggtctgtttgctacggtggatgcaatagattggctgctcatgatatcaggaaccatggggtccatacatgacatggggtcttcaatgtcgtactacatagtagggaaatctcttgatgtggccgggaacaacatgggcaataacgaggccactgtccatgaactctctaaggttacctcagatctgatttattttcaagctaccctgttaaataccatttgattctgctgtttgattttagtgttgtttcactaacagtatctactttacatgttcctgtttgcagttaattccatatatgtgaaccttagcaattgttacccttcctggcggaatgattggtgagtaaagccttgaagttctaactttgctattttatcaacgatgtaagcaaaagaaagcagactggtaattatgctttgctgcccttgcatgaagcatactgaaggtctgaattatgcttatgctagtctgaaaatcaaattgactaaactaactggtatacattagtgtatatgaagaacagtagaactatttaagtcagcaacatggtacacctccgttctacaatgtaagatgtcttactcctaagtcaaccttctctagttttaaccaggtcgatgaaaaaatattaacatctacaataccaaataaatgcactatcgagatatatttcatggtgggtggaactaatttgatgatgtagatatttatgtttttttctataaacttgtcaaagtcagagaagtttgagtgtttgacagcaaggctagagctggattgagtgtaagctggagtattgaatcatttgaattacttcaaagtagctgcataagcaaaactcccaaaaaataagttatgcagcgaggaacaaagcgatcgccccaatcacatctcataatactaactaacgatgtttatttaagagcgagaaaggtattaattatgagattatggttgcatcaacatttgacatcacaatcacaaagaaaacgaggactctgaccctatccagctatcgcgccaatagagaaacggcgtaccatggaaactagggaaccgaagtatttgaagctattattttccgggagacgaatgggaaatatacgcagaaattgcactcacccgctcaccagtcgtaccgcctcctccacctcccccctcgtgtttagtcccttctccctccgcgctcctccagttgttgcg

SEQ ID NO: 16496 - DNA, 1657 bp, Zea Mays
actcagcacacacatcagatcgccacatctccgacaccaaccctcctccccctctcgccgtcggccccgcccgtcagcctcggccgagtgcgtctgcctcgcactcccgcggcccctatagacagagcagccgctctagagcgggaggaaaggcgagcagaggagacagagatggggaagggaggaggagaagaggacggcgcggcggcggccgcgcgcgcggcggagcaggcgcgggagctgcaggacgcggcggctgcgctgctgacgcagacgcgggcggaggaggaggcgctgcgccgccgcgccgccgcgttgcagggggagctgcggcggctacgcgaggccgccgcggcgcacgcggacagcgacaaggttgaggaggacttggatcgagcagcgtgcctcatcgctgaaggtgacgttgcgtcgctgctcccgagcaagacgcaagtaaatttgcgggcaacaaggaaggaggtgcagctcaaggtgaaggaggagtacaatagctacagggacagaactgccttgctgtttctttgttttccggtgattttgttgtttcttcgacaatggttatggaatggatgttttccagtattgccagttcagctataccaggcttggttattattcctgtataccagtttagctttgcgtgagaacatactgcgagttaatggaagtgatattcgtccttggtggatacttcatcactactgtgccatgctgatgtctcttgtaagtctcacatgggagataaaggggcaacctaattgtgcacgcaagcagagaggcgtggaacttttcctttgctgggccataatgcaaggatttgtcatgatgctgcagaatagatatcagcgtcaaagattatatactaggattgctttggggaaggctaaaagaatggatgttgtatggggagagactgctggtgttgaaggtcaattgttgctgttgtgccctctccttttcctcctgcagggattcgagggttatgttgggtttttacttctgcgcacagctcatactggcgttgtccctgagtggcaggttgtggtatgcgggatcctgctgatcgcgatggcaatcggtaactttgcaaacacagtggacaccctggtaaccaagtcccggttcaaggcgaagatgaagaaatccaagggcagacgggacctcgacacatgcccctcgccaacaggttcatcatcgccgatagattcagcgaccaccaaagcatgaacaaggccaagaggaaaaggtgcccgtgtttaacccgggtgtgttaccactgtaaagcattttagtgtttttttttcttggccgtcagctcgtaatcctgtccgtcgtctgtgtcgaagctcatactcgtgtaatcaatcatcaggcaagtaggctgctgatggttctaggctggaggtggccgagaataaacttgtggtgtttgtttatatacctgtaccctgaatgaacatcgagtgggctagggtggtgggcttaggactatgtaaggcttagcaaaattttccaagtatagttgtgagacaggcaggcatttgtcacaatgaatgaaacatgcgaagttgtatacacgttgtggcaatgtgttgctttgtatgttggttggtgcatgcttacgttgctctgaaat

SEQ ID NO: 16497 - DNA, 864 bp, Zea Mays
attataccgaggtgtctaatatactaaccaaaatataagacgatttttgcaatcttaatgactcaaaaggtatatttattcgagacaattttcaataagaatctgtcttcaatcaatataagacatttcctatgatgtaactgtctcaaaatacttctttattaaagacggatctccaacaaaccgtcttactttactcatcgccatatggtaaaagactcttctataaaatacgctgatatacgtcttaaaatatgtgtcttaaataagcatatctctagtagtgtcatacacatcacaaatcacattcatagaacgataacagtagtattattagcaccaaaccacaataagatacatcatctcaagttccataaacatctcaacatcatctgaagtaccactttcacataacatgttaaccaaactaatggcctaaacattgtgtgctagcgtgtacaaactgagttatgggaggtgtttcaaatttccgtttttattgtagaatagccctttttgatgaagaacttcacggcacgcaaagcaaagcaagtatgttacaaccttagccacgccgatggtaaccatatctctttctagccattcagcatggatcatggatttaggaacatgcaatgaaagcaaaaagcaagcagtgctaagtaagtgtaatgtgatgaccaacaataaaacataaaaattacaacatagacaatgatagcgaacttacatcctcacgattgaccatgtaatggaaggtgacacaacaccattcgcatacaaaagaaccgcacaggacagtactcagaggttgtttgtcgccaaatggaaataatgatgttgaaaaattggcttgtcctctag

SEQ ID NO: 16498 - DNA, 856 bp, Zea Mays
atttttccctccaccgattagctgtgtgaaatggaatgcctgtcgatgttggattggaatggaatggagaagttcctgctgtgaaattgaatgtcgatgctgaaacacctcattgccaaaaacaaaacaaagaaaataggatcaatagaataaaattgcataaaaagaaaatatgattggcagaatgaaattggatgtgatttattagaatgaagtactctaataaaactgaatattgaaggggatatgaaataccctaatataactcaatactgaagggaatatttgtttcagcttctaaagttttctaatggagttttcacccttttttgcatgtcaaagactcaaaagtatttggtaattcatgtggtctaggcagtctatcgtccaccagataagccaatactacatgtccagcaatccgccatataatttccatgtccacgacagaaacaacggtggcgacttgagcacgtacacctctatagagagatgcggtggcggctaatattattctctcaagcacgctagccccctctgtgtatatgagtccattagaatttttcatggatcatgattgtctcttagccatatagtcaacagttttcactttttccctatggactctaagtatttgatcattcatgtaataaagactgtgacactctagcttgctcttcttatatgatatggcagagctcctgctaatgtttcatcaaaaaaaatgtgagatgcccttacctccacagattttgtcccttgtgtatcaaacagttatatcctagcatatgataacttgctaaacaaatctgtacacagaaattggcttctcgctatggatgtcagtatatcacta

SEQ ID NO: 16499 - DNA, 2120 bp, Zea Mays
attgaaatcacgccaaagtgataagcatcaaatgatttaaagataataaagtgaaattttgctttcaggcaactatgtaacttagtcaaggtttgatagtaggttttccagctatatgaatttaaaataaatataaaagagtaacatgcaccagttgttcctaaacttgttcagggtgtcacctaagtcccaatactattgatttgtagttccaggtctccaaacctactacgtggtttaccagaggtccaaacagacctaagtcgcaattagtatcgatgcaccgacttggcattttcatgtcacctgtgtcatcctaattttgccaacagaattaacccgtttatcgacaccaagtttatcaccaagaacaggatttggtcacctgcattttagacaattcaaaaatagataaataaagaaacatgagactgggcgtgtttgcttggaaccctggcagccaccatccatacaccccctgagagcatggacctaataatagaggtacttcaactgtcagttgcaggactaaccaagaatttccatatgatcatatccaagggaagatatgccacaaactacaggtgctttaacctgtaggcagtcaggcacccaaatttagagaccagtcaagatctttgatttttgatagttcaagacaactgtggtaatataaatgctgtcagaaaaccaagaagagacacaaggtaaatttaaacacggaatcattttgaaagtcaagttggcactgaatcaagcaagcatacgcattaatctagtctgtccttctgcatgtaatccaatacaaggatgctcacacaaaaaacatgcaatatttttttatcgaacacgcacgcgaatggcatatcttatattaagaataataaaggggggagaaccccaaacaatatcacaaagtcacaccttggattctaagaaaagaagaaaaaaggaggcctagtgtctgaagctagctcccacatgagtggggtctggagaagtgataatcggaggcaagtatttcccccgcaagtgtggagaagctgcttcgaacccgtgacctggtgactcaatgagacagctcgcaccactacatcaggcctgcccttaccaattctaagaaaatcttttcaggaccaaaatggtatagttcaagtttactctgggttttgactactcaagatgacctctatacacaaactttagttatgcattactgaaatataacatcacataccacattagttgcatcgaacttccctcctaggccaacctcgagaatagcaacatctacctgttagagttagaaaaaagacagggaaatgattgggcagatgccagtgaagctcagaaggtataaagaatgagtaaattcctagtgtcagaaaagcatatatgtgatagatgcatcaatgtgtctaccttgaaagttaaaatcacatattaacacaacaacttgcaactaaaatgactttagcatcttgaatatcttgcaaagaaggcagaaagagtagtaaatgctgtattttttatacctgctcagcagaaaatatcttgaatgcgagcagcgcgaggaacctgaaataggctggcatgggaatatcatcatcagtcttctcatggaagtaagcccatttatctcatcatccaccagtttatatagaataaaagcagcatgatgagatcagacagattatatgacaaatgcaaaaaagttcctgatggaatcaattcagtagtttgagctttgtcacttctaggtagtaaacgtcgagcgcagagtgactttatatggaacaacaaatcaagacacttaccttcaacttgttctagcaccaccaggagtacttcaaaattttctcttcagaaatattaaccccgatgccctcagaaaggaggagctaggtcagtgcgatcataaatttcatagcacctaattacaaggacagcacaagaaagatgacacatgatgtttacatacaaaaaatcatttggaagttcataggatccactgttgtcaacaccacagccagatgcaggtgtataagatgaaagaacagtaggaaaaagaattacccatctagctgaaatcgctctctaacatccatcaaatgtggtga

SEQ ID NO: 16500 - DNA, 771 bp, Zea Mays
agacactctaaactcaaacaaatacatatattgtcggcattagctcttacccttttcacccatgatgacgaagtgccagaagcgcgcgagcatccaaggactttggctcctttccatggttcttctagcgtcgtcctctcttgtctgtgcaagcatggcggtagatgggcaaaccaaagaggacatcaacgcaacgagtgtgacgagcatgaacatgacgaggtcgtcgtcggcgagctacaacatgactggcggcggcggagaacttaacagaggtccgtgcgtcgtgagatctggattctactggtgccagaacattggctatccgaccatgtcggagtgcttgaagaactgcgaatcgtaaagcactggagtatagaaaaggaataaagtgggcaaaccaaagatgacatcaacactggaagcacgatgattaccacaatgagggcaacaagcaacataattggcaatgatggtgcatcttctaaccgactatcctctgatcatgattgggttattggatggtactactgcaaaaggactaatacatactataggcgcttggctgaatgcttggtgcgttgccttcgaccatgcactaaggtggaaaggactgcttagaggtcacactttctcagcttgtagccaagtgcccttaaaactaaactctcggtgcactccgctagacattatgaaggtgttctgccgtatcttgcatgtaccaaaaaataaactataatttgaattatttatgattaagtgtttcttttt

SEQ ID NO: 16501 - DNA, 1518 bp, Zea Mays
gtgcaaaatgggaaaggaaggcagactcataattaggctccatagtgaggcctatcggaagcttgctaggagctatcatccagatgtaaacaaagatcctggtgctgaacaaaagttcaaggatatcagtaatgcttatgaggttctgtctgatgatgagaagcgatcgatctatgataaatatggagaagcaggtctgaagggtgctggcatgggcacaggagattactcaaacccgtttgatctctttgagtccctgtttgaagggtttggtggaatgggtggaatggggggtggccgtgctgctcggaacagaccaatgcaaggtgatgatgagagctacaatctggtactcaatttcaaggaagctgtgtttggtgtggagaaggagattgagataaccagattggaaggctgtaacacctgcgacggaagtggtgccaagccaggtacaaaggcaaccacatgtaaaacttgtggaggtcagggccaggtagtctcctccacaagaacaccgcttggaatattccagcaagtctccacctgcaatacttgtggtggcaccggtgaattctccactccttgcaacacctgtgggggtgatggccgggtgcgaaggacaaagaggatcagcctaaaggttcctgctggagtggattctggaagcaggctgagggtccggtctgagggtaatgctgggcggcgaggaggccctcctggggacctttatgtcttcattgatgttctctctgatcctgttcttaagcgagatgggacaaacattctctacacatgcaaggtttcttacattgatgcaatccttgggacaaccgtcaaagtccccactgttgacggaacggttgaccttaagataccctcagggactcagccaggcacaactctggtgatgtccaagaaaggtgtcccgcttctcgggaagtcaaatgcccgtggagaccagctggtgcgtgtccaggttgagattccgaagcgtctgagcagcgacgagaagaagctaattgaggagcttgcaaacctgaacaaggctcaaacagccaatagcaggagatgattatcgcacatggcttcgtaggacagcgtgcttgtgtgataggcaattttgatgcaaactgcagtgatgattggatgaaaagagttggtagtgataaactcttctacgaactacatacagcaaggggtctggagcaaaaaaatgtgccgttccacatctgtaacctcgtttttaagctattgaaagttgagtcagtgaactggacgtttttgcaatagcttagcatatgcactaggcgactttattagccatttttttttgttgttatacggcttttgtattcttggaagccttaggcaagatatctgatggtggaatcaggtttagacttgacatttcttgcacaaatgctgcaccatgcattcatggaatctgtaagctgtaccatggaaatgttaactgtagttttatggtttgtgatgcattgggggtttattggtttgctc

SEQ ID NO: 16502 - DNA, 1813 bp, Zea Mays
cccctctccccctcgtgctgtgcggtacggggcgccccaaaccctaaacggctacacgcaagtaataaacattatatggcgctagtacagttcaacggtgccttggttcctcaactcggtgaaaagcctcggctgctatccttgtcagctgcaatcgcaaaggctgcctattctgatgcaagattcctgacaccaaaaactggacctcttctgaacaactaaaccatgtaccatcgtcaagatttcgccagaaaaggggttcacgttttatcgtcagagctgaagctgatttctatagtgtacttggtgtctcaagaaatgctagtaaatctgaaatcaagagcgcctatcggaagcttgctaggagctatcatccagatgtaaacaaagatcctggtgctgaacaaaagttcaaggatatcagtaatgcttatgaggttctgtctgatgatgagaagcgatcgatctatgataaatatggagaagcaggtctgaagggtgctggcatgggcacaggagattactcaaacccgtttgatctctttgagtccctgtttgaagggtttggtggaatgggtggaatggggggtggccgtgctgctcggaacagaccaatgcaaggtgatgatgagagctacaatctggtactcaatttcaaggaagctgtgtttggtgtggagaaggagattgagataaccagattggaaggctgtaacacctgcgacggaagtggtgccaagccaggtacaaaggcaaccacatgtaaaacttgtggaggtcagggccaggtagtctcctccacaagaacaccgcttggaatattccagcaagtctccacctgcaatacttgtggtggcaccggtgaattctccactccttgcaacacctgtgggggtgatggccgggtgcgaaggacaaagaggatcagcctaaaggttcctgctggagtggattctggaagcaggctgagggtccggtctgagggtaatgctgggcggcgaggaggccctcctggggacctttatgtcttcattgatgttctctctgatcctgttcttaagcgagatgggacaaacattctctacacatgcaaggtttcttacattgatgcaatccttgggacaaccgtcaaagtccccactgttgacggaacggttgaccttaagataccctcagggactcagccaggcacaactctggtgatgtccaagaaaggtgtcccgcttctcgggaagtcaaatgcccgtggagaccagctggtgcgtgtccaggttgagattccgaagcgtctgagcagcgacgagaagaagctaattgaggagcttgcaaacctgaacaaggctcaaacagccaatagcaggagatgattatcgcacatggcttcgtaggacagcgtgcttgtgtgataggcaattttgatgcaaactgcagtgatgattggatgaaaagagttggtagtgataaactcttctacgaactacatacagcaaggggtctggagcaaaaaaatgtgccgttccacatctgtaacctcgtttttaagctattgaaagttgagtcagtgaactggacgtttttgcaatagcttagcatatgcactaggcgactttattagccatttttttttgttgttatacggcttttgtattcttggaagccttaggcaagatatctgatggtggaatcaggtttagacttgacatttcttgcacaaatgctgcaccatgcattcatggaatctgtaagctgtaccatggaaatgttaactgtagttttatggtttgtgatgcattgggggtttattggtttgctc

SEQ ID NO: 16503 - DNA, 1867 bp, Zea Mays
cggcgccacatcgccacggcactgccggagacgagtgcccacaccagcggctacacgcaagtaataaacattatatggcgctagtacagttcaacggtgccttggttcctcaactcggtgaaaagcctcggctgctatccttgtcagctgcaatcgcaaaggctgcctattctgatgcaagattcctgacaccaaaaactggttcaagaggtagaggtaaacacctgctatcacctagttatagtttgcattcacagacctcttctgaacaactaaaccatgtaccatcgtcaagatttcgccagaaaaggggttcacgttttatcgtcagagctgaagctgatttctatagtgtacttggtgtctcaagaaatgctagtaaatctgaaatcaagagcgcctatcggaagcttgctaggagctatcatccagatgtaaacaaagatcctggtgctgaacaaaagttcaaggatatcagtaatgcttatgaggttctgtctgatgatgagaagcgatcgatctatgataaatatggagaagcaggtctgaagggtgctggcatgggcacaggagattactcaaacccgtttgatctctttgagtccctgtttgaagggtttggtggaatgggtggaatggggggtggccgtgctgctcggaacagaccaatgcaaggtgatgatgagagctacaatctggtactcaatttcaaggaagctgtgtttggtgtggagaaggagattgagataaccagattggaaggctgtaacacctgcgacggaagtggtgccaagccaggtacaaaggcaaccacatgtaaaacttgtggaggtcagggccaggtagtctcctccacaagaacaccgcttggaatattccagcaagtctccacctgcaatacttgtggtggcaccggtgaattctccactccttgcaacacctgtgggggtgatggccgggtgcgaaggacaaagaggatcagcctaaaggttcctgctggagtggattctggaagcaggctgagggtccggtctgagggtaatgctgggcggcgaggaggccctcctggggacctttatgtcttcattgatgttctctctgatcctgttcttaagcgagatgggacaaacattctctacacatgcaaggtttcttacattgatgcaatccttgggacaaccgtcaaagtccccactgttgacggaacggttgaccttaagataccctcagggactcagccaggcacaactctggtgatgtccaagaaaggtgtcccgcttctcgggaagtcaaatgcccgtggagaccagctggtgcgtgtccaggttgagattccgaagcgtctgagcagcgacgagaagaagctaattgaggagcttgcaaacctgaacaaggctcaaacagccaatagcaggagatgattatcgcacatggcttcgtaggacagcgtgcttgtgtgataggcaattttgatgcaaactgcagtgatgattggatgaaaagagttggtagtgataaactcttctacgaactacatacagcaaggggtctggagcaaaaaaatgtgccgttccacatctgtaacctcgtttttaagctattgaaagttgagtcagtgaactggacgtttttgcaatagcttagcatatgcactaggcgactttattagccatttttttttgttgttatacggcttttgtattcttggaagccttaggcaagatatctgatggtggaatcaggtttagacttgacatttcttgcacaaatgctgcaccatgcattcatggaatctgtaagctgtaccatggaaatgttaactgtagttttatggtttgtgatgcattgggggtttattggtttgctc

SEQ ID NO: 16504 - DNA, 1858 bp, Zea Mays
ctcttatctccttcccccagccgccctccgcctccgcgccatcgacacgctcgagagcgtcgctgcctgctgctcgcgagttcaacggtgccttggttcctcaactcggtgaaaagcctcggctgctatccttgtcagctgcaatcgcaaaggctgcctattctgatgcaagattcctgacaccaaaaactggttcaagaggtagaggtaaacacctgctatcacctagttatagtttgcattcacagacctcttctgaacaactaaaccatgtaccatcgtcaagatttcgccagaaaaggggttcacgttttatcgtcagagctgaagctgatttctatagtgtacttggtgtctcaagaaatgctagtaaatctgaaatcaagagcgcctatcggaagcttgctaggagctatcatccagatgtaaacaaagatcctggtgctgaacaaaagttcaaggatatcagtaatgcttatgaggttctgtctgatgatgagaagcgatcgatctatgataaatatggagaagcaggtctgaagggtgctggcatgggcacaggagattactcaaacccgtttgatctctttgagtccctgtttgaagggtttggtggaatgggtggaatggggggtggccgtgctgctcggaacagaccaatgcaaggtgatgatgagagctacaatctggtactcaatttcaaggaagctgtgtttggtgtggagaaggagattgagataaccagattggaaggctgtaacacctgcgacggaagtggtgccaagccaggtacaaaggcaaccacatgtaaaacttgtggaggtcagggccaggtagtctcctccacaagaacaccgcttggaatattccagcaagtctccacctgcaatacttgtggtggcaccggtgaattctccactccttgcaacacctgtgggggtgatggccgggtgcgaaggacaaagaggatcagcctaaaggttcctgctggagtggattctggaagcaggctgagggtccggtctgagggtaatgctgggcggcgaggaggccctcctggggacctttatgtcttcattgatgttctctctgatcctgttcttaagcgagatgggacaaacattctctacacatgcaaggtttcttacattgatgcaatccttgggacaaccgtcaaagtccccactgttgacggaacggttgaccttaagataccctcagggactcagccaggcacaactctggtgatgtccaagaaaggtgtcccgcttctcgggaagtcaaatgcccgtggagaccagctggtgcgtgtccaggttgagattccgaagcgtctgagcagcgacgagaagaagctaattgaggagcttgcaaacctgaacaaggctcaaacagccaatagcaggagatgattatcgcacatggcttcgtaggacagcgtgcttgtgtgataggcaattttgatgcaaactgcagtgatgattggatgaaaagagttggtagtgataaactcttctacgaactacatacagcaaggggtctggagcaaaaaaatgtgccgttccacatctgtaacctcgtttttaagctattgaaagttgagtcagtgaactggacgtttttgcaatagcttagcatatgcactaggcgactttattagccatttttttttgttgttatacggcttttgtattcttggaagccttaggcaagatatctgatggtggaatcaggtttagacttgacatttcttgcacaaatgctgcaccatgcattcatggaatctgtaagctgtaccatggaaatgttaactgtagttttatggtttgtgatgcattgggggtttattggtttgctc

SEQ ID NO: 16505 - DNA, 1846 bp, Zea Mays
cccctcttatctccttcccccagccgccctccgcctccgcgccatcgacacgctcgagagcgtcgctgcctgctgctcgcgcggctacacgcaagtaataaacattatatggcgctagtacagttcaacggtgccttggttcctcaactcggtgaaaagcctcggctgctatccttgtcagctgcaatcgcaaaggctgcctattctgatgcaagattcctgacaccaaaaactggacctcttctgaacaactaaaccatgtaccatcgtcaagatttcgccagaaaaggggttcacgttttatcgtcagagctgaagctgatttctatagtgtacttggtgtctcaagaaatgctagtaaatctgaaatcaagagcgcctatcggaagcttgctaggagctatcatccagatgtaaacaaagatcctggtgctgaacaaaagttcaaggatatcagtaatgcttatgaggttctgtctgatgatgagaagcgatcgatctatgataaatatggagaagcaggtctgaagggtgctggcatgggcacaggagattactcaaacccgtttgatctctttgagtccctgtttgaagggtttggtggaatgggtggaatggggggtggccgtgctgctcggaacagaccaatgcaaggtgatgatgagagctacaatctggtactcaatttcaaggaagctgtgtttggtgtggagaaggagattgagataaccagattggaaggctgtaacacctgcgacggaagtggtgccaagccaggtacaaaggcaaccacatgtaaaacttgtggaggtcagggccaggtagtctcctccacaagaacaccgcttggaatattccagcaagtctccacctgcaatacttgtggtggcaccggtgaattctccactccttgcaacacctgtgggggtgatggccgggtgcgaaggacaaagaggatcagcctaaaggttcctgctggagtggattctggaagcaggctgagggtccggtctgagggtaatgctgggcggcgaggaggccctcctggggacctttatgtcttcattgatgttctctctgatcctgttcttaagcgagatgggacaaacattctctacacatgcaaggtttcttacattgatgcaatccttgggacaaccgtcaaagtccccactgttgacggaacggttgaccttaagataccctcagggactcagccaggcacaactctggtgatgtccaagaaaggtgtcccgcttctcgggaagtcaaatgcccgtggagaccagctggtgcgtgtccaggttgagattccgaagcgtctgagcagcgacgagaagaagctaattgaggagcttgcaaacctgaacaaggctcaaacagccaatagcaggagatgattatcgcacatggcttcgtaggacagcgtgcttgtgtgataggcaattttgatgcaaactgcagtgatgattggatgaaaagagttggtagtgataaactcttctacgaactacatacagcaaggggtctggagcaaaaaaatgtgccgttccacatctgtaacctcgtttttaagctattgaaagttgagtcagtgaactggacgtttttgcaatagcttagcatatgcactaggcgactttattagccatttttttttgttgttatacggcttttgtattcttggaagccttaggcaagatatctgatggtggaatcaggtttagacttgacatttcttgcacaaatgctgcaccatgcattcatggaatctgtaagctgtaccatggaaatgttaactgtagttttatggtttgtgatgcattgggggtttattggtttgctc

SEQ ID NO: 16506 - DNA, 1869 bp, Zea Mays
cactcaccaccccctcttatctccttcccccagccgccctccgcctccgcgccatcgacacgctcgagagcgtcgctgcctgctgctcgcgttcaacggtgccttggttcctcaactcggtgaaaagcctcggctgctatccttgtcagctgcaatcgcaaaggctgcctattctgatgcaagattcctgacaccaaaaactggttcaagaggtagaggtaaacacctgctatcacctagttatagtttgcattcacagacctcttctgaacaactaaaccatgtaccatcgtcaagatttcgccagaaaaggggttcacgttttatcgtcagagctgaagctgatttctatagtgtacttggtgtctcaagaaatgctagtaaatctgaaatcaagagcgcctatcggaagcttgctaggagctatcatccagatgtaaacaaagatcctggtgctgaacaaaagttcaaggatatcagtaatgcttatgaggttctgtctgatgatgagaagcgatcgatctatgataaatatggagaagcaggtctgaagggtgctggcatgggcacaggagattactcaaacccgtttgatctctttgagtccctgtttgaagggtttggtggaatgggtggaatggggggtggccgtgctgctcggaacagaccaatgcaaggtgatgatgagagctacaatctggtactcaatttcaaggaagctgtgtttggtgtggagaaggagattgagataaccagattggaaggctgtaacacctgcgacggaagtggtgccaagccaggtacaaaggcaaccacatgtaaaacttgtggaggtcagggccaggtagtctcctccacaagaacaccgcttggaatattccagcaagtctccacctgcaatacttgtggtggcaccggtgaattctccactccttgcaacacctgtgggggtgatggccgggtgcgaaggacaaagaggatcagcctaaaggttcctgctggagtggattctggaagcaggctgagggtccggtctgagggtaatgctgggcggcgaggaggccctcctggggacctttatgtcttcattgatgttctctctgatcctgttcttaagcgagatgggacaaacattctctacacatgcaaggtttcttacattgatgcaatccttgggacaaccgtcaaagtccccactgttgacggaacggttgaccttaagataccctcagggactcagccaggcacaactctggtgatgtccaagaaaggtgtcccgcttctcgggaagtcaaatgcccgtggagaccagctggtgcgtgtccaggttgagattccgaagcgtctgagcagcgacgagaagaagctaattgaggagcttgcaaacctgaacaaggctcaaacagccaatagcaggagatgattatcgcacatggcttcgtaggacagcgtgcttgtgtgataggcaattttgatgcaaactgcagtgatgattggatgaaaagagttggtagtgataaactcttctacgaactacatacagcaaggggtctggagcaaaaaaatgtgccgttccacatctgtaacctcgtttttaagctattgaaagttgagtcagtgaactggacgtttttgcaatagcttagcatatgcactaggcgactttattagccatttttttttgttgttatacggcttttgtattcttggaagccttaggcaagatatctgatggtggaatcaggtttagacttgacatttcttgcacaaatgctgcaccatgcattcatggaatctgtaagctgtaccatggaaatgttaactgtagttttatggtttgtgatgcattgggggtttattggtttgctc

SEQ ID NO: 16507 - DNA, 1916 bp, Zea Mays
gttcaccactcaccaccccctcttatctccttcccccagccgccctccgcctccgcgccatcgacacgctcgagagcgtcgctgcctgctgctcgcgcggctacacgcaagtaataaacattatatggcgctagtacagttcaacggtgccttggttcctcaactcggtgaaaagcctcggctgctatccttgtcagctgcaatcgcaaaggctgcctattctgatgcaagattcctgacaccaaaaactggttcaagaggtagaggtaaacacctgctatcacctagttatagtttgcattcacagacctcttctgaacaactaaaccatgtaccatcgtcaagatttcgccagaaaaggggttcacgttttatcgtcagagctgaagctgatttctatagtgtacttggtgtctcaagaaatgctagtaaatctgaaatcaagagcgcctatcggaagcttgctaggagctatcatccagatgtaaacaaagatcctggtgctgaacaaaagttcaaggatatcagtaatgcttatgaggttctgtctgatgatgagaagcgatcgatctatgataaatatggagaagcaggtctgaagggtgctggcatgggcacagggattactcaaacccgtttgatctctttgagtccctgtttgaagggtttggtggaatgggtggaatggggggtggccgtgctgctcggaacagaccaatgcaaggtgatgatgagagctacaatctggtactcaatttcaaggaagctgtgtttggtgtggagaaggagattgagataaccagattggaaggctgtaacacctgcgacggaagtggtgccaagccaggtacaaaggcaaccacatgtaaaacttgtggaggtcagggccaggtagtctcctccacaagaacaccgcttggaatattccagcaagtctccacctgcaatacttgtggtggcaccggtgaattctccactccttgcaacacctgtgggggtgatggccgggtgcgaaggacaaagaggatcagcctaaaggttcctgctggagtggattctggaagcaggctgagggtccggtctgagggtaatgctgggcggcgaggaggccctcctggggacctttatgtcttcattgatgttctctctgatcctgttcttaagcgagatgggacaaacattctctacacatgcaaggtttcttacattgatgcaatccttgggacaaccgtcaaagtccccactgttgacggaacggttgaccttaagataccctcagggactcagccaggcacaactctggtgatgtccaagaaaggtgtcccgcttctcgggaagtcaaatgcccgtggagaccagctggtgcgtgtccaggttgagattccgaagcgtctgagcagcgacgagaagaagctaattgaggagcttgcaaacctgaacaaggctcaaacagccaatagcaggagatgattatcgcacatggcttcgtaggacagcgtgcttgtgtgataggcaattttgatgcaaactgcagtgatgattggatgaaaagagttggtagtgataaactcttctacgaactacatacagcaaggggtctggagcaaaaaaatgtgccgttccacatctgtaacctcgtttttaagctattgaaagttgagtcagtgaactggacgtttttgcaatagcttagcatatgcactaggcgactttattagccatttttttttgttgttatacggcttttgtattcttggaagccttaggcaagatatctgatggtggaatcaggtttagacttgacatttcttgcacaaatgctgcaccatgcattcatggaatctgtaagctgtaccatggaaatgttaactgtagttttatggtttgtgatgcattgggggtttattggtttgctc

SEQ ID NO: 16508 - DNA, 1928 bp, Zea Mays
gttcaccactcaccaccccctcttatctccttcccccagccgccctccgcctccgcgccatcgacacgctcgagagcgtcgctgcctgctgctcgcgcggctacacgcaagtaataaacattatatggcgctagtacagttcaacggtgccttggttcctcaactcggtgaaaagcctcggctgctatccttgtcagctgcaatcgcaaaggctgcctattctgatgcaagattcctgacaccaaaaactggttcaagaggtagaggtaaacacctgctatcacctagttatagtttgcattcacagacctcttctgaacaactaaaccatgtaccatcgtcaagatttcgccagaaaaggggttcacgttttatcgtcagagctgaagctgatttctatagtgtacttggtgtctcaagaaatgctagtaaatctgaaatcaagagcgcctatcggaagcttgctaggagctatcatccagatgtaaacaaagatcctggtgctgaacaaaagttcaaggatatcagtaatgcttatgaggatgtctgtaggttctgtctgatgatgagaagcgatcgatctatgataaatatggagaagcaggtctgaagggtgctggcatgggcacaggagattactcaaacccgtttgatctctttgagtccctgtttgaagggtttggtggaatgggtggaatggggggtggccgtgctgctcggaacagaccaatgcaaggtgatgatgagagctacaatctggtactcaatttcaaggaagctgtgtttggtgtggagaaggagattgagataaccagattggaaggctgtaacacctgcgacggaagtggtgccaagccaggtacaaaggcaaccacatgtaaaacttgtggaggtcagggccaggtagtctcctccacaagaacaccgcttggaatattccagcaagtctccacctgcaatacttgtggtggcaccggtgaattctccactccttgcaacacctgtgggggtgatggccgggtgcgaaggacaaagaggatcagcctaaaggttcctgctggagtggattctggaagcaggctgagggtccggtctgagggtaatgctgggcggcgaggaggccctcctggggacctttatgtcttcattgatgttctctctgatcctgttcttaagcgagatgggacaaacattctctacacatgcaaggtttcttacattgatgcaatccttgggacaaccgtcaaagtccccactgttgacggaacggttgaccttaagataccctcagggactcagccaggcacaactctggtgatgtccaagaaaggtgtcccgcttctcgggaagtcaaatgcccgtggagaccagctggtgcgtgtccaggttgagattccgaagcgtctgagcagcgacgagaagaagctaattgaggagcttgcaaacctgaacaaggctcaaacagccaatagcaggagatgattatcgcacatggcttcgtaggacagcgtgcttgtgtgataggcaattttgatgcaaactgcagtgatgattggatgaaaagagttggtagtgataaactcttctacgaactacatacagcaaggggtctggagcaaaaaaatgtgccgttccacatctgtaacctcgtttttaagctattgaaagttgagtcagtgaactggacgtttttgcaatagcttagcatatgcactaggcgactttattagccatttttttttgttgttatacggcttttgtattcttggaagccttaggcaagatatctgatggtggaatcaggtttagacttgacatttcttgcacaaatgctgcaccatgcattcatggaatctgtaagctgtaccatggaaatgttaactgtagttttatggtttgtgatgcattgggggtttattggtttgctc

SEQ ID NO: 16509 - DNA, 866 bp, Zea Mays
caacaaggcggcaacaacttgaacaaggcatcgttcaacaatagagtagattataagggatgccccaccattcacatttcacgctcggcatttaaagtcaataatgcatgctagcaatcatctaatggaacccaaatcaatacaacagtcaaggaccacaactcatacaagcacgaaacaggttctgaatatcaggtacaatggagttcaggatagagaagcaaagcatgtggccaatgaagactagtcaaaaatatgcatcaggtaatctggatgctcgcaccactgacgattattgtccatccatgttaaagcatccgtaactgattataagttctgtaggctagcaggccggcagctgccactcgcgcgtgtcgagattactccccactgtaaaatgtttgataacgagagtaaaatgcatggttttctctaaagttttggcatggatcttcaaaaagtcgaactgagctccaggtttcaaatactctttgatggaataaacttgacataggggaggaaaagaatatgacacacccatgctctatcgaggctccataggacaagctttgccgttgctggatcagaggttctgcaggaggagtaggccgagcggctacatccaggccgcgctccactaatcaagcaagcaccattggctatggattcactgctgcgcgtacttgagagcgtcttgacatgtcctgatgccacaacgcagataggccaacagttttggagaagttggagttcccgacgcctctcgctccaagcacacgcgtgcatcaaccactcttgcattgtgatatactactactgctactactacactgatccacggtttggtctactgtttgctgcaggag

SEQ ID NO: 16510 - DNA, 2094 bp, Zea Mays
atatatcctgttttacaaaaaaaattatcatcctttcccattataaaaaaatacatataaaacaaatttctcattttgtatctaaactatccaccctattattatgatagatgattaaaaatataccactaagttaaaatctaaattactcacaattgctactattaaagataatcaaaataacccactaacattgcatctaattgtatattcaagatataaaagaggtgccatacaaatggaacactaggaatatgatatgtgtgaaaacatatatatatatacactacttcttaagatagtactgtaggcatccgacattcacaacactgtgtggtgcacggttctgccccctctgctctgcgatccccaatacgcgcagatcccgtctcctccgccatcaatggaaggtggccgaggatctcctctgcccctctgctccacgatccctatcatctgcgctgccatcaacgctccacccctgccgcaaatcgcctgccgccgctcgcgatgcgctcagccctaacaaattctctcacaagatctggcaaaacccatcacctccgctctcctcctctaccatcgggatcctggtggccaacgtcgtcctcgtcggtgagatgacctccaaactcctccaaacctcgcgctccatcgatgaccggaggcctccgcccctttgggatctccttattcacaaggcgtcgaggccgtcgtcgaccacgtcatgccgctacgctaggaggagacgccgacccaacgtcggcttcatggtggcctaagcgtgtagtgctgatctgctccgccgtttcgcccgcctccctccccaaagctgcttctaggatactgcgatggaggcgatcagcaacaccaggttagccctcgggatcctggtggcccgacagcgtggtcctcgtcggcgagaaggtgacctccaagctcttccagatctcgcgctccactgacgtccggaggcctccgcccctttgggatctccttcttattcacaaggtgggacaagcaccacgacttccaactctacttaagcgacccatctggcaactacggtggagggaaggttgtcgttgttggggccaacagccagtgtgcacaaggggtaacggagtcgtgtagcttctggtgcccgtagaggaaaggtgaggcgaggtgctcgccatgcgcctcaaggtgggcgacctcacgtggccatatacgccaattcggagaacgaatgaggtcgcaaagaaagggttcaataaccagaccaaggtctctcttagccgtcctcaatgcgctacgcagtcacggaatcaacctccacatcaatgatgatggcgaccataggccacacgtctgaaacaaccatcagttcacgagattgtttctctataaaacaaaagtactgtatgaaatttgagcacgttgattgttgcgtgctgttttatggcctcaccctttaattgaacacaagtagtgtctgacttttatttgcttcactgtaatatataacatatatttgtctataaaaagtctggattctcgatgatttttagtgaattcaaaagagaattccattatttccttctgtttgtgtctgaattggagtgacaacattgtgctctcaacttttttcatgaataatcaatcttgggctattgccatttaaatgaaagaaaatgcatttatgttgtttaaattcttgcagatcaactttatgcagagcttatggaacctgagaagcacatgcagatattctcttgtaggaaaatgaggtagcgagatgttacttggagaaatggtatctaaatttgtgttgctttctgttttgagttctgacctttcaacttgcagatgccaaacatactaaacaagtgtgagggaaatactacagacatttacgaatgccacacatttttgctaatactgattcctatcatattacaagtatactctacttatatttcctttatttttagctttggagttcaattgtatttttttgcaaaatataaggaatttcagttcagattatacacttttcatgttctatctatttgctttgtaaacagattaaccaaaaaatttagaagatag

SEQ ID NO: 16511 - DNA, 664 bp, Zea Mays
actcgggatagaggccctgaaagtcatcgagcacctcccatgtagcttcttccgcagtttgatgagcagaaggaccaggttgcagtcgagcaaattttgcgggtggtattcttggacgctgagcgcccgagcccacaaatggacaaactcaagcgccagctcgctgaagcagaagccgcgctggaggcacgcaagaagcctccggaggacaatggcacccgtattgtcggcgaaggccttgtgatcgatgaatggaaggaacgaagagagagatacctcgctcgccagcaggaagaaggcgttgattcagtgtagacacagaggaagccctgcagaccacactgggcgcgcgcgcattcctgatcaaaatggatttggagcagccaagcaacgatgaggccttgtgtaattaggatttgagcttcacgctggatgtagatgatccagccactgcctgataataataataataataatacgccctttcctaagccatgtactcgggtgttgttgtggagtgtgtggatgtgatacattccctagctgtattaaaagtgtaactgtaatatcgaaaggcacactccatcatgccacggggggcaattcttccgtccacttgctcatacgactcaccataataaatttatgtgtgattcagttgtca

SEQ ID NO: 16512 - DNA, 1154 bp, Zea Mays
gcacaccctagccgtcgccaacctgcagctccatcccggtgcttgcccagacgggtcgccccgtaaggagagaacgtgaccaggcaggagacgacgcttcatgtatccatctccgcctcaatcgaccgtgccaattaacaggctcccaaggaggagatccaatcctgcgggcgggtgtcccgtcgcccatccatcgatccgaatctgcatgtgaccagtctcatcgggctcttctcttttttaggaatgactcatgggtttctcaccatcccttccacttggggatttcaatcgaatggtgaaatggagttaccaatcaacaactagctgaatcagctcccggcctacccgggcttatctccaccggtgcaggtaagcattgctgctggcactcgagcaagacgacgccgactatgacctttgtccccatgagtcaacaggttggtgaacaccaccgctgggagcacctcgccaggaacgtgcgtacctcccgtgtctccttcaacccgccatgaatttcttggtttcactcgctagctgatcgactgactgacacacgtagtgaggatccagttggagtgagggatctgcttgtcaggtcatgaggaacatgcttgcaaatgagggtgtccgttcattctacaagggtttgtccgctggtttgctaaggcaagcaacgcacatagactgctcatcttggatccttcagctatggaatgtttgccaccagagggtgtgatagatttgtgaatgtgtgggatgacattaacaagagaatactatatcagtactcaaaagtgcgcatcaagcattgttgcactgtcattcggtaaggatggccatctgcttgctgtggcatccaactacacttatgaagagtgagaaaaaacgcactttgtctgacaaatctctgtttacgcaatattaaccgctcatgattctcctcacacttgtcctctttgtcgtcttgagttttatttgctgtgacttagcaaaagtgaattccactgatgggactaacgatacctcaatatgttttgtcaataccttaaggagtctattgtcctatttttctttcaaggttcgttgtagacttaaggtacacattatgaatcgtgcgttgccttcttttgagttgttacacaacaaatggt

SEQ ID NO: 16513 - DNA, 1177 bp, Zea Mays
gcacaccctagccgtcgccaacctgcagctccatcccggtgcttgcccagacgggtcgccccgtaaggagagaacgtgaccaggcaggagacgacgcttcatgtatccatctccgcctcaatcgaccgtgccaattaacaggctcccaaggaggagatccaatcctgcgggcgggtgtcccgtcgcccatccatcgatccgaatctgcatgtgaccagtctcatcgggctcttctcttttttaggaatgactcatgggtttctcaccatcccttccacttggggatttcaatcgaatggtgaaatggagttaccaatcaacaactagctgaatcagctcccggcctacccgggcttatctccaccggtgcaggttggtgaacaccaccgctgggagcacctcgccaggaacgtgcgtacctcccgtgtctccttcaacccgccatgaatttcttggtttcactcgctagctgatcgactgactgacacacgagacaactcggtctattgtccctgcaaagaatgagaagaaagaatcctcaaacactggcaagcgagaaactaggaaatctataaaaaggactggtgaggatccagttggagtgagggatctgcttgtcaggtcatgaggaacatgcttgcaaatgagggtgtccgttcattctacaagggtttgtccgctggtttgctaaggcaagcaacgcacatagactgctcatcttggatccttcagctatggaatgtttgccaccagagggtgtgatagatttgtgaatgtgtgggatgacattaacaagagaatactatatcagtactcaaaagtgcgcatcaagcattgttgcactgtcattcggtaaggatggccatctgcttgctgtggcatccaactacacttatgaagagtgagaaaaaacgcactttgtctgacaaatctctgtttacgcaatattaaccgctcatgattctcctcacacttgtcctctttgtcgtcttgagttttatttgctgtgacttagcaaaagtgaattccactgatgggactaacgatacctcaatatgttttgtcaataccttaaggagtctattgtcctatttttctttcaaggttcgttgtagacttaaggtacacattatgaatcgtgcgttgccttcttttgagttgttacacaacaaatggt

SEQ ID NO: 16514 - DNA, 1162 bp, Zea Mays
gcacaccctagccgtcgccaacctgcagctccatcccggtgcttgcccagacgggtcgccccgtaaggagagaacgtgaccaggcaggagacgacgcttcatgtatccatctccgcctcaatcgaccgtgccaattaacaggctcccaaggaggagatccaatcctgcgggcgggtgtcccgtcgcccatccatcgatccgaatctgcatgtgaccagtctcatcgggctcttctcttttttaggaatgactcatgggtttctcaccatcccttccacttggggatttcaatcgaatggtgaaatggagttaccaatcaacaactagctgaatcagctcccggcctacccgggcttatctccaccggtgcaggtaagcattgctgctggcactcgagcaagacgacgccgactatgacctttgtccccatgagtcaacaggttggtgaacaccaccgctgggagcacctcgccaggaaccctttcctcacgctcttcggtaattaagttcatccatgatccgatccacatcaagcgtggcaatcaatcatctagtagtgtttttctttggtgaggatccagttggagtgagggatctgcttgtcaggtcatgaggaacatgcttgcaaatgagggtgtccgttcattctacaagggtttgtccgctggtttgctaaggcaagcaacgcacatagactgctcatcttggatccttcagctatggaatgtttgccaccagagggtgtgatagatttgtgaatgtgtgggatgacattaacaagagaatactatatcagtactcaaaagtgcgcatcaagcattgttgcactgtcattcggtaaggatggccatctgcttgctgtggcatccaactacacttatgaagagtgagaaaaaacgcactttgtctgacaaatctctgtttacgcaatattaaccgctcatgattctcctcacacttgtcctctttgtcgtcttgagttttatttgctgtgacttagcaaaagtgaattccactgatgggactaacgatacctcaatatgttttgtcaataccttaaggagtctattgtcctatttttctttcaaggttcgttgtagacttaaggtacacattatgaatcgtgcgttgccttcttttgagttgttacacaacaaatggt

SEQ ID NO: 16515 - DNA, 1098 bp, Zea Mays
gcacaccctagccgtcgccaacctgcagctccatcccggtgcttgcccagacgggtcgccccgtaaggagagaacgtgaccaggcaggagacgacgcttcatgtatccatctccgcctcaatcgaccgtgccaattaacaggctcccaaggaggagatccaatcctgcgggcgggtgtcccgtcgcccatccatcgatccgaatctgcatgtgaccagtctcatcgggctcttctcttttttaggaatgactcatgggtttctcaccatcccttccacttggggatttcaatcgaatggtgaaatggagttaccaatcaacaactagctgaatcagctcccggcctacccgggcttatctccaccggtgcaggttggtgaacaccaccgctgggagcacctcgccaggaacgagacaactcggtctattgtccctgcaaagaatgagaagaaagaatcctcaaacactggcaagcgagaaactaggaaatctataaaaaggactggtgaggatccagttggagtgagggatctgcttgtcaggtcatgaggaacatgcttgcaaatgagggtgtccgttcattctacaagggtttgtccgctggtttgctaaggcaagcaacgcacatagactgctcatcttggatccttcagctatggaatgtttgccaccagagggtgtgatagatttgtgaatgtgtgggatgacattaacaagagaatactatatcagtactcaaaagtgcgcatcaagcattgttgcactgtcattcggtaaggatggccatctgcttgctgtggcatccaactacacttatgaagagtgagaaaaaacgcactttgtctgacaaatctctgtttacgcaatattaaccgctcatgattctcctcacacttgtcctctttgtcgtcttgagttttatttgctgtgacttagcaaaagtgaattccactgatgggactaacgatacctcaatatgttttgtcaataccttaaggagtctattgtcctatttttctttcaaggttcgttgtagacttaaggtacacattatgaatcgtgcgttgccttcttttgagttgttacacaacaaatggt

SEQ ID NO: 16516 - DNA, 1569 bp, Zea Mays
gcacaccctagccgtcgccaacctgcagctccatcccggtgcttgcccagacgggtcgccccgtaaggagagaacgtgaccaggcaggagacgacgcttcatgtatccatctccgcctcaatcgaccgtgccaattaacaggctcccaaggaggagatccaatcctgcgggcgggtgtcccgtcgcccatccatcgatccgaatctgcatgtgaccagtctcatcgggctcttctcttttttaggaatgactcatgggtttctcaccatcccttccacttggggatttcaatcgaatggtgaaatggagttaccaatcaacaactagctgaatcagctcccggcctacccgggcttatctccaccggtgcaggtaagcattgctgctggcactcgagcaagacgacgccgactatgacctttgtccccatgagtcaacaggttggtgaacaccaccgctgggagcacctcgccaggaaccctttcctcacgctcttcggagacaactcggtctattgtccctgcaaagaatgagaagaaagaatcctcaaacactggcaagcgagaaactaggaaatctataaaaaggactggtgatttaatctcttagccttgacacaacatatgcatagtgtgttacttggtgaaaacttatgcacaaaatttatgttgtcgctttcatgaaggaggcaggttacttggttttaccctttctgcatattatgcaaataattctcaaatgaacatttttcttaattttgtatcaacttttatattgtgttattctttcacgtgtgacctggctatacagagatttatgcctctgcttctctatgctatggagtatcaaatctgttgattttttgttctgataatatagaatgataatggttcatgttgtgaaatgggtagatgatatcattccagatgcaccttatgccataactgaacaatacttattattgttttggtttcaggtgaggatccagttggagtgagggatctgcttgtcaggtcatgaggaacatgcttgcaaatgagggtgtccgttcattctacaagggtttgtccgctggtttgctaaggcaagcaacgcacatagactgctcatcttggatccttcagctatggaatgtttgccaccagagggtgtgatagatttgtgaatgtgtgggatgacattaacaagagaatactatatcagtactcaaaagtgcgcatcaagcattgttgcactgtcattcggtaaggatggccatctgcttgctgtggcatccaactacacttatgaagagtgagaaaaaacgcactttgtctgacaaatctctgtttacgcaatattaaccgctcatgattctcctcacacttgtcctctttgtcgtcttgagttttatttgctgtgacttagcaaaagtgaattccactgatgggactaacgatacctcaatatgttttgtcaataccttaaggagtctattgtcctatttttctttcaaggttcgttgtagacttaaggtacacattatgaatcgtgcgttgccttcttttgagttgttacacaacaaatggt

SEQ ID NO: 16517 - DNA, 1384 bp, Zea Mays
cgccaatgcacaccctagccgtcgccaacctgcagctccatcccggtgcttgcccagacgggtcgccccgtaaggagagaacgtgaccaggcaggagacgacgcttcatgtatccatctccgcctcaatcgaccgtgccaattaacaggctcccaaggaggagatccaatcctgcgggaatgactcatgggtttctcaccatcccttccacttggggatttcaatcgaatggtgaaatggagttaccaatcaacaactagctgaatcagctcccggcctacccgggcttatctccaccggtgcaggttggtgaacaccaccgctgggagcacctcgccaggaaccctttcctcacgctcttcggtaattaagttcatccatgatccgatccacatcaagcgtggcaatcaatcatctagtagtgtttttctttggtcggttccatccataaattagttctaagtatctttttttctgattttttttctagaatcctaggccatcaagcgtggcagtaatgctttgttcttgcaaataattttttaaaatattttgattgtactttgtttgtgatgaacatgtagcttctgattctttgctaaaaactaccaaatgtgcaatctgttattattttatagccatgtgaatatggatttatcctattgtatatatcattttttgttgttataatttttaggagacaactcggtctattgtccctgcaaagaatgagaagaaagaatcctcaaacactggcaagcgagaaactaggaaatctataaaaaggactggtgaggatccagttggagtgagggatctgcttgtcaggtcatgaggaacatgcttgcaaatgagggtgtccgttcattctacaagggtttgtccgctggtttgctaaggcaagcaacgcacatagactgctcatcttggatccttcagctatggaatgtttgccaccagagggtgtgatagatttgtgaatgtgtgggatgacattaacaagagaatactatatcagtactcaaaagtgcgcatcaagcattgttgcactgtcattcggtaaggatggccatctgcttgctgtggcatccaactacacttatgaagagtgagaaaaaacgcactttgtctgacaaatctctgtttacgcaatattaaccgctcatgattctcctcacacttgtcctctttgtcgtcttgagttttatttgctgtgacttagcaaaagtgaattccactgatgggactaacgatacctcaatatgttttgtcaataccttaaggagtctattgtcctatttttctttcaaggttcgttgtagacttaaggtacacattatgaatcgtgcgttgccttcttttgagttgttacacaacaaatggt

SEQ ID NO: 16518 - DNA, 1264 bp, Zea Mays
acgccaatgcacaccctagccgtcgccaacctgcagctccatcccggtgcttgcccagacgggtcgccccgtaaggagagaacgtgaccaggcaggagacgacgcttcatgtatccatctccgcctcaatcgaccgtgccaattaacaggctcccaaggaggagatccaatcctgcgggcgggtgtcccgtcgcccatccatcgatccgaatctgcatgtgaccagtctcatcgggctcttctcttttttaggaatgactcatgggtttctcaccatcccttccacttggggatttcaatcgaatggtgaaatggagttaccaatcaacaactagctgaatcagctcccggcctacccgggcttatctccaccggtgcaggtaagcattgctgctggcactcgagcaagacgacgccgactatgacctttgtccccatgagtcaacaggttggtgaacaccaccgctgggagcacctcgccaggaaccctttcctcacgctcttcggtaattaagttcatccatgatccgatccacatcaagcgtggcaatcaatcatctagtagtgtttttctttggagacaactcggtctattgtccctgcaaagaatgagaagaaagaatcctcaaacactggcaagcgagaaactaggaaatctataaaaaggactggtgaggatccagttggagtgagggatctgcttgtcaggtcatgaggaacatgcttgcaaatgagggtgtccgttcattctacaagggtttgtccgctggtttgctaaggcaagcaacgcacatagactgctcatcttggatccttcagctatggaatgtttgccaccagagggtgtgatagatttgtgaatgtgtgggatgacattaacaagagaatactatatcagtactcaaaagtgcgcatcaagcattgttgcactgtcattcggtaaggatggccatctgcttgctgtggcatccaactacacttatgaagagtgagaaaaaacgcactttgtctgacaaatctctgtttacgcaatattaaccgctcatgattctcctcacacttgtcctctttgtcgtcttgagttttatttgctgtgacttagcaaaagtgaattccactgatgggactaacgatacctcaatatgttttgtcaataccttaaggagtctattgtcctatttttctttcaaggttcgttgtagacttaaggtacacattatgaatcgtgcgttgccttcttttgagttgttacacaacaaatggt

SEQ ID NO: 16519 - DNA, 1719 bp, Zea Mays
aaccgccctcgtctcctcacgccaatgcacaccctagccgtcgccaacctgcagctccatcccggtgcttgcccagacgggtcgccccgtaaggagagaacgtgaccaggcaggagacgacgcttcatgaatgactcatgggtttctcaccatcccttccacttggggatttcaatcgaatggtgaaatggagttaccaatcaacaactagctgaatcagctcccggcctacccgggcttatctccaccggtgcaggttggtgaacaccaccgctgggagcacctcgccaggaaccctttcctcacgctcttcggtaattaagttcatccatgatccgatccacatcaagcgtggcaatcaatcatctagtagtgtttttctttggtcggttccatccataaattagttctaagtatctttttttctgattttttttctagaatcctaggccatcaagcgtggcagtaatgctttgttcttgcaaataattttttaaaatattttgattgtactttgtttgtgatgaacatgtagcttctgattctttgctaaaaactaccaaatgtgcaatctgttattattttatagccatgtgaatatggatttatcctattgtatatatcattttttgttgttataatttttaggagacaactcggtctattgtccctgcaaagaatgagaagaaagaatcctcaaacactggcaagcgagaaactaggaaatctataaaaaggactggtgatttaatctcttagccttgacacaacatatgcatagtgtgttacttggtgaaaacttatgcacaaaatttatgttgtcgctttcatgaaggaggcaggttacttggttttaccctttctgcatattatgcaaataattctcaaatgaacatttttcttaattttgtatcaacttttatattgtgttattctttcacgtgtgacctggctatacagagatttatgcctctgcttctctatgctatggagtatcaaatctgttgattttttgttctgataatatagaatgataatggttcatgttgtgaaatgggtagatgatatcattccagatgcaccttatgccataactgaacaatacttattattgttttggtttcaggtgaggatccagttggagtgagggatctgcttgtcaggtcatgaggaacatgcttgcaaatgagggtgtccgttcattctacaagggtttgtccgctggtttgctaaggcaagcaacgcacatagactgctcatcttggatccttcagctatggaatgtttgccaccagagggtgtgatagatttgtgaatgtgtgggatgacattaacaagagaatactatatcagtactcaaaagtgcgcatcaagcattgttgcactgtcattcggtaaggatggccatctgcttgctgtggcatccaactacacttatgaagagtgagaaaaaacgcactttgtctgacaaatctctgtttacgcaatattaaccgctcatgattctcctcacacttgtcctctttgtcgtcttgagttttatttgctgtgacttagcaaaagtgaattccactgatgggactaacgatacctcaatatgttttgtcaataccttaaggagtctattgtcctatttttctttcaaggttcgttgtagacttaaggtacacattatgaatcgtgcgttgccttcttttgagttgttacacaacaaatggt

SEQ ID NO: 16520 - DNA, 1339 bp, Zea Mays
cgccaaccgccctcgtctcctcacgccaatgcacaccctagccgtcgccaacctgcagctccatcccggtgcttgcccagacgggtcgccccgtaaggagagaacgtgaccaggcaggagacgacgcttcatgaatgactcatgggtttctcaccatcccttccacttggggatttcaatcgaatggtgaaatggagttaccaatcaacaactagctgaatcagctcccggcctacccgggcttatctccaccggtgcaggttggtgaacaccaccgctgggagcacctcgccaggaaccctttcctcacgctcttcggtaattaagttcatccatgatccgatccacatcaagcgtggcaatcaatcatctagtagtgtttttctttggtcggttccatccataaattagttctaagtatctttttttctgattttttttctagaatcctaggccatcaagcgtggcagtaatgctttgttcttgcaaataattttttaaaatattttgattgtactttgtttgtgatgaacatgtagcttctgattctttgctaaaaactaccaaatgtgcaatctgttattattttatagccatgtgaatatggatttatcctattgtatatatcattttttgttgttataatttttaggagacaactcggtctattgtccctgcaaagaatgagaagaaagaatcctcaaacactggcaagcgagaaactaggaaatctataaaaaggactggtgaggatccagttggagtgagggatctgcttgtcaggtcatgaggaacatgcttgcaaatgagggtgtccgttcattctacaagggtttgtccgctggtttgctaaggcaagcaacgcacatagactgctcatcttggatccttcagctatggaatgtttgccaccagagggtgtgatagatttgtgaatgtgtgggatgacattaacaagagaatactatatcagtactcaaaagtgcgcatcaagcattgttgcactgtcattcggtaaggatggccatctgcttgctgtggcatccaactacacttatgaagagtgagaaaaaacgcactttgtctgacaaatctctgtttacgcaatattaaccgctcatgattctcctcacacttgtcctctttgtcgtcttgagttttatttgctgtgacttagcaaaagtgaattccactgatgggactaacgatacctcaatatgttttgtcaataccttaaggagtctattgtcctatttttctttcaaggttcgttgtagacttaaggtacacattatgaatcgtgcgttgccttcttttgagttgttacacaacaaatggt

SEQ ID NO: 16521 - DNA, 1147 bp, Zea Mays
cgccaaccgccctcgtctcctcacgccaatgcacaccctagccgtcgccaacctgcagctccatcccggtgcttgcccagacgggtcgccccgtaaggagagaacgtgaccaggcaggagacgacgcttcatgtatccatctccgcctcaatcgaccgtgccaattaacaggctcccaaggaggagatccaatcctgcgggcgggtgtcccgtcgcccatccatcgatccgaatctgcatgtgaccagtctcatcgggctcttctcttttttaggaatgactcatgggtttctcaccatcccttccacttggggatttcaatcgaatggtgaaatggagttaccaatcaacaactagctgaatcagctcccggcctacccgggcttatctccaccggtgcaggttggtgaacaccaccgctgggagcacctcgccaggaaccctttcctcacgctcttcggagacaactcggtctattgtccctgcaaagaatgagaagaaagaatcctcaaacactggcaagcgagaaactaggaaatctataaaaaggactggtgaggatccagttggagtgagggatctgcttgtcaggtcatgaggaacatgcttgcaaatgagggtgtccgttcattctacaagggtttgtccgctggtttgctaaggcaagcaacgcacatagactgctcatcttggatccttcagctatggaatgtttgccaccagagggtgtgatagatttgtgaatgtgtgggatgacattaacaagagaatactatatcagtactcaaaagtgcgcatcaagcattgttgcactgtcattcggtaaggatggccatctgcttgctgtggcatccaactacacttatgaagagtgagaaaaaacgcactttgtctgacaaatctctgtttacgcaatattaaccgctcatgattctcctcacacttgtcctctttgtcgtcttgagttttatttgctgtgacttagcaaaagtgaattccactgatgggactaacgatacctcaatatgttttgtcaataccttaaggagtctattgtcctatttttctttcaaggttcgttgtagacttaaggtacacattatgaatcgtgcgttgccttcttttgagttgttacacaacaaatggt

SEQ ID NO: 16522 - DNA, 499 bp, Zea Mays
caggagcccagcccaccgccgcaccgcgcgacccgccgagcaccgaagccgtctgccaccggtcgcccgccaggatctcacggccaccacgcgcgcccgcgctaggaccctggcgccctggcccttctacctacgcgcccctatctgccgctcgcggctcgcccgaccaccgtcgttggcccttcgccggtgcctcccggtactcgggcaccggccgcgcccacgccgccacgcgtgacgcacccacacgggactcgggcagcgacaccacccaggcggccaacttggagctgtggaaatcttcatcattgcgaatctgcgacctattagatgcattactttggctaatggctatggttggtgatgggacaataaatgtggtgcttctaggcggtcaggccccaggcgtttacctgaatatttttttgctaatgttttgccttgcccggttcataaattgaaggatgcgagcgtactgggcaacgttgtgaatgatccc

SEQ ID NO: 16523 - DNA, 755 bp, Zea Mays
cgtgacatttaatctcagtaaagtaggatcagtttgttaagctgtgataggcacactattttggtggaatgacttataaattcagagtttagtcatgagtgggctctgcagttgaggaataagccaaggaattgcaatttgaatagtgggaatgaaatggtaggcctaatccatttctagccaatccactgacctcttttgtttggactaagatgtctctagtattatcgacaggcatttggctcaatgcaatggtgtcttagagcttcttattttatgctttagtcttgcagtttttatttgcaagtaacaaatttttatgtatcataacaattgagtttacatctagttctgggttcctcttgtaaagcgatgatgctgtataattgacttgaagttttggctttcattgttttttgctggctttatgtctatgtctattggactatagatcttggacatgcatattaagctcaaccttaaatttcttatttattcaggttggtgatgggacaataaatgtggtgcttctaggcggtcaggccccaggcgtttacctgaatatttttttgctaatgttttgccttgcccggttcataaattgaaggtcagtaagtatgggctctaaagtttagttcaaactaaattcatggctactcagacaaacagacatatgtctaattacaaggattgaatatttgaattcccatttaattgatagttgaagtattgatgaatttatgattgaaatctgt

SEQ ID NO: 16524 - DNA, 1798 bp, Zea Mays
aaaattcctctccttcgaacagatccttttgcccccggacccctttcctacgcttgcccaaacccacaaaaccctcgccgtcgcgccgcgcgattgcctctccggccgccgcgagcccgcgacactagtaacggtctacaccactagaatgactgaagaattgaattccagcaaattcaagcttttgttttagccaagatttgagattcgatttgaagtgtggaagtccttacaatttgccaatcctatatttgatctctgctgtgctgcgttaaatccctaaacttcacagcgcggcgccggcccagccacgccggaagaagtcgccgcgtgaggtcagtgtccccgttgctgccgcctctaacccgaagcctaggccgctgccggtgcataacaaggagaatcaggcggaggggaaagtagcagaggagggggcagcaactgaggagggggagaagtaccgggcggaaccggaaatcttgccgctgccgccggccatggcgaagctgggcccggggcaggggctcgggtgcgaggcggcggaggggtcgctcgtgcccagccggaagcgggagtacaagccctgcggcaagcacactgaggggaagcgcccgctatatgctatcgggttcaacttcatggacgcgcgctactacgacgtcttcgccaccgtcggcggcaaccgcgtgacaacttaccgctgccttgagaatggtagtttcgctcttctacaagcttacgttgatgaggataaggatgagtcgttctatactctaagctgggctcgtgaccatgttgatggctcaccactgctggtggcagcaggaagcaatgggatcattcgggtcatcaattgtgctacagaaaagttagctaagagctttgttggccatggcgactcaataaatgagataagaactcaaccgttgaagccttcgctcatcatttctgcaagcaaggctatggaatgtccatacagggatctgtatcttgatatttgctggagctggaggtcatcgcaatgaagtattgagtgttgtcttgattgctgcagtacactctaactatgttgattgtacaagatggcttggtgacttcatcctatcaaagagtgttgacaatgaaattgtgctttgggaaccgaagacaaaagaacagagtcctggggagggaagcatcgatatccttcagaagtatcctgtcccagaatgtgacatttggtttatcaaattttcatgtgattttcacttcaatcagttggcgataggcaaccgtgaaggcaaaatctacgtgtgggaagtacagtccagccctcctgtcctcattgctcggctgtataatcagcagtgtaaatcgccgataagacaaactgcagtgtccttcgatggaagcacaatccttggagctggtgaagacggcaccatctggcggtgggatgaagtggaccatccgagctccagaaactgaagaagtgttgccgctcaatgctggactgatggttacgctcggttggggttgcgatggttgaatccgttggtggaaagtgccacctggtgttttttctagtcaaaatggttggtgttaacagaatattgaatgcttcgaatgttgaaagttgggatgaacagcaccttagtttgttgcaactttgggaaccgttgtcatctgtttgttctgcatttctaaaaagagagcaaatttcaggatacatgttcttttttttcagtacaagaaaactaaggttgaggtattgctttgcaatttactctctcttaaaaaaaactggatcttgcttcaa

SEQ ID NO: 16525 - DNA, 4616 bp, Zea Mays
gtcagccgccgtgcacgctcatcatatggcatagccccaagcccccaacggatcgagcgcctccccgagtccccgttcccctgccccagctgaccgccgccgagacgtgccacaccgcctccccctcccgccgccacaaccttcgcctccacgcaattggccgcactcctttccacctcccgctacaggatagcgtgggccggtcggcggcgccgacgggtggagaactggagatccacccgcacgcggactgcttccttcgctagtcgatgggaagtaagcgttgttaggtctcatgatttcttttgggagatccggagctgtggtgcctgtctgactcatcatctctgggacactgccaagtacgattaagagattcagaagaacttttgcaagaagggaggtcttgtactttggaactactcgatagccatatttttagaggttagcaaaaggagatcagaatgactaatgaaactagaaaacatcgttccaagtgggacacaaaagaaggatctgatgtagttgagatcagtgatgatgagtctcctgataagacaggtgttcaccgtaaaggtggcgatttacacacaaaacctgacacatccatgcaccacagaggcgctggacatgagaaggaacatgctgatgggtccaatgaagatatgaaggaaatgcaacataaggcaccctctgaaagatcacaacctcttagaatggttgatgagcgtgataataatgagtggagcaaggcaactggtaaccaaggcacaaacagatatgcagatgacagaagacgtggtgatggatggggtacagctcctagtcgtgattattcttctgctagggcgccttctgatccagatgcatggaggcagcgcagccgaagtccatctccaagaggggtttggaacaaatcacgcaggaacaggagtcgttccagaagcagaagcagaagcagaagcagaaacagaagtaggagcagaagcaggagtatagggcgaggcagaggcaggagcagaagtccatatattgctgaccgtggatctgagtggagggttgagagaggcagaacatctggaggacctgttcggccctgtagggattttgtggctggtaggtgcagaagaggctcaaattgcaggttccttcatgaagatggtgggcacaggccatttgatgatcactatcctgctgacccaagggaaaggtatggttatcagagcaaggagtttatggatacaagaggaccaaatgactatttgcggagtaggcaatctcgagatcgttatgatgataggccttgggagagatctgaacctcgaagggattaccggtatcctgaacaatgctttaattttgccaaagggaaatgcatgagaggtgctagttgcatatttgcgcatagtaattctgcttctcatggtagatggagagatgagactagggaaagtgcccatgatagatttggccctgattcatcctatgggaataggactgagcaccgtagggtaaacaaaaacccttgtaagttttttgctgaaggttgttgtcgccgtggtgaaaattgttcatatctccatgaggaagctccccatagtcagataggagtgagtgcacctgatgaggctttgaattacagtgatgggcatgcagcaagaggaaactattcaaactggggtgaacaaaataatgctgtgcatgcaacctctcagattttatccagggatgacagggaaagtcctatttctcagagtattggcagaaatgattctcgcaatgattatgaaaaccagcattcaaaagatgctggaaagagccagtaccaaattattcatcaggaagattttggttcaccagggcaaaagaaacatgaagatgctatttcacaacagccacagttattgactcctgtccagactactgctcttagcatgcataatgaaaaggtatctgaaatggacagtcagaatgctccttcaagcattggaggtttgagcatgcaatcaggggttcgtagtgctaacattatagcagagcaaagcctgggtcaaatacttcagagacatgatccaattcctcatattcctgggccacaaacgcttccgatcaccacacaaccacagaatgttacgtcttcattcccatcaaatagccacgtgcaacaaaataactttcctatacatcagaacaggcaagagcagtttgtagttccacacgcagctgcaaacatctcaactcccagcatgcagagccagccaattgcttctcacatggggcacatccaacgtggcggctatggtatagagccacaggcattgcccaatatctccacacataacgggcataatttcaatgttgccagtcaagttccaccaaacattccaacagctgtgcatgctgggcagactcaggtgacaattgacatgccaaggttgggtcaagacagtggtcctcaaagcatacacaacatggagatgcagccaatgtctccaaacgtgcaaagccaatccttgcaggggttaccccttgtgccggcttccagctcagctgatatggccggagttcctgttcctcacaacgctgtgaaaagcgaagaagttagccgagttactgcatccctggcacaatactttggaaatactgctttcggcgctggtacggttggattacaaccgtcgcagccgaatatgaatgcaagcctgatggccactccacctgtggtaccaccacctgtccaacccaatccgtggccctgggcgcagcaacagacagggatagtccaacccggtctccctgttccacctcagcagcagcagcagcaacaacaggctccccagaggcagcaacaacaacaggctccccagagcttccagacgctgatcgccgttggtggcagtaatggcaactctatgctcatacctaacgcaggcgcatcggttggtcccgccaccgtggcggcgaaggaaaccgcgcctccagagagcaagaaaggagagaagaaaaatgcagacgcagaaaagaaaaatggcgacgcggagaggagaaatgccgaagcagaggcacaggaagacggcgacaagggtaagaagggcaaggactccaagcagctgaagatgttcaaggttgcgctcgcggacttcgtgaaggaggcgctgaagccgacgtggaaagacgggcagatgagcagggaggtccacaagaccatcgtgaagaaggtcgtggacaaggtgacgagcaccgtggagaacacccctccgaccaaggagaagatcgacgtctacatgacctactccaaggagaaactgaacaagctcgtgcagaaagaactggacggtattctcaaggactacgttggacgtgagagccccctatacttcgcggagcgcctaacggagcactacaagcgcgccgatggcacaggcccgctcatctacctcaagagggaggaccttaaccacacgggtgcccacaagatcaacaatgccgtggcgcaggccttgcttgccaagcgacttgggaagcagcgcatcattgccgagacaggggctggtcagcacggcgtcgccaccgccaccgtgtgcgcccgtttcgggctgcagtgcatcatctacatgggcgcacaggatatggagaggcaggcgctcaatgttttccggatgaggcttcttggtgcagaggtcagggcggtacattctgggacagcaaccctgaaggatgcaacttcagaggctatccgtgactgggtcacaaatgtggagaccacacactatatcttgggctctgttgccggtccgcacccgtacccgatgatggtgagggagttccataaggttattggcaaggaaacccggaggcaggccatggacaagtggggtggcaagccggacgtattggttgcctgcgtcggcggcggatcaaacgccatgggcttattccatgagtttgttgaggatcaagatgtgaggctggttggagtggaggcagctggccatggcgtagacaccgacaagcatgcggcgactttgacaaagggccaagtcggagttctccatggatccatgagctatttgctgcaggatgatgacggacaagttatcgaaccccactccatcagtgctgggctcgattaccctggcgttggacccgagcacagtttcttgaaggacattggacgtgccgaatacgatagtgtgactgaccaggaggcactggatgctttcaagcgcgtgtctcggttggagggcatcatccctgccctggagacctcccacgcgctggcctaccttgagaagctctgcccgacactggcggacggcgtgagggtggtggtgaactgcagcgggcgaggagacaaggacgtgcacaccgccagcaagtacctggacgtctaaaacaccagcgaggaggctggtttccatgtcaagttttggagggttcagcagtaattaatttagcgctgttctttttggataaaagcacaaataacctggaagctggtattgttgttgtagccggtagtgcccccctgtttttttattttacaagtaatctgaatggctttggagtgcataatcaataatcaaataaatacaaagcttttggccttattaaac

SEQ ID NO: 16526 - DNA, 4108 bp, Zea Mays
gtcagccgccgtgcacgctcatcatatggcatagccccaagcccccaacggatcgagcgcctccccgagtccccgttcccctgccccagctgaccgccgccgagacgtgccacaccgcctccccctcccgccgccacaaccttcgcctccacgcaattggccgcactcctttccacctcccgctacaggatagcgtgggccggtcggcggcgccgacgggtggagaactggagatccacccgcacgcggactgcttccttcgctagtcggtaaggaaccctagcccccttggcttgcgtcgacggattcctcgtccgtgcaccccttcgcgggatcttctcttttcgtcactcccaagctatcgcccccagttttgatcctcaatttctataccaaagcagccgatgtttttgtggtccccacagtgtccgagatttgccagctagggtttacgcgcgttcccctcgtttgctaacggcggggatgcattactgttgggcgcgttttgctgctgctgatacgaatgggaagtaagcgttgttaggtctcatgatttcttttgggagatccggagctgtggtgcctgtctgactcatcatctctgggacactgccaagtacgattaagagattcagaagaacttttgcaagaagggaggtcttgtactttggaactactcgatagccatatttttagaggttagcaaaaggagatcagaatgactaatgaaactagaaaacatcgttccaagtgggacacaaaagaaggatctgatgtagttgagatcagtgatgatgagtctcctgataagacaggtgttcaccgtaaaggtggcgatttacacacaaaacctgacacatccatgcaccacagaggcgctggacatgagaaggaacatgctgatgggtccaatgaagatatgaaggaaatgcaacataaggcaccctctgaaagatcacaacctcttagaatggttgatgagcgtgataataatgagtggagcaaggcaactggtaaccaaggcacaaacagatatgcagatgacagaagacgtggtgatggatggggtacagctcctagtcgtgattattcttctgctagggcgccttctgatccagatgcatggaggcagcgcagccgaagtccatctccaagaggggtttggaacaaatcacgcaggaacaggagtcgttccagaagcagaagcagaagcagaagcagaaacagaagtaggagcagaagcaggagtatagggcgaggcagaggcaggagcagaagtccatatattgctgaccgtggatctgagtggagggttgagagaggcagaacatctggaggacctgttcggccctgtagggattttgtggctggtaggtgcagaagaggctcaaattgcaggttccttcatgaagatggtgggcacaggccatttgatgatcactatcctgctgacccaagggaaaggtatggttatcagagcaaggagtttatggatacaagaggaccaaatgactatttgcggagtaggcaatctcgagatcgttatgatgataggccttgggagagatctgaacctcgaagggattaccggtatcctgaacaatgctttaattttgccaaagggaaatgcatgagaggtgctagttgcatatttgcgcatagtaattctgcttctcatggtagatggagagatgagactagggaaagtgcccatgatagatttggccctgattcatcctatgggaataggactgagcaccgtagggtaaacaaaaacccttgtaagttttttgctgaaggttgttgtcgccgtggtgaaaattgttcatatctccatgaggaagctccccatagtcagataggagtgagtgcacctgatgaggctttgaattacagtgatgggcatgcagcaagaggaaactattcaaactggggtgaacaaaataatgctgtgcatgcaacctctcagattttatccagggatgacagggaaagtcctatttctcagagtattggcagaaatgattctcgcaatgattatgaaaaccagcattcaaaagatgctggaaagagccagtaccaaattattcatcaggaagattttggttcaccagggcaaaagaaacatgaagatgctatttcacaacagccacagttattgactcctgtccagactactgctcttagcatgcataatgaaaaggtatctgaaatggacagtcagaatgctccttcaagcattggaggtttgagcatgcaatcaggggttcgtagtgctaacattatagcagagcaaagcctgggtcaaatacttcagagacatgatccaattcctcatattcctgggccacaaacgcttccgatcaccacacaaccacagaatgttacgtcttcattcccatcaaatagccacgtgcaacaaaataactttcctatacatcagaacaggcaagagcagtttgtagttccacacgcagctgcaaacatctcaactcccagcatgcagagccagccaattgcttctcacatggggcacatccaacgtggcggctatggtatagagccacaggcattgcccaatatctccacacataacgggcataatttcaatgttgccagtcaagttccaccaaacattccaacagctgtgcatgctgggcagactcaggtgacaattgacatgccaaggttgggtcaagacagtggtcctcaaagcatacacaacatggagatgcagccaatgtctccaaacgtgcaaagccaatccttgcaggggttaccccttgtgccggcttccagctcagctgatatggccggagttcctgttcctcacaacgctgtgaaaagcgaagaagttagccgagttactgcatccctggcacaatactttggaaatactgctttcggcgctggtacggttggattacaaccgtcgcagccgaatatgaatgcaagcctgatggccactccacctgtggtaccaccacctgtccaacccaatccgtggccctgggcgcagcaacagacagggatagtccaacccggtctccctgttccacctcagcagcagcagcagcaacaacaggctccccagaggcagcaacaacaacaggctccccagagcttccagacgctgatcgccgttggtggcagtaatggcaactctatgctcatacctaacgcaggcgcatcggttggtcccgccaccgtggcggcgaaggaaaccgcgcctccagagagcaagaaaggagagaagaaaaatgcagacgcagaaaagaaaaatggcgacgcggagaggagaaatgccgaagcagaggcacaggaagacggcgacaagggtaagaagggcaaggactccaagcagctgaagatgttcaaggttgcgctcgcggacttcgtgaaggaggcgctgaagccgacgtggaaagacgggcagatgagcagggaggtccacaagaccatcgtgaagaaggtcgtggacaaggtgacgagcaccgtggagaacacccctccgaccaaggagaagatcgacgtctacatgacctactccaaggagaaactgaacaagctcgtgcaggcgtatgttggcaagtacgccaaggcgtagtagcgtttggccaagaacacactgacgcccattttgtgccccgaggtcggaaggatggaaagcaccgcgtgcatccgtgctcagaggtttaggatttgtgaaggcgcgcgaggttggggggggggggtgcctgggcttgtctgcagtttcagagagtttagcgtgtggtttgtgggcaaatggcgccgttccaacatctggctgtaacttttgtagaattgttttattctgggatttagaacatggtgtagcggaatcatgcatggcgtggatcattttttatggatagactatataggaggcatgcatggtgtggtgcccatcgacgtgctagtgttatagtattgttgatcggaggaccagaccagtcaaggaacgcacggtgtccctcttgatgagaagtgagttgcttgctcatcgttcctcatgcatggtgtgcagcagcgtgttttatcgtctatctatgagtagtaggtggaaagcatgtggaaccaaaccaag

SEQ ID NO: 16527 - DNA, 4461 bp, Zea Mays
gtcagccgccgtgcacgctcatcatatggcatagccccaagcccccaacggatcgagcgcctccccgagtccccgttcccctgccccagctgaccgccgccgagacgtgccacaccgcctccccctcccgccgccacaaccttcgcctccacgcaattggccgcactcctttccacctcccgctacaggatagcgtgggccggtcggcggcgccgacgggtggagaactggagatccacccgcacgcggactgcttccttcgctagtcggtaaggaaccctagcccccttggcttgcgtcgacggattcctcgtccgtgcaccccttcgcgggatcttctcttttcgtcactcccaagctatcgcccccagttttgatcctcaatttctataccaaagcagccgatgtttttgtggtccccacagtgtccgagatttgccagctagggtttacgcgcgttcccctcgtttgctaacggcggggatgcattactgttgggcgcgttttgctgctgctgatacgagtaattgcctttgctccgaacgctcgagtcgcgttaccctaggctgactttcgtcgttccgtgcggcccttgttgtaaatccactgtgctttcgtgctttggtgtgagcatgctattaaatctcgcacctttctgttgcttattatatgttaggcatctgtattaggccgttgcattgcattgcgagtcttgaggactcagtcccgtagactagactagtgattcacacacacatgatgtaatcttgtcttgtcagtgcctttcatggatacgtgcctgaatttcgtccctgatgggaagtaagcgttgttaggtctcatgatttcttttgggagatccggagctgtggtgcctgtctgactcatcatctctgggacactgccaagtacgattaagagaggctgcgtcgaatccaagacctttggctcagtgggaagacttctcaccactgcatcagagattcagaagaacttttgcaagaagggaggtcttgtactttggaactactcgatagccatatttttagaggttagcaaaaggagatcagaatgactaatgaaactagaaaacatcgttccaagtgggacacaaaagaaggatctgatgtagttgagatcagtgatgatgagtctcctgataagacaggtgttcaccgtaaaggtggcgatttacacacaaaacctgacacatccatgcaccacagaggcgctggacatgagaaggaacatgctgatgggtccaatgaagatatgaaggaaatgcaacataaggcaccctctgaaagatcacaacctcttagaatggttgatgagcgtgataataatgagtggagcaaggcaactggtaaccaaggcacaaacagatatgcagatgacagaagacgtggtgatggatggggtacagctcctagtcgtgattattcttctgctagggcgccttctgatccagatgcatggaggcagcgcagccgaagtccatctccaagaggggtttggaacaaatcacgcaggaacaggagtcgttccagaagcagaagcagaagcagaagcagaaacagaagtaggagcagaagcaggagtatagggcgaggcagaggcaggagcagaagtccatatattgctgaccgtggatctgagtggagggttgagagaggcagaacatctggaggacctgttcggccctgtagggattttgtggctggtaggtgcagaagaggctcaaattgcaggttccttcatgaagatggtgggcacaggccatttgatgatcactatcctgctgacccaagggaaaggtatggttatcagagcaaggagtttatggatacaagaggaccaaatgactatttgcggagtaggcaatctcgagatcgttatgatgataggccttgggagagatctgaacctcgaagggattaccggtatcctgaacaatgctttaattttgccaaagggaaatgcatgagaggtgctagttgcatatttgcgcatagtaattctgcttctcatggtagatggagagatgagactagggaaagtgcccatgatagatttggccctgattcatcctatgggaataggactgagcaccgtagggtaaacaaaaacccttgtaagttttttgctgaaggttgttgtcgccgtggtgaaaattgttcatatctccatgaggaagctccccatagtcagataggagtgagtgcacctgatgaggctttgaattacagtgatgggcatgcagcaagaggaaactattcaaactggggtgaacaaaataatgctgtgcatgcaacctctcagattttatccagggatgacagggaaagtcctatttctcagagtattggcagaaatgattctcgcaatgattatgaaaaccagcattcaaaagatgctggaaagagccagtaccaaattattcatcaggaagattttggttcaccagggcaaaagaaacatgaagatgctatttcacaacagccacagttattgactcctgtccagactactgctcttagcatgcataatgaaaaggtatctgaaatggacagtcagaatgctccttcaagcattggaggtttgagcatgcaatcaggggttcgtagtgctaacattatagcagagcaaagcctgggtcaaatacttcagagacatgatccaattcctcatattcctgggccacaaacgcttccgatcaccacacaaccacagaatgttacgtcttcattcccatcaaatagccacgtgcaacaaaataactttcctatacatcagaacaggcaagagcagtttgtagttccacacgcagctgcaaacatctcaactcccagcatgcagagccagccaattgcttctcacatggggcacatccaacgtggcggctatggtatagagccacaggcattgcccaatatctccacacataacgggcataatttcaatgttgccagtcaagttccaccaaacattccaacagctgtgcatgctgggcagactcaggtgacaattgacatgccaaggttgggtcaagacagtggtcctcaaagcatacacaacatggagatgcagccaatgtctccaaacgtgcaaagccaatccttgcaggggttaccccttgtgccggcttccagctcagctgatatggccggagttcctgttcctcacaacgctgtgaaaagcgaagaagttagccgagttactgcatccctggcacaatactttggaaatactgctttcggcgctggtacggttggattacaaccgtcgcagccgaatatgaatgcaagcctgatggccactccacctgtggtaccaccacctgtccaacccaatccgtggccctgggcgcagcaacagacagggatagtccaacccggtctccctgttccacctcagcagcagcagcagcaacaacaggctccccagaggcagcaacaacaacaggctccccagagcttccagacgctgatcgccgttggtggcagtaatggcaactctatgctcatacctaacgcaggcgcatcggttggtcccgccaccgtggcggcgaaggaaaccgcgcctccagagagcaagaaaggagagaagaaaaatgcagacgcagaaaagaaaaatggcgacgcggagaggagaaatgccgaagcagaggcacaggaagacggcgacaagggtaagaagggcaaggactccaagcagctgaagatgttcaaggttgcgctcgcggacttcgtgaaggaggcgctgaagccgacgtggaaagacgggcagatgagcagggaggtccacaagaccatcgtgaagaaggtcgtggacaaggtgacgagcaccgtggagaacacccctccgaccaaggagaagatcgacgtctacatgacctactccaaggagaaactgaacaagctcgtgcaggcgtatgttggcaagtacgccaaggcgtagtagcgtttggccaagaacacactgacgcccattttgtgccccgaggtcggaaggatggaaagcaccgcgtgcatccgtgctcagaggtttaggatttgtgaaggcgcgcgaggttggggggggggggtgcctgggcttgtctgcagtttcagagagtttagcgtgtggtttgtgggcaaatggcgccgttccaacatctggctgtaacttttgtagaattgttttattctgggatttagaacatggtgtagcggaatcatgcatggcgtggatcattttttatggatagactatataggaggcatgcatggtgtggtgcccatcgacgtgctagtgttatagtattgttgatcggaggaccagaccagtcaaggaacgcacggtgtccctcttgatgagaagtgagttgcttgctcatcgttcctcatgcatggtgtgcagcagcgtgttttatcgtctatctatgagtagtaggtggaaagcatgtggaaccaaaccaag

SEQ ID NO: 16528 - DNA, 3931 bp, Zea Mays
gtcagccgccgtgcacgctcatcatatggcatagccccaagcccccaacggatcgagcgcctccccgagtccccgttcccctgccccagctgaccgccgccgagacgtgccacaccgcctccccctcccgccgccacaaccttcgcctccacgcaattggccgcactcctttccacctcccgctacaggatagcgtgggccggtcggcggcgccgacgggtggagaactggagatccacccgcacgcggactgcttccttcgctagtcgatgggaagtaagcgttgttaggtctcatgatttcttttgggagatccggagctgtggtgcctgtctgactcatcatctctgggacactgccaagtacgattaagagaggctgcgtcgaatccaagacctttggctcagtgggaagacttctcaccactgcatcagtacttggctatttcagagattcagaagaacttttgcaagaagggaggtcttgtactttggaactactcgatagccatatttttagaggttagcaaaaggagatcagaatgactaatgaaactagaaaacatcgttccaagtgggacacaaaagaaggatctgatgtagttgagatcagtgatgatgagtctcctgataagacaggtgttcaccgtaaaggtggcgatttacacacaaaacctgacacatccatgcaccacagaggcgctggacatgagaaggaacatgctgatgggtccaatgaagatatgaaggaaatgcaacataaggcaccctctgaaagatcacaacctcttagaatggttgatgagcgtgataataatgagtggagcaaggcaactggtaaccaaggcacaaacagatatgcagatgacagaagacgtggtgatggatggggtacagctcctagtcgtgattattcttctgctagggcgccttctgatccagatgcatggaggcagcgcagccgaagtccatctccaagaggggtttggaacaaatcacgcaggaacaggagtcgttccagaagcagaagcagaagcagaagcagaaacagaagtaggagcagaagcaggagtatagggcgaggcagaggcaggagcagaagtccatatattgctgaccgtggatctgagtggagggttgagagaggcagaacatctggaggacctgttcggccctgtagggattttgtggctggtaggtgcagaagaggctcaaattgcaggttccttcatgaagatggtgggcacaggccatttgatgatcactatcctgctgacccaagggaaaggtatggttatcagagcaaggagtttatggatacaagaggaccaaatgactatttgcggagtaggcaatctcgagatcgttatgatgataggccttgggagagatctgaacctcgaagggattaccggtatcctgaacaatgctttaattttgccaaagggaaatgcatgagaggtgctagttgcatatttgcgcatagtaattctgcttctcatggtagatggagagatgagactagggaaagtgcccatgatagatttggccctgattcatcctatgggaataggactgagcaccgtagggtaaacaaaaacccttgtaagttttttgctgaaggttgttgtcgccgtggtgaaaattgttcatatctccatgaggaagctccccatagtcagataggagtgagtgcacctgatgaggctttgaattacagtgatgggcatgcagcaagaggaaactattcaaactggggtgaacaaaataatgctgtgcatgcaacctctcagattttatccagggatgacagggaaagtcctatttctcagagtattggcagaaatgattctcgcaatgattatgaaaaccagcattcaaaagatgctggaaagagccagtaccaaattattcatcaggaagattttggttcaccagggcaaaagaaacatgaagatgctatttcacaacagccacagttattgactcctgtccagactactgctcttagcatgcataatgaaaaggtatctgaaatggacagtcagaatgctccttcaagcattggaggtttgagcatgcaatcaggggttcgtagtgctaacattatagcagagcaaagcctgggtcaaatacttcagagacatgatccaattcctcatattcctgggccacaaacgcttccgatcaccacacaaccacagaatgttacgtcttcattcccatcaaatagccacgtgcaacaaaataactttcctatacatcagaacaggcaagagcagtttgtagttccacacgcagctgcaaacatctcaactcccagcatgcagagccagccaattgcttctcacatggggcacatccaacgtggcggctatggtatagagccacaggcattgcccaatatctccacacataacgggcataatttcaatgttgccagtcaagttccaccaaacattccaacagctgtgcatgctgggcagactcaggtgacaattgacatgccaaggttgggtcaagacagtggtcctcaaagcatacacaacatggagatgcagccaatgtctccaaacgtgcaaagccaatccttgcaggggttaccccttgtgccggcttccagctcagctgatatggccggagttcctgttcctcacaacgctgtgaaaagcgaagaagttagccgagttactgcatccctggcacaatactttggaaatactgctttcggcgctggtacggttggattacaaccgtcgcagccgaatatgaatgcaagcctgatggccactccacctgtggtaccaccacctgtccaacccaatccgtggccctgggcgcagcaacagacagggatagtccaacccggtctccctgttccacctcagcagcagcagcagcaacaacaggctccccagaggcagcaacaacaacaggctccccagagcttccagacgctgatcgccgttggtggcagtaatggcaactctatgctcatacctaacgcaggcgcatcggttggtcccgccaccgtggcggcgaaggaaaccgcgcctccagagagcaagaaaggagagaagaaaaatgcagacgcagaaaagaaaaatggcgacgcggagaggagaaatgccgaagcagaggcacaggaagacggcgacaagggtaagaagggcaaggactccaagcagctgaagatgttcaaggttgcgctcgcggacttcgtgaaggaggcgctgaagccgacgtggaaagacgggcagatgagcagggaggtccacaagaccatcgtgaagaaggtcgtggacaaggtgacgagcaccgtggagaacacccctccgaccaaggagaagatcgacgtctacatgacctactccaaggagaaactgaacaagctcgtgcaggcgtatgttggcaagtacgccaaggcgtagtagcgtttggccaagaacacactgacgcccattttgtgccccgaggtcggaaggatggaaagcaccgcgtgcatccgtgctcagaggtttaggatttgtgaaggcgcgcgaggttggggggggggggtgcctgggcttgtctgcagtttcagagagtttagcgtgtggtttgtgggcaaatggcgccgttccaacatctggctgtaacttttgtagaattgttttattctgggatttagaacatggtgtagcggaatcatgcatggcgtggatcattttttatggatagactatataggaggcatgcatggtgtggtgcccatcgacgtgctagtgttatagtattgttgatcggaggaccagaccagtcaaggaacgcacggtgtccctcttgatgagaagtgagttgcttgctcatcgttcctcatgcatggtgtgcagcagcgtgttttatcgtctatctatgagtagtaggtggaaagcatgtggaaccaaaccaag

SEQ ID NO: 16529 - DNA, 3907 bp, Zea Mays
gtcagccgccgtgcacgctcatcatatggcatagccccaagcccccaacggatcgagcgcctccccgagtccccgttcccctgccccagctgaccgccgccgagacgtgccacaccgcctccccctcccgccgccacaaccttcgcctccacgcaattggccgcactcctttccacctcccgctacaggatagcgtgggccggtcggcggcgccgacgggtggagaactggagatccacccgcacgcggactgcttccttcgctagtcgatgggaagtaagcgttgttaggtctcatgatttcttttgggagatccggagctgtggtgcctgtctgactcatcatctctgggacactgccaagtacgattaagagaggctgcgtcgaatccaagacctttggctcagtgggaagacttctcaccactgcatcagaagaacttttgcaagaagggaggtcttgtactttggaactactcgatagccatatttttagaggttagcaaaaggagatcagaatgactaatgaaactagaaaacatcgttccaagtgggacacaaaagaaggatctgatgtagttgagatcagtgatgatgagtctcctgataagacaggtgttcaccgtaaaggtggcgatttacacacaaaacctgacacatccatgcaccacagaggcgctggacatgagaaggaacatgctgatgggtccaatgaagatatgaaggaaatgcaacataaggcaccctctgaaagatcacaacctcttagaatggttgatgagcgtgataataatgagtggagcaaggcaactggtaaccaaggcacaaacagatatgcagatgacagaagacgtggtgatggatggggtacagctcctagtcgtgattattcttctgctagggcgccttctgatccagatgcatggaggcagcgcagccgaagtccatctccaagaggggtttggaacaaatcacgcaggaacaggagtcgttccagaagcagaagcagaagcagaagcagaaacagaagtaggagcagaagcaggagtatagggcgaggcagaggcaggagcagaagtccatatattgctgaccgtggatctgagtggagggttgagagaggcagaacatctggaggacctgttcggccctgtagggattttgtggctggtaggtgcagaagaggctcaaattgcaggttccttcatgaagatggtgggcacaggccatttgatgatcactatcctgctgacccaagggaaaggtatggttatcagagcaaggagtttatggatacaagaggaccaaatgactatttgcggagtaggcaatctcgagatcgttatgatgataggccttgggagagatctgaacctcgaagggattaccggtatcctgaacaatgctttaattttgccaaagggaaatgcatgagaggtgctagttgcatatttgcgcatagtaattctgcttctcatggtagatggagagatgagactagggaaagtgcccatgatagatttggccctgattcatcctatgggaataggactgagcaccgtagggtaaacaaaaacccttgtaagttttttgctgaaggttgttgtcgccgtggtgaaaattgttcatatctccatgaggaagctccccatagtcagataggagtgagtgcacctgatgaggctttgaattacagtgatgggcatgcagcaagaggaaactattcaaactggggtgaacaaaataatgctgtgcatgcaacctctcagattttatccagggatgacagggaaagtcctatttctcagagtattggcagaaatgattctcgcaatgattatgaaaaccagcattcaaaagatgctggaaagagccagtaccaaattattcatcaggaagattttggttcaccagggcaaaagaaacatgaagatgctatttcacaacagccacagttattgactcctgtccagactactgctcttagcatgcataatgaaaaggtatctgaaatggacagtcagaatgctccttcaagcattggaggtttgagcatgcaatcaggggttcgtagtgctaacattatagcagagcaaagcctgggtcaaatacttcagagacatgatccaattcctcatattcctgggccacaaacgcttccgatcaccacacaaccacagaatgttacgtcttcattcccatcaaatagccacgtgcaacaaaataactttcctatacatcagaacaggcaagagcagtttgtagttccacacgcagctgcaaacatctcaactcccagcatgcagagccagccaattgcttctcacatggggcacatccaacgtggcggctatggtatagagccacaggcattgcccaatatctccacacataacgggcataatttcaatgttgccagtcaagttccaccaaacattccaacagctgtgcatgctgggcagactcaggtgacaattgacatgccaaggttgggtcaagacagtggtcctcaaagcatacacaacatggagatgcagccaatgtctccaaacgtgcaaagccaatccttgcaggggttaccccttgtgccggcttccagctcagctgatatggccggagttcctgttcctcacaacgctgtgaaaagcgaagaagttagccgagttactgcatccctggcacaatactttggaaatactgctttcggcgctggtacggttggattacaaccgtcgcagccgaatatgaatgcaagcctgatggccactccacctgtggtaccaccacctgtccaacccaatccgtggccctgggcgcagcaacagacagggatagtccaacccggtctccctgttccacctcagcagcagcagcagcaacaacaggctccccagaggcagcaacaacaacaggctccccagagcttccagacgctgatcgccgttggtggcagtaatggcaactctatgctcatacctaacgcaggcgcatcggttggtcccgccaccgtggcggcgaaggaaaccgcgcctccagagagcaagaaaggagagaagaaaaatgcagacgcagaaaagaaaaatggcgacgcggagaggagaaatgccgaagcagaggcacaggaagacggcgacaagggtaagaagggcaaggactccaagcagctgaagatgttcaaggttgcgctcgcggacttcgtgaaggaggcgctgaagccgacgtggaaagacgggcagatgagcagggaggtccacaagaccatcgtgaagaaggtcgtggacaaggtgacgagcaccgtggagaacacccctccgaccaaggagaagatcgacgtctacatgacctactccaaggagaaactgaacaagctcgtgcaggcgtatgttggcaagtacgccaaggcgtagtagcgtttggccaagaacacactgacgcccattttgtgccccgaggtcggaaggatggaaagcaccgcgtgcatccgtgctcagaggtttaggatttgtgaaggcgcgcgaggttggggggggggggtgcctgggcttgtctgcagtttcagagagtttagcgtgtggtttgtgggcaaatggcgccgttccaacatctggctgtaacttttgtagaattgttttattctgggatttagaacatggtgtagcggaatcatgcatggcgtggatcattttttatggatagactatataggaggcatgcatggtgtggtgcccatcgacgtgctagtgttatagtattgttgatcggaggaccagaccagtcaaggaacgcacggtgtccctcttgatgagaagtgagttgcttgctcatcgttcctcatgcatggtgtgcagcagcgtgttttatcgtctatctatgagtagtaggtggaaagcatgtggaaccaaaccaag

SEQ ID NO: 16530 - DNA, 3590 bp, Zea Mays
gtcagccgccgtgcacgctcatcatatggcatagccccaagcccccaacggatcgagcgcctccccgagtccccgttcccctgccccagctgaccgccgccgagacgtgccacaccgcctccccctcccgccgccacaaccttcgcctccacgcaattggccgcactcctttccacctcccgctacaggatagcgtgggccggtcggcggcgccgacgggtggagaactggagatccacccgcacgcggactgcttccttcgctagtcgatgggaagtaagcgttgttaggtctcatgatttcttttgggagatccggagctgtggtgcctgtctgactcatcatctctgggacactgccaagtacgattaagagattcagaagaacttttgcaagaagggaggtcttgtactttggaactactcgatagccatatttttagaggttagcaaaaggagatcagaatgactaatgaaactagaaaacatcgttccaagtgggacacaaaagaaggatctgatgtagttgagatcagtgatgatgagtctcctgataagacaggtgttcaccgtaaaggtggcgatttacacacaaaacctgacacatccatgcaccacagaggcgctggacatgagaaggaacatgctgatgggtccaatgaagatatgaaggaaatgcaacataaggcaccctctgaaagatcacaacctcttagaatggttgatgagcgtgataataatgagtggagcaaggcaactggtaaccaaggcacaaacagatatgcagatgacagaagacgtggtgatggatggggtacagctcctagtcgtgattattcttctgctagggcgccttctgatccagatgcatggaggcagcgcagccgaagtccatctccaagaggggtttggaacaaatcacgcaggaacaggagtcgttccagaagcagaagcagaagcagaagcagaaacagaagtaggagcagaagcaggagtatagggcgaggcagaggcaggagcagaagtccatatattgctgaccgtggatctgagtggagggttgagagaggcagaacatctggaggacctgttcggccctgtagggattttgtggctggtaggtgcagaagaggctcaaattgcaggttccttcatgaagatggtggatggagagatgagactagggaaagtgcccatgatagatttggccctgattcatcctatgggaataggactgagcaccgtagggtaaacaaaaacccttgtaagttttttgctgaaggttgttgtcgccgtggtgaaaattgttcatatctccatgaggaagctccccatagtcagataggagtgagtgcacctgatgaggctttgaattacagtgatgggcatgcagcaagaggaaactattcaaactggggtgaacaaaataatgctgtgcatgcaacctctcagattttatccagggatgacagggaaagtcctatttctcagagtattggcagaaatgattctcgcaatgattatgaaaaccagcattcaaaagatgctggaaagagccagtaccaaattattcatcaggaagattttggttcaccagggcaaaagaaacatgaagatgctatttcacaacagccacagttattgactcctgtccagactactgctcttagcatgcataatgaaaaggtatctgaaatggacagtcagaatgctccttcaagcattggaggtttgagcatgcaatcaggggttcgtagtgctaacattatagcagagcaaagcctgggtcaaatacttcagagacatgatccaattcctcatattcctgggccacaaacgcttccgatcaccacacaaccacagaatgttacgtcttcattcccatcaaatagccacgtgcaacaaaataactttcctatacatcagaacaggcaagagcagtttgtagttccacacgcagctgcaaacatctcaactcccagcatgcagagccagccaattgcttctcacatggggcacatccaacgtggcggctatggtatagagccacaggcattgcccaatatctccacacataacgggcataatttcaatgttgccagtcaagttccaccaaacattccaacagctgtgcatgctgggcagactcaggtgacaattgacatgccaaggttgggtcaagacagtggtcctcaaagcatacacaacatggagatgcagccaatgtctccaaacgtgcaaagccaatccttgcaggggttaccccttgtgccggcttccagctcagctgatatggccggagttcctgttcctcacaacgctgtgaaaagcgaagaagttagccgagttactgcatccctggcacaatactttggaaatactgctttcggcgctggtacggttggattacaaccgtcgcagccgaatatgaatgcaagcctgatggccactccacctgtggtaccaccacctgtccaacccaatccgtggccctgggcgcagcaacagacagggatagtccaacccggtctccctgttccacctcagcagcagcagcagcaacaacaggctccccagaggcagcaacaacaacaggctccccagagcttccagacgctgatcgccgttggtggcagtaatggcaactctatgctcatacctaacgcaggcgcatcggttggtcccgccaccgtggcggcgaaggaaaccgcgcctccagagagcaagaaaggagagaagaaaaatgcagacgcagaaaagaaaaatggcgacgcggagaggagaaatgccgaagcagaggcacaggaagacggcgacaagggtaagaagggcaaggactccaagcagctgaagatgttcaaggttgcgctcgcggacttcgtgaaggaggcgctgaagccgacgtggaaagacgggcagatgagcagggaggtccacaagaccatcgtgaagaaggtcgtggacaaggtgacgagcaccgtggagaacacccctccgaccaaggagaagatcgacgtctacatgacctactccaaggagaaactgaacaagctcgtgcaggcgtatgttggcaagtacgccaaggcgtagtagcgtttggccaagaacacactgacgcccattttgtgccccgaggtcggaaggatggaaagcaccgcgtgcatccgtgctcagaggtttaggatttgtgaaggcgcgcgaggttggggggggggggtgcctgggcttgtctgcagtttcagagagtttagcgtgtggtttgtgggcaaatggcgccgttccaacatctggctgtaacttttgtagaattgttttattctgggatttagaacatggtgtagcggaatcatgcatggcgtggatcattttttatggatagactatataggaggcatgcatggtgtggtgcccatcgacgtgctagtgttatagtattgttgatcggaggaccagaccagtcaaggaacgcacggtgtccctcttgatgagaagtgagttgcttgctcatcgttcctcatgcatggtgtgcagcagcgtgttttatcgtctatctatgagtagtaggtggaaagcatgtggaaccaaaccaag

SEQ ID NO: 16531 - DNA, 3751 bp, Zea Mays
cgaaaagccccgtcagccgccgtgcacgctcatcatatggcatagccccaagcccccaacggatcgagcgcctccccgagtccccgttcccctgccccagctgaccgccgccgagacgtgccacaccgcctccccctcccgccgccacaaccttcgcctccacgcaattggccgcactcctttccacctcccgctacaggatagcgtgggccggtcggcggcgccgacgggtggagaactggagatccacccgcacgcggactgcttccttcgctagtcgatgggaagtaagcgttgttaggtctcatgatttcttttgggagatccggagctgtggtgcctgtctgactcatcatctctgggacactgccaagtacgattaagagaggctgcgtcgaatccaagacctttggctcagtgggaagacttctcaccactgcatcagagattcagaagaacttttgcaagaagggaggtcttgtactttggaactactcgatagccatatttttagagaggcgctggacatgagaaggaacatgctgatgggtccaatgaagatatgaaggaaatgcaacataaggcaccctctgaaagatcacaacctcttagaatggttgatgagcgtgataataatgagtggagcaaggcaactggtaaccaaggcacaaacagatatgcagatgacagaagacgtggtgatggatggggtacagctcctagtcgtgattattcttctgctagggcgccttctgatccagatgcatggaggcagcgcagccgaagtccatctccaagaggggtttggaacaaatcacgcaggaacaggagtcgttccagaagcagaagcagaagcagaagcagaaacagaagtaggagcagaagcaggagtatagggcgaggcagaggcaggagcagaagtccatatattgctgaccgtggatctgagtggagggttgagagaggcagaacatctggaggacctgttcggccctgtagggattttgtggctggtaggtgcagaagaggctcaaattgcaggttccttcatgaagatggtgggcacaggccatttgatgatcactatcctgctgacccaagggaaaggtatggttatcagagcaaggagtttatggatacaagaggaccaaatgactatttgcggagtaggcaatctcgagatcgttatgatgataggccttgggagagatctgaacctcgaagggattaccggtatcctgaacaatgctttaattttgccaaagggaaatgcatgagaggtgctagttgcatatttgcgcatagtaattctgcttctcatggtagatggagagatgagactagggaaagtgcccatgatagatttggccctgattcatcctatgggaataggactgagcaccgtagggtaaacaaaaacccttgtaagttttttgctgaaggttgttgtcgccgtggtgaaaattgttcatatctccatgaggaagctccccatagtcagataggagtgagtgcacctgatgaggctttgaattacagtgatgggcatgcagcaagaggaaactattcaaactggggtgaacaaaataatgctgtgcatgcaacctctcagattttatccagggatgacagggaaagtcctatttctcagagtattggcagaaatgattctcgcaatgattatgaaaaccagcattcaaaagatgctggaaagagccagtaccaaattattcatcaggaagattttggttcaccagggcaaaagaaacatgaagatgctatttcacaacagccacagttattgactcctgtccagactactgctcttagcatgcataatgaaaaggtatctgaaatggacagtcagaatgctccttcaagcattggaggtttgagcatgcaatcaggggttcgtagtgctaacattatagcagagcaaagcctgggtcaaatacttcagagacatgatccaattcctcatattcctgggccacaaacgcttccgatcaccacacaaccacagaatgttacgtcttcattcccatcaaatagccacgtgcaacaaaataactttcctatacatcagaacaggcaagagcagtttgtagttccacacgcagctgcaaacatctcaactcccagcatgcagagccagccaattgcttctcacatggggcacatccaacgtggcggctatggtatagagccacaggcattgcccaatatctccacacataacgggcataatttcaatgttgccagtcaagttccaccaaacattccaacagctgtgcatgctgggcagactcaggtgacaattgacatgccaaggttgggtcaagacagtggtcctcaaagcatacacaacatggagatgcagccaatgtctccaaacgtgcaaagccaatccttgcaggggttaccccttgtgccggcttccagctcagctgatatggccggagttcctgttcctcacaacgctgtgaaaagcgaagaagttagccgagttactgcatccctggcacaatactttggaaatactgctttcggcgctggtacggttggattacaaccgtcgcagccgaatatgaatgcaagcctgatggccactccacctgtggtaccaccacctgtccaacccaatccgtggccctgggcgcagcaacagacagggatagtccaacccggtctccctgttccacctcagcagcagcagcagcaacaacaggctccccagaggcagcaacaacaacaggctccccagagcttccagacgctgatcgccgttggtggcagtaatggcaactctatgctcatacctaacgcaggcgcatcggttggtcccgccaccgtggcggcgaaggaaaccgcgcctccagagagcaagaaaggagagaagaaaaatgcagacgcagaaaagaaaaatggcgacgcggagaggagaaatgccgaagcagaggcacaggaagacggcgacaagggtaagaagggcaaggactccaagcagctgaagatgttcaaggttgcgctcgcggacttcgtgaaggaggcgctgaagccgacgtggaaagacgggcagatgagcagggaggtccacaagaccatcgtgaagaaggtcgtggacaaggtgacgagcaccgtggagaacacccctccgaccaaggagaagatcgacgtctacatgacctactccaaggagaaactgaacaagctcgtgcaggcgtatgttggcaagtacgccaaggcgtagtagcgtttggccaagaacacactgacgcccattttgtgccccgaggtcggaaggatggaaagcaccgcgtgcatccgtgctcagaggtttaggatttgtgaaggcgcgcgaggttggggggggggggtgcctgggcttgtctgcagtttcagagagtttagcgtgtggtttgtgggcaaatggcgccgttccaacatctggctgtaacttttgtagaattgttttattctgggatttagaacatggtgtagcggaatcatgcatggcgtggatcattttttatggatagactatataggaggcatgcatggtgtggtgcccatcgacgtgctagtgttatagtattgttgatcggaggaccagaccagtcaaggaacgcacggtgtccctcttgatgagaagtgagttgcttgctcatcgttcctcatgcatggtgtgcagcagcgtgttttatcgtctatctatgagtagtaggtggaaagcatgtggaaccaaaccaag

SEQ ID NO: 16532 - DNA, 3865 bp, Zea Mays
cgaaaagccccgtcagccgccgtgcacgctcatcatatggcatagccccaagcccccaacggatcgagcgcctccccgagtccccgttcccctgccccagctgaccgccgccgagacgtgccacaccgcctccccctcccgccgccacaaccttcgcctccacgcaattggccgcactcctttccacctcccgctacaggatagcgtgggccggtcggcggcgccgacgggtggagaactggagatccacccgcacgcggactgcttccttcgctagtcgatgggaagtaagcgttgttaggtctcatgatttcttttgggagatccggagctgtggtgcctgtctgactcatcatctctgggacactgccaagtacgattaagagattcagaagaacttttgcaagaagggaggtcttgtactttggaactactcgatagccatatttttagaggttagcaaaaggagatcagaatgactaatgaaactagaaaacatcgttccaagtgggacacaaaagaaggatctgatgtagttgagatcagtgatgatgagtctcctgataagacaggtgttcaccgtaaaggtggcgatttacacacaaaacctgacacatccatgcaccacagaggcgctggacatgagaaggaacatgctgatgggtccaatgaagatatgaaggaaatgcaacataaggcaccctctgaaagatcacaacctcttagaatggttgatgagcgtgataataatgagtggagcaaggcaactggtaaccaaggcacaaacagatatgcagatgacagaagacgtggtgatggatggggtacagctcctagtcgtgattattcttctgctagggcgccttctgatccagatgcatggaggcagcgcagccgaagtccatctccaagaggggtttggaacaaatcacgcaggaacaggagtcgttccagaagcagaagcagaagcagaagcagaaacagaagtaggagcagaagcaggagtatagggcgaggcagaggcaggagcagaagtccatatattgctgaccgtggatctgagtggagggttgagagaggcagaacatctggaggacctgttcggccctgtagggattttgtggctggtaggtgcagaagaggctcaaattgcaggttccttcatgaagatggtgggcacaggccatttgatgatcactatcctgctgacccaagggaaaggtatggttatcagagcaaggagtttatggatacaagaggaccaaatgactatttgcggagtaggcaatctcgagatcgttatgatgataggccttgggagagatctgaacctcgaagggattaccggtatcctgaacaatgctttaattttgccaaagggaaatgcatgagaggtgctagttgcatatttgcgcatagtaattctgcttctcatggtagatggagagatgagactagggaaagtgcccatgatagatttggccctgattcatcctatgggaataggactgagcaccgtagggtaaacaaaaacccttgtaagttttttgctgaaggttgttgtcgccgtggtgaaaattgttcatatctccatgaggaagctccccatagtcagataggagtgagtgcacctgatgaggctttgaattacagtgatgggcatgcagcaagaggaaactattcaaactggggtgaacaaaataatgctgtgcatgcaacctctcagattttatccagggatgacagggaaagtcctatttctcagagtattggcagaaatgattctcgcaatgattatgaaaaccagcattcaaaagatgctggaaagagccagtaccaaattattcatcaggaagattttggttcaccagggcaaaagaaacatgaagatgctatttcacaacagccacagttattgactcctgtccagactactgctcttagcatgcataatgaaaaggtatctgaaatggacagtcagaatgctccttcaagcattggaggtttgagcatgcaatcaggggttcgtagtgctaacattatagcagagcaaagcctgggtcaaatacttcagagacatgatccaattcctcatattcctgggccacaaacgcttccgatcaccacacaaccacagaatgttacgtcttcattcccatcaaatagccacgtgcaacaaaataactttcctatacatcagaacaggcaagagcagtttgtagttccacacgcagctgcaaacatctcaactcccagcatgcagagccagccaattgcttctcacatggggcacatccaacgtggcggctatggtatagagccacaggcattgcccaatatctccacacataacgggcataatttcaatgttgccagtcaagttccaccaaacattccaacagctgtgcatgctgggcagactcaggtgacaattgacatgccaaggttgggtcaagacagtggtcctcaaagcatacacaacatggagatgcagccaatgtctccaaacgtgcaaagccaatccttgcaggggttaccccttgtgccggcttccagctcagctgatatggccggagttcctgttcctcacaacgctgtgaaaagcgaagaagttagccgagttactgcatccctggcacaatactttggaaatactgctttcggcgctggtacggttggattacaaccgtcgcagccgaatatgaatgcaagcctgatggccactccacctgtggtaccaccacctgtccaacccaatccgtggccctgggcgcagcaacagacagggatagtccaacccggtctccctgttccacctcagcagcagcagcagcaacaacaggctccccagaggcagcaacaacaacaggctccccagagcttccagacgctgatcgccgttggtggcagtaatggcaactctatgctcatacctaacgcaggcgcatcggttggtcccgccaccgtggcggcgaaggaaaccgcgcctccagagagcaagaaaggagagaagaaaaatgcagacgcagaaaagaaaaatggcgacgcggagaggagaaatgccgaagcagaggcacaggaagacggcgacaagggtaagaagggcaaggactccaagcagctgaagatgttcaaggttgcgctcgcggacttcgtgaaggaggcgctgaagccgacgtggaaagacgggcagatgagcagggaggtccacaagaccatcgtgaagaaggtcgtggacaaggtgacgagcaccgtggagaacacccctccgaccaaggagaagatcgacgtctacatgacctactccaaggagaaactgaacaagctcgtgcaggcgtatgttggcaagtacgccaaggcgtagtagcgtttggccaagaacacactgacgcccattttgtgccccgaggtcggaaggatggaaagcaccgcgtgcatccgtgctcagaggtttaggatttgtgaaggcgcgcgaggttggggggggggggtgcctgggcttgtctgcagtttcagagagtttagcgtgtggtttgtgggcaaatggcgccgttccaacatctggctgtaacttttgtagaattgttttattctgggatttagaacatggtgtagcggaatcatgcatggcgtggatcattttttatggatagactatataggaggcatgcatggtgtggtgcccatcgacgtgctagtgttatagtattgttgatcggaggaccagaccagtcaaggaacgcacggtgtccctcttgatgagaagtgagttgcttgctcatcgttcctcatgcatggtgtgcagcagcgtgttttatcgtctatctatgagtagtaggtggaaagcatgtggaaccaaaccaag

SEQ ID NO: 16533 - DNA, 1795 bp, Zea Mays
tccgctgtttcccctgaccagcagaccgctgccgagagcccgagacagtgcccgctggtgagttcgaaaccccagagctttaaagcttttccgattccgcaatgctcaccgttcggttccttctcgtaccgagccgcgggtagccagccaaccgccgacgcagtccacaagcgatgaagcgcttcttccagccagtgcccaaggacggctccccgtccaagaagcggctagcgggtgctgctgaaccgggcgacggccccacatcagccggtgccgccaccggcgctggcggggatgtagaggggaggcccaccgaggagccgttcaagttcctgacgtggaacgccaacagcctgctcctccggatgaagagcgactggcctgctttctcgcagctcgtcgcccgccttgaccccgacgtcatttgtgtccaggaagtgcggatgccggcagctggttccaaaggggcacctaaaaaccccagtgaactaaaagatgacacaagcttgtcacgggatgaaaagcagattcaaaatatgctgggacagctatgtttataaagaaaaagtttgagcctaagaaggtgtctttcaacttggatagaacatcttctaagcatgaagccgatgggcgtgttataattgcggaatttgaatcattccttttactgaacacttattctccaaacaatggatggaaggaggaggaaaatgcatttcaaagaagacgtaagtgggacaagaggatgctggaatttgttcaacacgtggataaacccttaatctggtgtggggacttgaatgtcagtcatgaagaaatcgacgtcagccatcctgatttctttagcagcgctaagctgaatggatacaccccacccaataaagaggactgtggacagccaggattcaccccagcagagagacggcgttttggcaacatattattccaaggaaagctggtagatgcttacaggcacctgcacaaagaaaaggacatagacggtggcttctcttggtccggtcatccaattggcaagtaccgaggaaagagaatgaggatcgactacttccttgtttcggaacagttaaaggacagaatagtttcatgtgaaatgcatggccgtggcattgaattggatggattttatggaagtgaccactgccctgtttcgcttgagctttccgaagctgtagcagaagaagcaccaggacagcccaagccatccatctaaatataccaccatggtggtcattgttgagacatttccggtccttcattaaacctgactgttccatgcattgcctactctaggtagctgaggtttgattgtaggtattattatgatcccagtaggttaccagttcctgtggtcagggctggtatagtttagggatcattgccatttaagcagtgcaatttggacatctcattctgcttgaaatgttgtttgtctaagagcagccatggactacctaatacctcatggggatcgaagagattaatcccttcgtatccaattttaactagcaagggatttaatccacccctaacaagcacaataaaatcttgttcgttttttctaccagaaccaatggaattaaatctcgatggggtcttaattcttttggcctatgatatgatatattaccagagcaatcgtgcccccggtgctagttttaactcgctgcccggatctcgacactgatgaggcaagtaaacggcacaaaaatccacatgcaagcaactgacaaaataagagacaggatactaaaaaaaaatccacatacaacaacaa

SEQ ID NO: 16534 - DNA, 3013 bp, Zea Mays
tccgctgtttcccctgaccagcagaccgctgccgagagcccgagacagtgcccgctggtgagttcgaaaccccagagctttaaagcttttccgattccgcaatgctcaccgttcggttccttctcgtaccgagccgcgggtagccagccaaccgccgacgcagtccacaagcgatgaagcgcttcttccagccagtgcccaaggacggctccccgtccaagaagcggctagcgggtgctgctgaaccgggcgacggccccacatcagccggtgccgccaccggcgctggcggggatgtagaggggaggcccaccgaggagccgttcaagttcctgacgtggaacgccaacagcctgctcctccggatgaagagcgactggcctgctttctcgcagctcgtcgcccgccttgaccccgacgtcatttgtgtccaggaagtgcggatgccggcagctggttccaaaggggcacctaaaaaccccagtgaactaaaagatgacacaagcttgtcacgggatgaaaagcaggtagttctacgtgctttgtcagcttcacctttcaaagactaccgtgtctggtggtctctttcagattcaaaatatgctgggacagctatgtttataaagaaaaagtttgagcctaagaaggtgtctttcaacttggatagaacatgaggaggaaaatgcatttcaaagaagacgtaagtgggacaagaggatgctggaatttgttcaacacgtggataaacccttaatctggtgtggggacttgaatgtcagtcatgaagaaatcgacgtcagccatcctgatttctttagcagcgctaagctgaatggatacaccccacccaataaagaggactgtggacagccaggattcaccccagcagagagacggcgttttggcaacatattattccagtaggtgaaactaatacatttttacaatggaacaccttttcttcttctatacatggctaattgtaactagttatacactggtggtgcatgtaacattagttgtcaattgttccaccaaaaaaatgaaaaaaatattataaatttgcgaggttctaccatgttcttatctaactggtcccataaaaatgaaagtttatgtctaatgtagttaccactgtctgtgcaccacctatcatggttcttaaggcggtaaggcgagataaggcgctggaccaccgcctagacgcctaggcgacgcctaaggcgagcaaggcgacgccttatcaacctgagaatcagcaaaacagccccatggaggaggaagaaaaagaaaaaagaaaaagaaaaaaaggagaaggaaggggtaggaggcccagcccaccagtcagcccatataatccttcctctggcaaccctaggttgcctctctcccccaccattcagctgcctctgcccctgattgagccgccgccgcctcagattcgccgtcgccgcctaagattcgccgccgccaccgacgatttggacgctgccgccaacgattcagcctccgccgccctggatttggcctccgccgctcccgattcggcactgccaacccgaaacagcgccacccctttccctttcccttcccctctgccctatgccctgttgctgcttcttacctaggcgacggggcgccttggatctttcgggcgcctggacgcctaggcgacgcctttaaaacaaggccacctataatgaatgtttaatttgataattccacaagatagattcggacatgataagttatgatgtccacgagtttttctgaagatatttgattagaagcattttacttatgattctattttaggaatttagcttctctttaggaaggtccaacttggggattgttgtaccttatgtttgagctaaaagcttaaaagttaaaaccatggaaaaactactactctcggctctctgaacttcaacgcctcacatggcatgtggttgaaaacatgttttcaagttgatgcaagtatttggcaaatatttttttgaagaaaaattatgagcgacacacaaatcaagacgccccttgttttgtttcaggatggcattactgtagtgttgtatttcatatttgttgctttgaagttttaatatcttatgagtgaacggcttggacatacagaggaaagctggtagatgcttacaggcacctgcacaaagaaaaggacatagacggtggcttctcttggtccggtcatccaattggcaatgagattaacttctctgcatatgcctctaggtaccgaggaaagagaatgaggatcgactacttccttgtttcggaacagttaaaggacagaatagtttcatgtgaaatgcatggccgtggcattgaattggatggattttatggaagtgaccactgccctgtttcgcttgagctttccgaagctgtagcagaagaagcaccaggacagcccaagccatccatctaaatataccaccatggtggtcattgttgagacatttccggtccttcattaaacctgactgttccatgcattgcctactctaggtagctgaggtttgattgtaggtattattatgatcccagtaggttaccagttcctgtggtcagggctggtatagtttagggatcattgccatttaagcagtgcaatttggacatctcattctgcttgaaatgttgtttgtctaagagcagccatggactacctaatacctcatggggatcgaagagattaatcccttcgtatccaattttaactagcaagggatttaatccacccctaacaagcacaataaaatcttgttcgttttttctaccagaaccaatggaattaaatctcgatggggtcttaattcttttggcctatgatatgatatattaccagagcaatcgtgcccccggtgctagttttaactcgctgcccggatctcgacactgatgaggcaagtaaacggcacaaaaatccacatgcaagcaactgacaaaataagagacaggatactaaaaaaaaatccacatacaacaacaa

SEQ ID NO: 16535 - DNA, 1633 bp, Zea Mays
tccgctgtttcccctgaccagcagaccgctgccgagagcccgagacagtgcccgctgccagtgcccaaggacggctccccgtccaagaagcggctagcgggtgctgctgaaccgggcgacggccccacatcagccggtgccgccaccggcgctggcggggatgtagaggggaggcccaccgaggagccgttcaagttcctgacgtggaacgccaacagcctgctcctccggatgaagagcgactggcctgctttctcgcagctcgtcgcccgccttgaccccgacgtcatttgtgtccaggaagtgcggatgccggcagctggttccaaaggggcacctaaaaaccccagtgaactaaaagatgacacaagcttgtcacgggatgaaaagcaggtagttctacgtgctttgtcagcttcacctttcaaagactaccgtgtctggtggtctctttcagattcaaaatatgctgggacagctatgtttataaagaaaaagtttgagcctaagaaggtgtctttcaacttggatagaacatgaggaggaaaatgcatttcaaagaagacgtaagtgggacaagaggatgctggaatttgttcaacacgtggataaacccttaatctggtgtggggacttgaatgtcagtcatgaagaaatcgacgtcagccatcctgatttctttagcagcgctaagctgaatggatacaccccacccaataaagaggactgtggacagccaggattcaccccagcagagagacggcgttttggcaacatattattccaaggaaagctggtagatgcttacaggcacctgcacaaagaaaaggacatagacggtggcttctcttggtccggtcatccaattggcaagtaccgaggaaagagaatgaggatcgactacttccttgtttcggaacagttaaaggacagaatagtttcatgtgaaatgcatggccgtggcattgaattggatggattttatggaagtgaccactgccctgtttcgcttgagctttccgaagctgtagcagaagaagcaccaggacagcccaagccatccatctaaatataccaccatggtggtcattgttgagacatttccggtccttcattaaacctgactgttccatgcattgcctactctaggtagctgaggtttgattgtaggtattattatgatcccagtaggttaccagttcctgtggtcagggctggtatagtttagggatcattgccatttaagcagtgcaatttggacatctcattctgcttgaaatgttgtttgtctaagagcagccatggactacctaatacctcatggggatcgaagagattaatcccttcgtatccaattttaactagcaagggatttaatccacccctaacaagcacaataaaatcttgttcgttttttctaccagaaccaatggaattaaatctcgatggggtcttaattcttttggcctatgatatgatatattaccagagcaatcgtgcccccggtgctagttttaactcgctgcccggatctcgacactgatgaggcaagtaaacggcacaaaaatccacatgcaagcaactgacaaaataagagacaggatactaaaaaaaaatccacatacaacaacaa

SEQ ID NO: 16536 - DNA, 1686 bp, Zea Mays
tccgctgtttcccctgaccagcagaccgctgccgagagcccgagacagtgcccgctgccagccaaccgccgacgcagtccacaagcgatgaagcgcttcttccagccagtgcccaaggacggctccccgtccaagaagcggctagcgggtgctgctgaaccgggcgacggccccacatcagccggtgccgccaccggcgctggcggggatgtagaggggaggcccaccgaggagccgttcaagttcctgacgtggaacgccaacagcctgctcctccggatgaagagcgactggcctgctttctcgcagctcgtcgcccgccttgaccccgacgtcatttgtgtccaggaagtgcggatgccggcagctggttccaaaggggcacctaaaaaccccagtgaactaaaagatgacacaagcttgtcacgggatgaaaagcaggtagttctacgtgctttgtcagcttcacctttcaaagactaccgtgtctggtggtctctttcagattcaaaatatgctgggacagctatgtttataaagaaaaagtttgagcctaagaaggtgtctttcaacttggatagaacatcttctaagcatgaagccgatgggcgtgttataattgcggaatttgaatcattccttttactgaacacttattctccaaacaatggatggaaggaggaggaaaatgcatttcaaagaagacgtaagtgggacaagaggatgctggaatttgttcaacacgtggataaacccttaatctggtgtggggacttgaatgtcagtcatgaagaaatcgacgtcagccatcctgatttctttagcagcgctaagctgaatggatacaccccacccaataaagaggactgtggacagccaggattcaccccagcagagagacggcgttttggcaacatattattccagtaccgaggaaagagaatgaggatcgactacttccttgtttcggaacagttaaaggacagaatagtttcatgtgaaatgcatggccgtggcattgaattggatggattttatggaagtgaccactgccctgtttcgcttgagctttccgaagctgtagcagaagaagcaccaggacagcccaagccatccatctaaatataccaccatggtggtcattgttgagacatttccggtccttcattaaacctgactgttccatgcattgcctactctaggtagctgaggtttgattgtaggtattattatgatcccagtaggttaccagttcctgtggtcagggctggtatagtttagggatcattgccatttaagcagtgcaatttggacatctcattctgcttgaaatgttgtttgtctaagagcagccatggactacctaatacctcatggggatcgaagagattaatcccttcgtatccaattttaactagcaagggatttaatccacccctaacaagcacaataaaatcttgttcgttttttctaccagaaccaatggaattaaatctcgatggggtcttaattcttttggcctatgatatgatatattaccagagcaatcgtgcccccggtgctagttttaactcgctgcccggatctcgacactgatgaggcaagtaaacggcacaaaaatccacatgcaagcaactgacaaaataagagacaggatactaaaaaaaaatccacatacaacaacaa

SEQ ID NO: 16537 - DNA, 1919 bp, Zea Mays
tccgctgtttcccctgaccagcagaccgctgccgagagcccgagacagtgcccgctggtgagttcgaaaccccagagctttaaagcttttccgattccgcaatgctcaccgttcggttccttctcgtaccgagccgcgggtagccagccaaccgccgacgcagtccacaagcgatgaagcgcttcttccagccagtgcccaaggacggctccccgtccaagaagcggctagcgggtgctgctgaaccgggcgacggccccacatcagccggtgccgccaccggcgctggcggggatgtagaggggaggcccaccgaggagccgttcaagttcctgacgtggaacgccaacagcctgctcctccggatgaagagcgactggcctgctttctcgcagctcgtcgcccgccttgaccccgacgtcatttgtgtccaggaagtgcggatgccggcagctggttccaaaggggcacctaaaaaccccagtgaactaaaagatgacacaagcttgtcacgggatgaaaagcaggtagttctacgtgctttgtcagcttcacctttcaaagactaccgtgtctggtggtctctttcagattcaaaatatgctgggacagctatgtttataaagaaaaagtttgagcctaagaaggtgtctttcaacttggatagaacatcttctaagcatgaagccgatgggcgtgttataattgcggaatttgaatcattccttttactgaacacttattctccaaacaatggatggaaggaggaggaaaatgcatttcaaagaagacgtaagtgggacaagaggatgctggaatttgttcaacacgtggataaacccttaatctggtgtggggacttgaatgtcagtatgatatttttcagagacatacttttcgtcatatgcttcactttatttgaacattccagtcatgaagaaatcgacgtcagccatcctgatttctttagcagcgctaagctgaatggatacaccccacccaataaagaggactgtggacagccaggattcaccccagcagagagacggcgttttggcaacatattattccaaggaaagctggtagatgcttacaggcacctgcacaaagaaaaggacatagacggtggcttctcttggtccggtcatccaattggcaagtaccgaggaaagagaatgaggatcgactacttccttgtttcggaacagttaaaggacagaatagtttcatgtgaaatgcatggccgtggcattgaattggatggattttatggaagtgaccactgccctgtttcgcttgagctttccgaagctgtagcagaagaagcaccaggacagcccaagccatccatctaaatataccaccatggtggtcattgttgagacatttccggtccttcattaaacctgactgttccatgcattgcctactctaggtagctgaggtttgattgtaggtattattatgatcccagtaggttaccagttcctgtggtcagggctggtatagtttagggatcattgccatttaagcagtgcaatttggacatctcattctgcttgaaatgttgtttgtctaagagcagccatggactacctaatacctcatggggatcgaagagattaatcccttcgtatccaattttaactagcaagggatttaatccacccctaacaagcacaataaaatcttgttcgttttttctaccagaaccaatggaattaaatctcgatggggtcttaattcttttggcctatgatatgatatattaccagagcaatcgtgcccccggtgctagttttaactcgctgcccggatctcgacactgatgaggcaagtaaacggcacaaaaatccacatgcaagcaactgacaaaataagagacaggatactaaaaaaaaatccacatacaacaacaa

SEQ ID NO: 16538 - DNA, 1769 bp, Zea Mays
tccgctgtttcccctgaccagcagaccgctgccgagagcccgagacagtgcccgctgccaaccgccgacgcagtccacaagcgatgaagcgcttcttccagccagtgcccaaggacggctccccgtccaagaagcggctagcgggtgctgctgaaccgggcgacggccccacatcagccggtgccgccaccggcgctggcggggatgtagaggggaggcccaccgaggagccgttcaagttcctgacgtggaacgccaacagcctgctcctccggatgaagagcgactggcctgctttctcgcagctcgtcgcccgccttgaccccgacgtcatttgtgtccaggaagtgcggatgccggcagctggttccaaaggggcacctaaaaaccccagtgaactaaaagatgacacaagcttgtcacgggatgaaaagcaggtagttctacgtgctttgtcagcttcacctttcaaagactaccgtgtctggtggtctctttcagattcaaaatatgctgggacagctatgtttataaagaaaaagtttgagcctaagaaggtgtctttcaacttggatagaacatcttctaagcatgaagccgatgggcgtgttataattgcggaatttgaatcattccttttactgaacacttattctccaaacaatggatggaaggaggaggaaaatgcatttcaaagaagacgtaagtgggacaagaggatgctggaatttgttcaacacgtggataaacccttaatctggtgtggggacttgaatgtcagtcatgaagaaatcgacgtcagccatcctgatttctttagcagcgctaagctgaatggatacaccccacccaataaagaggactgtggacagccaggattcaccccagcagagagacggcgttttggcaacatattattccaaggaaagctggtagatgcttacaggcacctgcacaaagaaaaggacatagacggtggcttctcttggtccggtcatccaattggcaagtaccgaggaaagagaatgaggatcgactacttccttgtttcggaacagttaaaggacagaatagtttcatgtgaaatgcatggccgtggcattgaattggatggattttatggaagtgaccactgccctgtttcgcttgagctttccgaagctgtagcagaagaagcaccaggacagcccaagccatccatctaaatataccaccatggtggtcattgttgagacatttccggtccttcattaaacctgactgttccatgcattgcctactctaggtagctgaggtttgattgtaggtattattatgatcccagtaggttaccagttcctgtggtcagggctggtatagtttagggatcattgccatttaagcagtgcaatttggacatctcattctgcttgaaatgttgtttgtctaagagcagccatggactacctaatacctcatggggatcgaagagattaatcccttcgtatccaattttaactagcaagggatttaatccacccctaacaagcacaataaaatcttgttcgttttttctaccagaaccaatggaattaaatctcgatggggtcttaattcttttggcctatgatatgatatattaccagagcaatcgtgcccccggtgctagttttaactcgctgcccggatctcgacactgatgaggcaagtaaacggcacaaaaatccacatgcaagcaactgacaaaataagagacaggatactaaaaaaaaatccacatacaacaacaa

SEQ ID NO: 16539 - DNA, 1061 bp, Zea Mays
tccgctgtttcccctgaccagcagaccgctgccgagagcccgagacagtgcccgctggtgagttcgaaaccccagagctttaaagcttttccgattccgcaatgctcaccgttcggttccttctcgtaccgagccgcgggtagccagccaaccgccgacgcagtccacaagcgatgaagcgcttcttccagccagtgcccaaggacggctccccgtccaagaagcggctagcgggtgctgctgaaccgggcgacggccccacatcagccggtgccgccaccggcgctggcggggatgtagaggggaggcccaccgaggagccgttcaagttcctgacgtggaacgccaacagcctgctcctccggatgaagagcgactggcctgctttctcgcagctcgtcgcccgccttgaccccgacgtcatttgtgtccaggaagtgcggatgccggcagctggttccaaaggggcacctaaaaaccccagtgaactaaaagatgacacaagcttgtcacgggatgaaaagcaggtagttctacgtgctttgtcagcttcacctttcaaagactaccgtgtctggtggtctctttcagattcaaaatatgctgggacagctatgtttataaagaaaaagtttgagcctaagaaggtgtctttcaacttggatagaacatcttctaagcatgaagccgatgggcgtgttataattgcggaatttgaatcattccttttactgaacacttattctccaaacaatggatggaaggaggaggaaaatgcatttcaaagaagacgtaagtgggacaagaggatgctggaatttgttcaacacgtggataaacccttaatctggtgtggggacttgaatgtcagtcatgaagaaatcgacgtcagccatcctgatttctttagcagcgctaagctgaatggatacaccccacccaataaagaggactgtggacagccaggattcaccccagcagagagacggcgttttggcaacatattattccagatggcattactgtagtgttgtatttcatatttgttgctttgaagtttt

SEQ ID NO: 16540 - DNA, 976 bp, Zea Mays
tccgctgtttcccctgaccagcagaccgctgccgagagcccgagacagtgcccgctggtgagttcgaaaccccagagctttaaagcttttccgattccgcaatgctcaccgttcggttccttctcgtaccgagccgcgggtagccagccaaccgccgacgcagtccacaagcgatgaagcgcttcttccagccagtgcccaaggacggctccccgtccaagaagcggctagcgggtgctgctgaaccgggcgacggccccacatcagccggtgccgccaccggcgctggcggggatgtagaggggaggcccaccgaggagccgttcaagttcctgacgtggaacgccaacagcctgctcctccggatgaagagcgactggcctgctttctcgcagctcgtcgcccgccttgaccccgacgtcatttgtgtccaggaagtgcggatgccggcagctggttccaaaggggcacctaaaaaccccagtgaactaaaagatgacacaagcttgtcacgggatgaaaagcaggtagttctacgtgctttgtcagcttcacctttcaaagactaccgtgtctggtggtctctttcagattcaaaatatgctgggacagctatgtttataaagaaaaagtttgagcctaagaaggtgtctttcaacttggatagaacatcttctaagcatgaagccgatgggcgtgttataattgcggaatttgaatcattccttttactgaacacttattctccaaacaatggatggaaggaggaggaaaatgcatttcaaagaagacgtaagtgggacaagaggatgctggaatttgttcaacacgtggataaacccttaatctggtgtggggacttgaatgtcagtcatgaagaaatcgacgtcagccatcctgatttctttagcagcgctaagctgaatggatacaccccacccaataaagagtgggcaaggttgtgcatgacaaatct

SEQ ID NO: 16541 - DNA, 2440 bp, Zea Mays
gatgacaggatcataagaacgagcagatagaaaaattatggtcgacaagattaggcacataaaataaaatcaactttgtggaaagctggtaatgtccctaccccccttcaaaataataatggttacatgggtatgacctaataccaatatagaagttagcaatagaatgaacaccaccattggtagtaggcatgtatccttgctcactacagtactattgcaacttttttgtgtgtgcgaaattcatctagtatttaactaagaagatctgaacaggtgtaactggaacagatcaaacttaataagggcaggttaaaatgttcaggtctacattaccataatcaaatcaagttagaatgtaattatctctgatgtcacagaggatagagaaccaaaaaaatccaaggttgctcaaaaaatgaaagaagacttagtgaagaaaaaaactggttaggcctaagtggggaaacaaattattaataaagccactaaatctactcaacttaaagcattaactctgttaggtgattgcttacttctgaaaagatgattttcaagacttccccgtgccatgaaattcatatacaagtaacctttgatcatcctcaatacaatatccaatcagcttaataaggtgtttatgatgcaactgtcccagaaagtcaacttctgcctggaaatgtgattatttttaaaaaccatacctccaacactccattcaaaaataaaaatgacatacaatacttaccacccattctctatgaccttgaagcgcatctggcttcaaacttttgactgccacagtaaccatctatttgccttgttattatctaacaatgacagcttcagaactaaaccatttcaacatagaagttatctagggaaaaatggtgcaacctcacagaaaaatgtgtagtctagctcaaagctgaaagcactgattctatcaaatttttatggaatccagtctagtgttgacaaatccactatcccttctctgaaaacaagctgaaacgaaaccaatcggtttcctaaaaaatgtcgcaaacccaactacccccaccacaaacaaaacagccaatcaaagccccgcatcgaagttgccctctcgttccaagacgcgtaacacacaccaaccagcacacgcggaacttcagcactgcaggacaggagaggcaaacctaggcagcgctggtagatggcaagaccggaccgaggaagtcgaggcagatgcaaacaacagcaaagtcatcaccgctacttccatcgcatgtggaaaccctagccccgcatgcgaggtcatgggtcagcggcgcgggcggaaacaacgactggggggcaaggggtagagaatctggaggcattgagaggctagggaaggcggggctcgtgggactggcgagggcgcagaggtgagaaaccgcgtcttcctcggctagagtttgcttgcgggcgaacgggggcggtaggcaaactctgtaatggtgaaaacatgataaagatggggctaagaaaataaaagaaaggaaaggaacatacctggtatcttcttaagagtagtagagatataccatgaagccgatagataccaggaacttcatataaatcatattcatccatcaatgtaagccaaatctaaataaatgcttctatcaataggagaacatgattttgcacactgaaaagataagaattctaatatattcagtgataaaaatgaatcatacctactgtccagaatttgtgaagaaaaacagcacagaaaaccaacaattttatttcaggatcaacaacaccattcacacactgggaaatgggctaaaacatgaagcaatttaaggtctttggcgtgaatgtgtgctatagtcaggatttgtttaattttcattttacctcgtcatgcttcctaagtcaatgtctatacttctttcattttagggagacaacttaagcagaaatgatagtggattgggttcacaaggatcctattgaaagctagaaaaatatatgggaaagcaaagaatgtgaatgggtacatcatattctcagtgaacaagatcaaacagaaagaccttgatatcaattttcagttgcgggagtcagggtgctttcatttttggtgcttagacaccatcacttaatcagaacataatcatcaaatggatatggcaaagattttcagaagttcggagcgcaaaaaattagttccaacaagcaacccaatatatataaatatactcaaatagaaaagttaggaacatacatactttttccaattggtcaagtatctctagaactgtccgatggtaagttctcccagcctcaaccttaaagctaaaataggaatgattagtaaacatgaaatacatgaacttagaggataagaaaatgtttaggtgccattgattattattgttgttgctcctgtaatagtaccaaa

SEQ ID NO: 16542 - DNA, 1971 bp, Zea Mays
aagaactgagaatgaggaatatctgataaggtgactagtgatttgaagaataaagagccagagactggagagttgatgacacttctgcaaataattcatctgctactgttgttgaacaacaagaaaatcattggttgctgcatgctttcaagaatattttgctgcgtgatctatctattctcctcatcaattgatagagaagagtcgctgagagagtgtactggagaaggctgaacagcatgaggctaagacttccaccgggacctccaacatggccaattttcggcaatcttctccagttgagccctcttccccacaaagactttgcccaattttgcaccaaatatggccctctcgtctatcttcgcctgggaaccatcgatgccatcaccactgatgaccccgaagtgatccgtgaaatactcatccggcaagatgaggtctttgcttcgcggcctcggacactggctgccgtccatctcgcctatgggtgtggtgatgtggctctagctccactgggacccaactggaaaaggatgaggagagtttgcatggagcacttgctgacgaccaggcggctcgagtctttcgctgctcaccgagctcaggaggccgagcacctctgccagtttgtgtgggctaaatctcagtccgggaagcccgtgaacctcagagaggttctcggtgccttctcgatgaacaacgtcacgcggatgctgctggggaagcagtactttgggatccagtcggcaggccccggcgaggcaatggagttcatgcacatcacccacgagctgttcttcctgctgggcctgatctatctcggggactacttgccggcttggaggtgggtcgacccgtacgggtgtgagaagaggatgagggaggtggagaagaaggtggacgacttccaccagaagatcattgatgagcacaggagagctagggaggccaggaagagtcgttcctccgttgaggaagatggcggcaacggcaaagatgagatggacttcgtcgatgtgctgttatctttgcctggtgagaacgggaaggagcacatggacgacatggagatcaaagcgttgatgcaggacatgatcgctgctgctactgatacttcatcggtgacgaacgagtgggtgatggcggaggtaatcaagaacccgcgcgtgctccggcgcgtccaggaggagctggacgcggtggtggggcgcgaccggatggtggcggagtcggacctggcccacctcccctacctccggtgcgtggtgcgcgagtcattccggatgcacccggcggggccgttccttatcccgcacgagtcgctgaaggcgacgaccatcatggggtaccacgtgccggcgcgcacgcgcgtgttcatcaacacgcacgcgctggggcggaacccgcgcgtgtgggactccgtgggcgagttccggccggagcggcacctgccggcggaggagggggcgcgggtggagatcagccacctgccggacttcaagatcctgccgttcagcgccgggaagcgcaagtgccccggcgcgccgctgggcgtggcgctggtgctcatggcgctcgccaggctcttccactgcttcgactggtccccgcccgacggcctccgccccgaggacgtggacacccgggaggtgtacggcatgaccatgcccaaggccacgcccctcgtcgccgtcgccactccgcgcctgccgccgcacttgtacggcggcggcggcggcagctcggctccttagttcgatgacactttgacgcacgtgcgctgcactgccagtctcattagtcattatacgcatgatgtacttccctccatatacaatacaccgcataaaccaaacgatgaatgaaatgtagtcgttctatggtttcaatatgagaagatataattgatggttaacatcatttccctccgtttagtgataagccatatactctaggtatgtagtagtg

SEQ ID NO: 16543 - DNA, 4211 bp, Zea Mays
cgctctagcctctggcaacggcgggtggcggcattgcggcaatggccgcgctgcggttatcaagagcaccggccacggccggcctggccgccgcgggcgttccgcaccgcctcgcgaccccagagcatccgctgccggtgcgggttctacccaacagggcccacctcaacgcgctgctcacgtcctacggccgccgcggccgcatccaggacgcccagcagctgttcgaccggatgccccgccgcgacgtcatctcctggacggccctcctcaccgcctacgccgaaggcggcgacttcgcctccgcgcgcctcgtcttcgacgacatgccccgccgcaacgccgtctcctggaacgcgctgctctccctctacctcggcgcggggcggcccgcggctgcgcacgcgctgttctgcaagacgcccgccaagaacgccgtgtcctacggcgtcatcataacgggcctcgccagggcgggcatgctgcgggaggctcaggcggtttatggggagatgccaccgcggttgagggaccccgtggggtccaacgcgatgattttagggtacctcagggccggggagattgacatggcgctgagggtgttcgatacaatggctgcaagggacgtcatttcttggagttctatggttgatgggctatgtaagtatgggactgtgtccgaggccaggaggctgtttgaggcaatgccggagcggaacgtggtgtcctggacctcgatggtccgaggatatgtgaaatgcgggatgtacagagaaggtctcttgctgttcctggacatgagaagggaaggtgttcaggttaatgcgattacactctctgttgtactagatggttgtgctcaggccagtcttgtcggcgaagggatccaggttcactgcttgatgacgagaatgggctttgtaactgatatatttttggatggttcactgataataatgtattctagatttggctggatggttgatgctagaagggtttttgctttcatgaagcagaaagacatagtatcttggaactcattgatcactggttatgttcagaataacatgattgaagatgctcatgtgctgttcaagttgatgccagagagggatgctatttcttggacgtcagtggtggttgggtttgctaatagaggttggatgagagagtctgttgaactctttgagcaaatgcctgtaaaagacgatattgcctggactgcagttatttctagctttattgcaaatggaaaccatgtgagtgtggtgcgttggttttgtcagatgtcacaggaaggatgcagacctaataccgctgcttttagttgtttgctgagtgctttggctagcctggctatgctgaatcagggattgcaagctcatgcttatgcagtcaacatgggatggatatttgactcagctgtccatgcttctttggtgacaatgtatgcaaaatgtggtaggttggctgaggctcatcgtgttttctcatgcattagaaatccaagccttgttgccattaattctatgatttcagcatttgcacaacatggcttggctgaagatgcactcaaactttttaacagaatgcaatatgatggccaaaggcctaatcatgtgacattcttgggaatactgactgcatgtgctcgagctggtttggttcaacaaggctataactactttgaatctatgagatcagtctatggcattcaaccaaaccctgaccactacacatgtatggttaatcttttaggccatgcaggcttccttgatgaagcattggaaatgattaattcgatgccccagaaagattatcctgatgcatgggcagctttgcttagctctagtagcctccattctaatcttgatttagcaaaactagcagcacagaggcttcttgagatagatccttatgacacaacagcttacagggtcctgacaaacatgttctcctcagcagggttgaagggagatgaagagatggtaaaagttgcacaattgtccaacatggctagtaagaggcctgggtatagcctcatcatacaggataagactacagaaaataactagcccaaaatgagcacttccatttacagataactggcatgtcataactcataagacagggatattgggttcacagaaaacaattctagcgccaagatgagatatcaatttgttgatgtatgctagtgcagagtcagttttagtacttaagaactgagaatgaggaatatctgataaggtgactagtgatttgaagaataaagagccaggtggtctggatcaaattttgagactggagagttgatgacacttctgcaaataattcatctgctactgttgttgaacaacaagaaaatcattggttgctgcatgctttcaagaatattttgctgcgtgatctatctattctcctcatcaattgatagagaagagtcgctgagagagtgtactggagaaggctgaacagcatgaggctaagacttccaccgggacctccaacatggccaattttcggcaatcttctccagttgagccctcttccccacaaagactttgcccaattttgcaccaaatatggccctctcgtctatcttcgcctgggaaccatcgatgccatcaccactgatgaccccgaagtgatccgtgaaatactcatccggcaagatgaggtctttgcttcgcggcctcggacactggctgccgtccatctcgcctatgggtgtggtgatgtggctctagctccactgggacccaactggaaaaggatgaggagagtttgcatggagcacttgctgacgaccaggcggctcgagtctttcgctgctcaccgagctcaggaggccgagcacctctgccagtttgtgtgggctaaatctcagtccgggaagcccgtgaacctcagagaggttctcggtgccttctcgatgaacaacgtcacgcggatgctgctggggaagcagtactttgggatccagtcggcaggccccggcgaggcaatggagttcatgcacatcacccacgagctgttcttcctgctgggcctgatctatctcggggactacttgccggcttggaggtgggtcgacccgtacgggtgtgagaagaggatgagggaggtggagaagaaggtggacgacttccaccagaagatcattgatgagcacaggagagctagggaggccaggaagagtcgttcctccgttgaggaagatggcggcaacggcaaagatgagatggacttcgtcgatgtgctgttatctttgcctggtgagaacgggaaggagcacatggacgacatggagatcaaagcgttgatgcaggacatgatcgctgctgctactgatacttcatcggtgacgaacgagtgggtgatggcggaggtaatcaagaacccgcgcgtgctccggcgcgtccaggaggagctggacgcggtggtggggcgcgaccggatggtggcggagtcggacctggcccacctcccctacctccggtgcgtggtgcgcgagtcattccggatgcacccggcggggccgttccttatcccgcacgagtcgctgaaggcgacgaccatcatggggtaccacgtgccggcgcgcacgcgcgtgttcatcaacacgcacgcgctggggcggaacccgcgcgtgtgggactccgtgggcgagttccggccggagcggcacctgccggcggaggagggggcgcgggtggagatcagccacctgccggacttcaagatcctgccgttcagcgccgggaagcgcaagtgccccggcgcgccgctgggcgtggcgctggtgctcatggcgctcgccaggctcttccactgcttcgactggtccccgcccgacggcctccgccccgaggacgtggacacccgggaggtgtacggcatgaccatgcccaaggccacgcccctcgtcgccgtcgccactccgcgcctgccgccgcacttgtacggcggcggcggcggcagctcggctccttagttcgatgacactttgacgcacgtgcgctgcactgccagtctcattagtcattatacgcatgatgtacttccctccatatacaatacaccgcataaaccaaacgatgaatgaaatgtagtcgttctatggtttcaatatgagaagatataattgatggttaacatcatttccctccgtttagtgataagccatatactctaggtatgtagtagtg

SEQ ID NO: 16544 - DNA, 1987 bp, Zea Mays
tataagcaggggcacgcttcgcaaagtggtactgatattctccaggactattgttagcatcccttgtggtccatctgcattagcagtgaagaaagtcgcatggggacttgcttgatatgttgttattgctcagacatggctgagaaggaggaaacaaagggccgctgccctgcctgccacacacgttatgacaaggatatgatcgtcaagatggccgccacttgtgacaggacagtggcagataaaaatgcggagaagaagcaaaaggcccaaagggttaagccaaaggcagcaccaacagcaacaacaacatcaaccgtagaatctaagaagcatcttgctactatcagggttatccagagaaatctggtgtacataattgggctacctgcgcatttatgcaatgagagcgtacttgagcgtagggagtactttggtcattatgggaaagttttgaaggttttagtttcccgtccgactgggcctccctctcagcaggcatcagcaaacagcagtattagtgtgtatgtctctctgaattatacggtgtacatgcatgatctgttcatacttcatatgaatttagatttatactttcagtactggtcaattagcctgatggaatatcaaataactatctactgattctatgcaattgcatgtttcaagtttctaatgctgccttgtaatactggaacattggtattataagaaagtaaattcaaacttcaatattgttatgtggttttctattgaacctggtgaaaatgtgataattatgtccatatccttgcaagcagttcagtcatttaagtttaatctaggctacttagcagtgtgattttcctgtagcctcttgatttgcatagccgcacagcccgtgcttgaaagtaacatttttatcctcattgctgacattaggatatgtattgtattattggtgtgaaattcaaagaatcagatagatgcaagatatctgtttgtgggataggatcagaacccaatcctgtgtgtgcagatatagataaaaatcatcttttaatgaaatgtctatttttttctcggtttgagtactttatattgttctcctgggatgtgttttttttctttatgggtgatttctcttggaaatcctaggatagtgtttcgatgtattctgaaactttgttgtgccagaaacatgcattgttttatcattaaccagaattgagttagggattatcattaaggcattaaccaaaatggagttaggatgtctttttttgtagtgtagaaaacgttgtgtatactgaaatgtgcatgcttgcaacatgtctaatatagattatatttgagtggtatctttgttgaagaacatgtgaaattagagttctggtggtcttctagaacacacactgctcctcatctttactttctctacataattcttcaatatgttggtatgttcccgtgactccttggtttagctatccttatacatgcatgttgttacataaatcaattagtttttccctgaaggacaggcctggtgcagtggtgagaggcctttccactgagccaaagggcctgggtttgacgcagcctctgcgcaaaaatgagatatacgtggagcgtcagaattatatgtgcatctacaagaacagttacaacaattctccatcaggttgatgttcatacatctcagatataaatgtgggggagacggtgcctcatcaatgatgagtaggttgattctcatctagcggcaccattgctcactacaactggtttgcttgagcaacttaatgtcactctcaagaggaccctcctttcgaccgacaccctgaagcaccacacaagctttagaaaagtcggaattgtacttcgtatacataaattacatgatattatatgttcatgtaattctatgttgattctttagaaataatatatatgatattgtaatgtgtgttcgacatcaatttattttatttgagttcgccgtgcg

SEQ ID NO: 16545 - DNA, 2046 bp, Zea Mays
ctgagtactataagcaggggcacgcttcgcaaagtggactattgttagcatcccttgtggtccatctgcattagcagtgaagaaagtcgcatggggacttgcttgatatgttgttattgctcagacatggctgagaaggaggaaacaaagggccgctgccctgcctgccacacacgttatgacaaggatatgatcgtcaagatggccgccacttgtgacaggacagtggcagataaaaatgcggagaagaagcaaaaggcccaaagggttaagccaaaggcagcaccaacagcaacaacaacatcaaccgtagaatctaagaagcatcttgctactatcagggttatccagagaaatctggtgtacataattgggctacctgcgcatttatgcaatgagagcgtacttgagcgtagggagtactttggtcattatgggaaagttttgaaggttttagtttcccgtccgactgggcctccctctcagcaggcatcagcaaacagcagtattagtgtgtatgtctctctgaattatacggtgtacatgcatgatctgttcatacttcatatgaatttagatttatactttcagtactggtcaattagcctgatggaatatcaaataactatctactgattctatgcaattgcatgtttcaagtttctaatgctgccttgtaatactggaacattggtattataagaaagtaaattcaaacttcaatattgttatgtggttttctattgaacctggtgaaaatgtgataattatgtccatatccttgcaagcagttcagtcatttaagtttaatctaggctacttagcagtgtgattttcctgtagcctcttgatttgcatagccgcacagcccgtgcttgaaagtaacatttttatcctcattgctgacattaggatatgtattgtattattggtgtgaaattcaaagaatcagatagatgcaagatatctgtttgtgggataggatcagaacccaatcctgtgtgtgcagatatagataaaaatcatcttttaatgaaatgtctatttttttctcggtttgagtactttatattgttctcctgggatgtgttttttttctttatgggtgatttctcttggaaatcctaggatagtgtttcgatgtattctgaaactttgttgtgccagaaacatgcattgttttatcattaaccagaattgagttagggattatcattaaggcattaaccaaaatggagttaggatgtctttttttgtagtgtagaaaacgttgtgtatactgaaatgtgcatgcttgcaacatgtctaatatagattatatttgagtggtatctttgttgaagaacatgtgaaattagagttctggtggtcttctagaacacacactgctcctcatctttactttctctacataattcttcaatatgttggtatgttcccgtgactccttggtttagctatccttatacatgcatgttgttacataaatcaattagtttttccctgaaggacaggcctggtgcagtggtgagaggcctttccactgagccaaagggcctgggtttgacgcagcctctgcgcaaaaatgtagggttaaggcttgccttggttattacttccccagacccgactcatgcgggagccgtcagcattgggagatatacgtggagcgtcagaattatatgtgcatctacaagaacagttacaacaattctccatcaggttgatgttcatacatctcagatataaatgtgggggagacggtgcctcatcaatgatgagtaggttgattctcatctagcggcaccattgctcactacaactggtttgcttgagcaacttaatgtcactctcaagaggaccctcctttcgaccgacaccctgaagcaccacacaagctttagaaaagtcggaattgtacttcgtatacataaattacatgatattatatgttcatgtaattctatgttgattctttagaaataatatatatgatattgtaatgtgtgttcgacatcaatttattttatttgagttcgccgtgcg

SEQ ID NO: 16546 - DNA, 1442 bp, Zea Mays
ctggtaggaaaaggataatctcatcaaagaggatggtcaagattaatttgagtagggtgacttcataatggacgacgaggaagaagtggaaggagaggaagaggaacaaaagagtgatgaccagaagcgaagaaacaaaactaaaaagaaaaggaagagaggagcaacggtaccaggacgcgtcaaggttgacaaagctatctgggaccacttttgtaattgccaactcttcactgattattttcctatatgttgctccagaataaatggatcatagtgcggtggtcatgggattgggatctgctccgtatttgcagggtgaagccttcgtgtctcctcgagggaaagtcactgacctttcttgggacgtggaccactgacggcccccgtcatcccccatgacggtgatcctagggtgaagccttcgtgtttcctcgagggaaatctaccagtgcgggattgatttagtcagcaccattggacacagggtttagttccattgcctggacccatcaatgaatcatggtgccaaggtcttgatggttcgacttcaaggtactgatattctccaggactattgttagcatcccttgtggtccatctgcattagcagtgaagaaagtcgcatggggacttgcttgatatgttgttattgctcagacatggctgagaaggaggaaacaaagggccgctgccctgcctgccacacacgttatgacaaggatatgatcgtcaagatggccgccacttgtgacaggacagtggcagataaaaatgcggagaagaagcaaaaggcccaaagggttaagccaaaggcagcaccaacagcaacaacaacatcaaccgtagaatctaagaagcatcttgctactatcagggttatccagagaaatctggtgtacataattgggctacctgcgcatttatgcaatgagagcgtacttgagcgtagggagtactttggtcattatgggaaagttttgaaggttttagtttcccgtccgactgggcctccctctcagcaggcatcagcaaacagcagtattagtgtgagatatacgtggagcgtcagaattatatgtgcatctacaagaacagttacaacaattctccatcaggttgatgttcatacatctcagatataaatgtgggggagacggtgcctcatcaatgatgagtaggttgattctcatctagcggcaccattgctcactacaactggtttgcttgagcaacttaatgtcactctcaagaggaccctcctttcgaccgacaccctgaagcaccacacaagctttagaaaagtcggaattgtacttcgtatacataaattacatgatattatatgttcatgtaattctatgttgattctttagaaataatatatatgatattgtaatgtgtgttcgacatcaatttattttatttgagttcgccgtgcg

SEQ ID NO: 16547 - DNA, 1670 bp, Zea Mays
atttatttggttttttttcagtctatgacatgtctgatagtcaaatgaagctaaatgattttatttcaagccttgttcttgagaggatggtcaagattaatttgagtagggtgacttcataatggacgacgaggaagaagtggaaggagaggaagaggaacaaaagagtgatgaccagaagcgaagaaacaaaactaaaaagaaaaggaagagtgctatagaggagcaacggtaccaggacgcgtcaaggttgacaaagctatctgggaccacttttgtaattgccaactcttcactgattattttcctatatgttgctccagaataaatggtaagtgttgatcggtaattcttgtgaacgtaggtaatactgaatctctgactgtttgtgacctatatcccctgaaaacctgaatctcagattgctttagcttagcgcctacatggcagtcctcttgtcgtgaacattttgatctgtgttccgtatatgcttgtaggatcatagtgcggtggtcatgggattgggatctgctccgtatttgcagggtgaagccttcgtgtctcctcgagggaaagtcactgacctttcttgggacgtggaccactgacggcccccgtcatcccccatgacggtgatcctagggtgaagccttcgtgtttcctcgagggaaatctaccagtgcgggattgatttagtcagcaccattggacacagggtttagttccattgcctggacccatcaatgaatcatggtgccaaggtcttgatggttcgacttcaaggtactgatattctccaggactattgttagcatcccttgtggtccatctgcattagcagtgaagaaagtcgcatggggacttgcttgatatgttgttattgctcagacatggctgagaaggaggaaacaaagggccgctgccctgcctgccacacacgttatgacaaggatatgatcgtcaagatggccgccacttgtgacaggacagtggcagataaaaatgcggagaagaagcaaaaggcccaaagggttaagccaaaggcagcaccaacagcaacaacaacatcaaccgtagaatctaagaagcatcttgctactatcagggttatccagagaaatctggtgtacataattgggctacctgcgcatttatgcaatgagagcgtacttgagcgtagggagtactttggtcattatgggaaagttttgaaggttttagtttcccgtccgactgggcctccctctcagcaggcatcagcaaacagcagtattagtgtgagatatacgtggagcgtcagaattatatgtgcatctacaagaacagttacaacaattctccatcaggttgatgttcatacatctcagatataaatgtgggggagacggtgcctcatcaatgatgagtaggttgattctcatctagcggcaccattgctcactacaactggtttgcttgagcaacttaatgtcactctcaagaggaccctcctttcgaccgacaccctgaagcaccacacaagctttagaaaagtcggaattgtacttcgtatacataaattacatgatattatatgttcatgtaattctatgttgattctttagaaataatatatatgatattgtaatgtgtgttcgacatcaatttattttatttgagttcgccgtgcg

SEQ ID NO: 16548 - DNA, 2998 bp, Zea Mays
atctatgtaattatgcagtgccttgtcattgatgaagccgatcgcatacttgagcaaaactttgaggcagactgttcttttttctgctacacagactctagatgttgaaaaaattgctaaactgtcatttgagaaaaatgaagtaaaaaaagcctgattatgttggagttgatgatgataagtcaaagcttttgcaaggcaggaaagggcatcttattgtgtactaatgtggctgcccgtggacttgatactcctgacgtgaaggaaggcagtgttcatgtctcatccagttcaaatgaagtgacaggaaccattccagagacgaatggaggcgatcatcatatacctggaagctcttttcatgtttagtgaaggtctatgacatgtctgatagtcaaatgaagctaaatgattttatttcaagccttgttcttgagaggatggtcaagattaatttgagtagggtgacttcataatggacgacgaggaagaagtggaaggagaggaagaggaacaaaagagtgatgaccagaagcgaagaaacaaaactaaaaagaaaaggaagagtgctatagaggagcaacggtaccaggacgcgtcaaggttgacaaagctatctgggaccacttttgtaattgccaactcttcactgattattttcctatatgttgctccagaataaatggatcatagtgcggtggtcatgggattgggatctgctccgtatttgcagggtgaagccttcgtgtctcctcgagggaaagtcactgacctttcttgggacgtggaccactgacggcccccgtcatcccccatgacggtgatcctagggtgaagccttcgtgtttcctcgagggaaatctaccagtgcgggattgatttagtcagcaccattggacacagggtttagttccattgcctggacccatcaatgaatcatggtgccaaggtcttgatggttcgacttcaaggtactgatattctccaggactattgttagcatcccttgtggtccatctgcattagcagtgaagaaagtcgcatggggacttgcttgatatgttgttattgctcagacatggctgagaaggaggaaacaaagggccgctgccctgcctgccacacacgttatgacaaggatatgatcgtcaagatggccgccacttgtgacaggacagtggcagataaaaatgcggagaagaagcaaaaggcccaaagggttaagccaaaggcagcaccaacagcaacaacaacatcaaccgtagaatctaagaagcatcttgctactatcagggttatccagagaaatctggtgtacataattgggctacctgcgcatttatgcaatgagagcgtacttgagcgtagggagtactttggtcattatgggaaagttttgaaggttttagtttcccgtccgactgggcctccctctcagcaggcatcagcaaacagcagtattagtgtgtatgtctctctgaattatacggtgtacatgcatgatctgttcatacttcatatgaatttagatttatactttcagtactggtcaattagcctgatggaatatcaaataactatctactgattctatgcaattgcatgtttcaagtttctaatgctgccttgtaatactggaacattggtattataagaaagtaaattcaaacttcaatattgttatgtggttttctattgaacctggtgaaaatgtgataattatgtccatatccttgcaagcagttcagtcatttaagtttaatctaggctacttagcagtgtgattttcctgtagcctcttgatttgcatagccgcacagcccgtgcttgaaagtaacatttttatcctcattgctgacattaggatatgtattgtattattggtgtgaaattcaaagaatcagatagatgcaagatatctgtttgtgggataggatcagaacccaatcctgtgtgtgcagatatagataaaaatcatcttttaatgaaatgtctatttttttctcggtttgagtactttatattgttctcctgggatgtgttttttttctttatgggtgatttctcttggaaatcctaggatagtgtttcgatgtattctgaaactttgttgtgccagaaacatgcattgttttatcattaaccagaattgagttagggattatcattaaggcattaaccaaaatggagttaggatgtctttttttgtagtgtagaaaacgttgtgtatactgaaatgtgcatgcttgcaacatgtctaatatagattatatttgagtggtatctttgttgaagaacatgtgaaattagagttctggtggtcttctagaacacacactgctcctcatctttactttctctacataattcttcaatatgttggtatgttcccgtgactccttggtttagctatccttatacatgcatgttgttacataaatcaattagtttttccctgaaggacaggcctggtgcagtggtgagaggcctttccactgagccaaagggcctgggtttgacgcagcctctgcgcaaaaatgtagggttaaggcttgccttggttattacttccccagacccgactcatgcgggagccgtcagcattgggagatatacgtggagcgtcagaattatatgtgcatctacaagaacagttacaacaattctccatcaggttgatgttcatacatctcagatataaatgtgggggagacggtgcctcatcaatgatgagtaggttgattctcatctagcggcaccattgctcactacaactggtttgcttgagcaacttaatgtcactctcaagaggaccctcctttcgaccgacaccctgaagcaccacacaagctttagaaaagtcggaattgtacttcgtatacataaattacatgatattatatgttcatgtaattctatgttgattctttagaaataatatatatgatattgtaatgtgtgttcgacatcaatttattttatttgagttcgccgtgcg

SEQ ID NO: 16549 - DNA, 2075 bp, Zea Mays
atctatgtaattatgcagtgccttgtcattgatgaagccgatcgcatacttgagcaaaactttgaggcagactgttcttttttctgctacacagactctagaggttgaaaaaattgctaaactgtcatttgagaaaaatgaagtaaaaaaagcctgattatgttggagttgatgatgataagtcaaaggctactgttgaaggcctgcagcagggttattgtgtcatttctagcgataaaaggttcttggttctgtatgctttcctaagaaagagaagataatggtgttcttctcatcatgtaattcagtaaagttccacgttgaacttctgaatttctttaggatagagtgttttgatatccatggaaaacagaagcaactgaagcgaactactacattctttagcttttgcaaggcaggaaagggcatcttattgtgtactaatgtggctgcccgtggacttgatactcctgacgtgaaggaaggcagtgttcatgtctcatccagttcaaatgaagtgacaggaaccattccagagacgaatggaggcgatcatcatatacctggaagctcttttcatgtttagtgaaggtctatgacatgtctgatagtcaaatgaagctaaatgattttatttcaagccttgttcttgagaggatggtcaagattaatttgagtagggtgacttcataatggacgacgaggaagaagtggaaggagaggaagaggaacaaaagagtgatgaccagaagcgaagaaacaaaactaaaaagaaaaggaagagtgctatagaggagcaacggtaccaggacgcgtcaaggttgacaaagctatctgggaccacttttgtaattgccaactcttcactgattattttcctatatgttgctccagaataaatggatcatagtgcggtggtcatgggattgggatctgctccgtatttgcagggtgaagccttcgtgtctcctcgagggaaagtcactgacctttcttgggacgtggaccactgacggcccccgtcatcccccatgacggtgatcctagggtgaagccttcgtgtttcctcgagggaaatctaccagtgcgggattgatttagtcagcaccattggacacagggtttagttccattgcctggacccatcaatgaatcatggtgccaaggtcttgatggttcgacttcaaggtactgatattctccaggactattgttagcatcccttgtggtccatctgcattagcagtgaagaaagtcgcatggggacttgcttgatatgttgttattgctcagacatggctgagaaggaggaaacaaagggccgctgccctgcctgccacacacgttatgacaaggatatgatcgtcaagatggccgccacttgtgacaggacagtggcagataaaaatgcggagaagaagcaaaaggcccaaagggttaagccaaaggcagcaccaacagcaacaacaacatcaaccgtagaatctaagaagcatcttgctactatcagggttatccagagaaatctggtgtacataattgggctacctgcgcatttatgcaatgagagcgtacttgagcgtagggagtactttggtcattatgggaaagttttgaaggttttagtttcccgtccgactgggcctccctctcagcaggcatcagcaaacagcagtattagtgtgagatatacgtggagcgtcagaattatatgtgcatctacaagaacagttacaacaattctccatcaggttgatgttcatacatctcagatataaatgtgggggagacggtgcctcatcaatgatgagtaggttgattctcatctagcggcaccattgctcactacaactggtttgcttgagcaacttaatgtcactctcaagaggaccctcctttcgaccgacaccctgaagcaccacacaagctttagaaaagtcggaattgtacttcgtatacataaattacatgatattatatgttcatgtaattctatgttgattctttagaaataatatatatgatattgtaatgtgtgttcgacatcaatttattttatttgagttcgccgtgcg

SEQ ID NO: 16550 - DNA, 3373 bp, Zea Mays
atctatgtaattatgcagtgccttgtcattgatgaagccgatcgcatacttgagcaaaactttgaggcagactgttcttttttctgctacacagactctagatgttgaaaaaattgctaaactgtcatttgagaaaaatgaagtaaaaaaagcctgattatgttggagttgatgatgataagtcaaaggctactgttgaaggcctgcagcagggttattgtgtcatttctagcgataaaaggttcttggttctgtatgctttcctaagaaagagaagataatggtgttcttctcatcatgtaattcagtaaagttccacgttgaacttctgaatttctttaggatagagtgttttgatatccatggaaaacagaagcaactgaagcgaactactacattctttagcttttgcaaggcaggaaagggcatcttattgtgtactaatgtggctgcccgtggacttgatactcctgacgtgaaggaaggcagtgttcatgtctcatccagttcaaatgaagtgacaggaaccattccagagacgaatggaggcgatcatcatatacctggaagctcttttcatgtttagtgaaggtctatgacatgtctgatagtcaaatgaagctaaatgattttatttcaagccttgttcttgagaggatggtcaagattaatttgagtagggtgacttcataatggacgacgaggaagaagtggaaggagaggaagaggaacaaaagagtgatgaccagaagcgaagaaacaaaactaaaaagaaaaggaagagaggagcaacggtaccaggacgcgtcaaggttgacaaagctatctgggaccacttttgtaattgccaactcttcactgattattttcctatatgttgctccagaataaatggtaagtgttgatcggtaattcttgtgaacgtaggtaatactgaatctctgactgtttgtgacctatatcccctgaaaacctgaatctcagattgctttagcttagcgcctacatggcagtcctcttgtcgtgaacattttgatctgtgttccgtatatgcttgtaggatcatagtgcggtggtcatgggattgggatctgctccgtatttgcagggtgaagccttcgtgtctcctcgagggaaagtcactgacctttcttgggacgtggaccactgacggcccccgtcatcccccatgacggtgatcctagggtgaagccttcgtgtttcctcgagggaaatctaccagtgcgggattgatttagtcagcaccattggacacagggtttagttccattgcctggacccatcaatgaatcatggtgccaaggtcttgatggttcgacttcaaggtactgatattctccaggactattgttagcatcccttgtggtccatctgcattagcagtgaagaaagtcgcatggggacttgcttgatatgttgttattgctcagacatggctgagaaggaggaaacaaagggccgctgccctgcctgccacacacgttatgacaaggatatgatcgtcaagatggccgccacttgtgacaggacagtggcagataaaaatgcggagaagaagcaaaaggcccaaagggttaagccaaaggcagcaccaacagcaacaacaacatcaaccgtagaatctaagaagcatcttgctactatcagggttatccagagaaatctggtgtacataattgggctacctgcgcatttatgcaatgagagcgtacttgagcgtagggagtactttggtcattatgggaaagttttgaaggttttagtttcccgtccgactgggcctccctctcagcaggcatcagcaaacagcagtattagtgtgtatgtctctctgaattatacggtgtacatgcatgatctgttcatacttcatatgaatttagatttatactttcagtactggtcaattagcctgatggaatatcaaataactatctactgattctatgcaattgcatgtttcaagtttctaatgctgccttgtaatactggaacattggtattataagaaagtaaattcaaacttcaatattgttatgtggttttctattgaacctggtgaaaatgtgataattatgtccatatccttgcaagcagttcagtcatttaagtttaatctaggctacttagcagtgtgattttcctgtagcctcttgatttgcatagccgcacagcccgtgcttgaaagtaacatttttatcctcattgctgacattaggatatgtattgtattattggtgtgaaattcaaagaatcagatagatgcaagatatctgtttgtgggataggatcagaacccaatcctgtgtgtgcagatatagataaaaatcatcttttaatgaaatgtctatttttttctcggtttgagtactttatattgttctcctgggatgtgttttttttctttatgggtgatttctcttggaaatcctaggatagtgtttcgatgtattctgaaactttgttgtgccagaaacatgcattgttttatcattaaccagaattgagttagggattatcattaaggcattaaccaaaatggagttaggatgtctttttttgtagtgtagaaaacgttgtgtatactgaaatgtgcatgcttgcaacatgtctaatatagattatatttgagtggtatctttgttgaagaacatgtgaaattagagttctggtggtcttctagaacacacactgctcctcatctttactttctctacataattcttcaatatgttggtatgttcccgtgactccttggtttagctatccttatacatgcatgttgttacataaatcaattagtttttccctgaaggacaggcctggtgcagtggtgagaggcctttccactgagccaaagggcctgggtttgacgcagcctctgcgcaaaaatgtagggttaaggcttgccttggttattacttccccagacccgactcatgcgggagccgtcagcattgggagatatacgtggagcgtcagaattatatgtgcatctacaagaacagttacaacaattctccatcaggttgatgttcatacatctcagatataaatgtgggggagacggtgcctcatcaatgatgagtaggttgattctcatctagcggcaccattgctcactacaactggtttgcttgagcaacttaatgtcactctcaagaggaccctcctttcgaccgacaccctgaagcaccacacaagctttagaaaagtcggaattgtacttcgtatacataaattacatgatattatatgttcatgtaattctatgttgattctttagaaataatatatatgatattgtaatgtgtgttcgacatcaatttattttatttgagttcgccgtgcg

SEQ ID NO: 16551 - DNA, 3240 bp, Zea Mays
ggtctccccgatgtggatgggggaagtgccttgtcattgatgaagccgatcgcatacttgagcaaaactttgaggcagactgttcttttttctgctacacagactctagatgttagtagatcttttatgctgcttgtagtcaacttttcattcatgatttatataatttgctcttcttatgcggtgatgcccacaggttgaaaaaattgctaaactgtcatttgagaaaaatgaagtaaaaaaagcctgattatgttggagttgatgatgataagtcaaaggctactgttgaaggcctgcagcagggttattgtgtcatttctagcgataaaaggttcttggttctgtatgctttcctaagaaagagaagataatggtgttcttctcatcatgtaattcagtaaagttccacgttgaacttctgaatttctttaggatagagtgttttgatatccatggaaaacagaagcaactgaagcgaactactacattctttagcttttgcaaggcaggaaagggcatcttattgtgtactaatgtggctgcccgtggacttgatactcctgacgtgaaggaaggcagtgttcatgtctcatccagttcaaatgaagtgacaggaaccattccagagacgaatggaggcgatcatcatatacctggaagctcttttcatgtttagtgaaggtctatgacatgtctgatagtcaaatgaagctaaatgattttatttcaagccttgttcttgagaggatggtcaagattaatttgagtagggtgacttcataatggacgacgaggaagaagtggaaggagaggaagaggaacaaaagagtgatgaccagaagcgaagaaacaaaactaaaaagaaaaggaagagtgctatagaggagcaacggtaccaggacgcgtcaaggttgacaaagctatctgggaccacttttgtaattgccaactcttcactgattattttcctatatgttgctccagaataaatggatcatagtgcggtggtcatgggattgggatctgctccgtatttgcagggtgaagccttcgtgtctcctcgagggaaagtcactgacctttcttgggacgtggaccactgacggcccccgtcatcccccatgacggtgatcctagggtgaagccttcgtgtttcctcgagggaaatctaccagtgcgggattgatttagtcagcaccattggacacagggtttagttccattgcctggacccatcaatgaatcatggtgccaaggtcttgatggttcgacttcaaggtactgatattctccaggactattgttagcatcccttgtggtccatctgcattagcagtgaagaaagtcgcatggggacttgcttgatatgttgttattgctcagacatggctgagaaggaggaaacaaagggccgctgccctgcctgccacacacgttatgacaaggatatgatcgtcaagatggccgccacttgtgacaggacagtggcagataaaaatgcggagaagaagcaaaaggcccaaagggttaagccaaaggcagcaccaacagcaacaacaacatcaaccgtagaatctaagaagcatcttgctactatcagggttatccagagaaatctggtgtacataattgggctacctgcgcatttatgcaatgagagcgtacttgagcgtagggagtactttggtcattatgggaaagttttgaaggttttagtttcccgtccgactgggcctccctctcagcaggcatcagcaaacagcagtattagtgtgtatgtctctctgaattatacggtgtacatgcatgatctgttcatacttcatatgaatttagatttatactttcagtactggtcaattagcctgatggaatatcaaataactatctactgattctatgcaattgcatgtttcaagtttctaatgctgccttgtaatactggaacattggtattataagaaagtaaattcaaacttcaatattgttatgtggttttctattgaacctggtgaaaatgtgataattatgtccatatccttgcaagcagttcagtcatttaagtttaatctaggctacttagcagtgtgattttcctgtagcctcttgatttgcatagccgcacagcccgtgcttgaaagtaacatttttatcctcattgctgacattaggatatgtattgtattattggtgtgaaattcaaagaatcagatagatgcaagatatctgtttgtgggataggatcagaacccaatcctgtgtgtgcagatatagataaaaatcatcttttaatgaaatgtctatttttttctcggtttgagtactttatattgttctcctgggatgtgttttttttctttatgggtgatttctcttggaaatcctaggatagtgtttcgatgtattctgaaactttgttgtgccagaaacatgcattgttttatcattaaccagaattgagttagggattatcattaaggcattaaccaaaatggagttaggatgtctttttttgtagtgtagaaaacgttgtgtatactgaaatgtgcatgcttgcaacatgtctaatatagattatatttgagtggtatctttgttgaagaacatgtgaaattagagttctggtggtcttctagaacacacactgctcctcatctttactttctctacataattcttcaatatgttggtatgttcccgtgactccttggtttagctatccttatacatgcatgttgttacataaatcaattagtttttccctgaaggacaggcctggtgcagtggtgagaggcctttccactgagccaaagggcctgggtttgacgcagcctctgcgcaaaaatgagatatacgtggagcgtcagaattatatgtgcatctacaagaacagttacaacaattctccatcaggttgatgttcatacatctcagatataaatgtgggggagacggtgcctcatcaatgatgagtaggttgattctcatctagcggcaccattgctcactacaactggtttgcttgagcaacttaatgtcactctcaagaggaccctcctttcgaccgacaccctgaagcaccacacaagctttagaaaagtcggaattgtacttcgtatacataaattacatgatattatatgttcatgtaattctatgttgattctttagaaataatatatatgatattgtaatgtgtgttcgacatcaatttattttatttgagttcgccgtgcg

SEQ ID NO: 16552 - DNA, 2025 bp, Zea Mays
ctttttgtttgggacgtcgccaaattccatcccatttctcagcgtcgtggtctccccgatgtggatgggggaagtgccttgtcattgatgaagccgatcgcatacttgagcaaaactttgaggcagactgttcttttttctgctacacagactctagatgttgaaaaaattgctaaactgtcatttgagaaaaatgaagtaaaaaaagcctgattatgttggagttgatgatgataagtcaaaggctactgttgaaggcctgcagcagggttattgtgtcatttctagcgataaaaggttcttggttctgtatgctttcctaagaaagagaagataatggtgttcttctcatcatcttttgcaaggcaggaaagggcatcttattgtgtactaatgtggctgcccgtggacttgatactcctgacgtgaaggaaggcagtgttcatgtctcatccagttcaaatgaagtgacaggaaccattccagagacgaatggaggcgatcatcatatacctggaagctcttttcatgtttagtgaaggtctatgacatgtctgatagtcaaatgaagctaaatgattttatttcaagccttgttcttgagaggatggtcaagattaatttgagtagggtgacttcataatggacgacgaggaagaagtggaaggagaggaagaggaacaaaagagtgatgaccagaagcgaagaaacaaaactaaaaagaaaaggaagagtgctatagaggagcaacggtaccaggacgcgtcaaggttgacaaagctatctgggaccacttttgtaattgccaactcttcactgattattttcctatatgttgctccagaataaatggatcatagtgcggtggtcatgggattgggatctgctccgtatttgcagggtgaagccttcgtgtctcctcgagggaaagtcactgacctttcttgggacgtggaccactgacggcccccgtcatcccccatgacggtgatcctagggtgaagccttcgtgtttcctcgagggaaatctaccagtgcgggattgatttagtcagcaccattggacacagggtttagttccattgcctggacccatcaatgaatcatggtgccaaggtcttgatggttcgacttcaaggtactgatattctccaggactattgttagcatcccttgtggtccatctgcattagcagtgaagaaagtcgcatggggacttgcttgatatgttgttattgctcagacatggctgagaaggaggaaacaaagggccgctgccctgcctgccacacacgttatgacaaggatatgatcgtcaagatggccgccacttgtgacaggacagtggcagataaaaatgcggagaagaagcaaaaggcccaaagggttaagccaaaggcagcaccaacagcaacaacaacatcaaccgtagaatctaagaagcatcttgctactatcagggttatccagagaaatctggtgtacataattgggctacctgcgcatttatgcaatgagagcgtacttgagcgtagggagtactttggtcattatgggaaagttttgaaggttttagtttcccgtccgactgggcctccctctcagcaggcatcagcaaacagcagtattagtgtgagatatacgtggagcgtcagaattatatgtgcatctacaagaacagttacaacaattctccatcaggttgatgttcatacatctcagatataaatgtgggggagacggtgcctcatcaatgatgagtaggttgattctcatctagcggcaccattgctcactacaactggtttgcttgagcaacttaatgtcactctcaagaggaccctcctttcgaccgacaccctgaagcaccacacaagctttagaaaagtcggaattgtacttcgtatacataaattacatgatattatatgttcatgtaattctatgttgattctttagaaataatatatatgatattgtaatgtgtgttcgacatcaatttattttatttgagttcgccgtgcg

SEQ ID NO: 16553 - DNA, 2526 bp, Zea Mays
ctgccgcgcacaaatccgccgcgccctcggtcccgcaaatccgccgtgccagctccgcccgctcgattcccctcctagcgcccgcattccccgccgccgtcctcgcggccgcagcgcccctggaccccacgccagcaacgcccgcagtccccgccgtggatctcgcccgaaggcgccgccatggacgccctagatctaccacctcctcctctccccatcactgcgccgcctgcccccgccgcacacctacagcgcgccccttcccccaccgtggatctcgcccatacgccagcggatctcgcactccttccttcgacggcgcggtggcgaggaggtcagcgacggcggcgtcgagtcgaggtcgggcacgaaggcgcggaggccgtgggagcggtcgtggcctacgcacgcacgacgccgctcccccagttcaaaccgaggtcagcgacgacgcacgcacgcaccaccccttcccccttcgtcttccattcccagctggaggtgcacgctgccgggcagagcgtcttgctggaggtgcgatagccatgtctggacctccgtcgccgccatagaagtgccttgtcattgatgaagccgatcgcatacttgagcaaaactttgaggcagactgttcttttttctgctacacagactctagatgttgaaaaaattgctaaactgtcatttgagaaaaatgaagtaaaaaaagcctgattatgttggagttgatgatgataagtcaaaggctactgttgaaggcctgcagcagggttattgtgtcatttctagcgataaaaggttcttggttctgtatgctttcctaagaaagagaagataatggtgttcttctcatcatcttttgcaaggcaggaaagggcatcttattgtgtactaatgtggctgcccgtggacttgatactcctgacgtgaaggaaggcagtgttcatgtctcatccagttcaaatgaagtgacaggaaccattccagagacgaatggaggcgatcatcatatacctggaagctcttttcatgtttagtgaaggtctatgacatgtctgatagtcaaatgaagctaaatgattttatttcaagccttgttcttgagaggatggtcaagattaatttgagtagggtgacttcataatggacgacgaggaagaagtggaaggagaggaagaggaacaaaagagtgatgaccagaagcgaagaaacaaaactaaaaagaaaaggaagagtgctatagaggagcaacggtaccaggacgcgtcaaggttgacaaagctatctgggaccacttttgtaattgccaactcttcactgattattttcctatatgttgctccagaataaatggatcatagtgcggtggtcatgggattgggatctgctccgtatttgcagggtgaagccttcgtgtctcctcgagggaaagtcactgacctttcttgggacgtggaccactgacggcccccgtcatcccccatgacggtgatcctagggtgaagccttcgtgtttcctcgagggaaatctaccagtgcgggattgatttagtcagcaccattggacacagggtttagttccattgcctggacccatcaatgaatcatggtgccaaggtcttgatggttcgacttcaaggtactgatattctccaggactattgttagcatcccttgtggtccatctgcattagcagtgaagaaagtcgcatggggacttgcttgatatgttgttattgctcagacatggctgagaaggaggaaacaaagggccgctgccctgcctgccacacacgttatgacaaggatatgatcgtcaagatggccgccacttgtgacaggacagtggcagataaaaatgcggagaagaagcaaaaggcccaaagggttaagccaaaggcagcaccaacagcaacaacaacatcaaccgtagaatctaagaagcatcttgctactatcagggttatccagagaaatctggtgtacataattgggctacctgcgcatttatgcaatgagagcgtacttgagcgtagggagtactttggtcattatgggaaagttttgaaggttttagtttcccgtccgactgggcctccctctcagcaggcatcagcaaacagcagtattagtgtgagatatacgtggagcgtcagaattatatgtgcatctacaagaacagttacaacaattctccatcaggttgatgttcatacatctcagatataaatgtgggggagacggtgcctcatcaatgatgagtaggttgattctcatctagcggcaccattgctcactacaactggtttgcttgagcaacttaatgtcactctcaagaggaccctcctttcgaccgacaccctgaagcaccacacaagctttagaaaagtcggaattgtacttcgtatacataaattacatgatattatatgttcatgtaattctatgttgattctttagaaataatatatatgatattgtaatgtgtgttcgacatcaatttattttatttgagttcgccgtgcg

SEQ ID NO: 16554 - DNA, 3007 bp, Zea Mays
ctgccgcgcacaaatccgccgcgccctcggtcccgcaaatccgccgtgccagctccgcccgctcgattcccctcctagcgcccgcattccccgccgccgtcctcgcggccgcagcgcccctggaccccacgccagcaacgcccgcagtccccgccgtggatctcgcccgaaggcgccgccatggacgccctagatctaccacctcctcctctccccatcactgcgccgcctgcccccgccgcacacctacagcgcgccccttcccccaccgtggatctcgcccatacgccagcggatctcgcactccttccttcgacggcgcggtggcgaggaggtcagcgacggcggcgtcgagtcgaggtcgggcacgaaggcgcggaggccgtgggagcggtcgtggcctacgcacgcacgacgccgctcccccagttcaaaccgaggtcagcgacgacgcacgcacgcaccaccccttcccccttcgtcttccattcccagctggaggtgcacgctgccgggcagagcgtcttgctggaggtgcgatagccatgtctggacctccgtcgccgccatagaaggttgaaaaaattgctaaactgtcatttgagaaaaatgaagtaaaaaaagcctgattatgttggagttgatgatgataagtcaaaggctactgttgaaggcctgcagcagggttattgtgtcatttctagcgataaaaggttcttggttctgtatgctttcctaagaaagagaagataatggtgttcttctcatcatgtaattcagtaaagttccacgttgaacttctgaatttctttaggatagagtgttttgatatccatggaaaacagaagcaactgaagcgaactactacattctttagcttttgcaaggcaggaaagggcatcttattgtgtactaatgtggctgcccgtggacttgatactcctgacgtgaaggaaggcagtgttcatgtctcatccagttcaaatgaagtgacaggaaccattccagagacgaatggaggcgatcatcatatacctggaagctcttttcatgtttagtgaaggtctatgacatgtctgatagtcaaatgaagctaaatgattttatttcaagccttgttcttgagaggatggtcaagattaatttgagtagggtgacttcataatggacgacgaggaagaagtggaaggagaggaagaggaacaaaagagtgatgaccagaagcgaagaaacaaaactaaaaagaaaaggaagaggtacctccctttgttcgtactaggaataaatgccaatgtactgtgtacacctatcctgaaatgaggatgactatatgttgctttaggataataacatcactgccatcactctcccaaagtcgctatgtttttctgtcatagtttgttgtcctgaccaaattttttaatttgttgtctatttctcttaggttgttctttcaataagctgtatctttctctcgtatgcaatgtaaatttcaggtatttgtgaaatatgagtgttgttttggtctcaaaataaatccacaaaagattttagcatctgtaagcactgttgcacattatccaattatatcagggtggtctagaactgttttgtgttgtttatttttagttgaggtgtgtatctttccccaccattgtatgttacaattttctaactacatctgttatgtttgggtgctcttgcattctcgcaaagtgctatagaggagcaacggtaccaggacgcgtcaaggttgacaaagctatctgggaccacttttgtaattgccaactcttcactgattattttcctatatgttgctccagaataaatggatcatagtgcggtggtcatgggattgggatctgctccgtatttgcagggtgaagccttcgtgtctcctcgagggaaagtcactgacctttcttgggacgtggaccactgacggcccccgtcatcccccatgacggtgatcctagggtgaagccttcgtgtttcctcgagggaaatctaccagtgcgggattgatttagtcagcaccattggacacagggtttagttccattgcctggacccatcaatgaatcatggtgccaaggtcttgatggttcgacttcaaggtactgatattctccaggactattgttagcatcccttgtggtccatctgcattagcagtgaagaaagtcgcatggggacttgcttgatatgttgttattgctcagacatggctgagaaggaggaaacaaagggccgctgccctgcctgccacacacgttatgacaaggatatgatcgtcaagatggccgccacttgtgacaggacagtggcagataaaaatgcggagaagaagcaaaaggcccaaagggttaagccaaaggcagcaccaacagcaacaacaacatcaaccgtagaatctaagaagcatcttgctactatcagggttatccagagaaatctggtgtacataattgggctacctgcgcatttatgcaatgagagcgtacttgagcgtagggagtactttggtcattatgggaaagttttgaaggttttagtttcccgtccgactgggcctccctctcagcaggcatcagcaaacagcagtattagtgtgagatatacgtggagcgtcagaattatatgtgcatctacaagaacagttacaacaattctccatcaggttgatgttcatacatctcagatataaatgtgggggagacggtgcctcatcaatgatgagtaggttgattctcatctagcggcaccattgctcactacaactggtttgcttgagcaacttaatgtcactctcaagaggaccctcctttcgaccgacaccctgaagcaccacacaagctttagaaaagtcggaattgtacttcgtatacataaattacatgatattatatgttcatgtaattctatgttgattctttagaaataatatatatgatattgtaatgtgtgttcgacatcaatttattttatttgagttcgccgtgcg

SEQ ID NO: 16555 - DNA, 4147 bp, Zea Mays
ctgccgcgcacaaatccgccgcgccctcggtcccgcaaatccgccgtgccagctccgcccgctcgattcccctcctagcgcccgcattccccgccgccgtcctcgcggccgcagcgcccctggaccccacgccagcaacgcccgcagtccccgccgtggatctcgcccgaaggcgccgccatggacgccctagatctaccacctcctcctctccccatcactgcgccgcctgcccccgccgcacacctacagcgcgccccttcccccaccgtggatctcgcccatacgccagcggatctcgcactccttccttcgacggcgcggtggcgaggaggtcagcgacggcggcgtcgagtcgaggtcgggcacgaaggcgcggaggccgtgggagcggtcgtggcctacgcacgcacgacgccgctcccccagttcaaaccgaggtcagcgacgacgcacgcacgcaccaccccttcccccttcgtcttccattcccagctggaggtgcacgctgccgggcagagcgtcttgctggaggtgcgatagccatgtctggacctccgtcgccgccatagaaggttgaaaaaattgctaaactgtcatttgagaaaaatgaagtaaaaaaagcctgattatgttggagttgatgatgataagtcaaaggctactgttgaaggcctgcagcagggttattgtgtcatttctagcgataaaaggttcttggttctgtatgctttcctaagaaagagaagataatggtgttcttctcatcatgtaattcagtaaagttccacgttgaacttctgaatttctttaggatagagtgttttgatatccatggaaaacagaagcaactgaagcgaactactacattctttagcttttgcaaggcaggaaagggcatcttattgtgtactaatgtggctgcccgtggacttgatactcctgacgtgaaggaaggcagtgttcatgtctcatccagttcaaatgaagtgacaggaaccattccagagacgaatggaggcgatcatcatatacctggaagctcttttcatgtttagtgaaggtctatgacatgtctgatagtcaaatgaagctaaatgattttatttcaagccttgttcttgagaggatggtcaagattaatttgagtagggtgacttcataatggacgacgaggaagaagtggaaggagaggaagaggaacaaaagagtgatgaccagaagcgaagaaacaaaactaaaaagaaaaggaagaggtacctccctttgttcgtactaggaataaatgccaatgtactgtgtacacctatcctgaaatgaggatgactatatgttgctttaggataataacatcactgccatcactctcccaaagtcgctatgtttttctgtcatagtttgttgtcctgaccaaattttttaatttgttgtctatttctcttaggttgttctttcaataagctgtatctttctctcgtatgcaatgtaaatttcaggtatttgtgaaatatgagtgttgttttggtctcaaaataaatccacaaaagattttagcatctgtaagcactgttgcacattatccaattatatcagggtggtctagaactgttttgtgttgtttatttttagttgaggtgtgtatctttccccaccattgtatgttacaattttctaactacatctgttatgtttgggtgctcttgcattctcgcaaagtgctatagaggagcaacggtaccaggacgcgtcaaggttgacaaagctatctgggaccacttttgtaattgccaactcttcactgattattttcctatatgttgctccagaataaatggatcatagtgcggtggtcatgggattgggatctgctccgtatttgcagggtgaagccttcgtgtctcctcgagggaaagtcactgacctttcttgggacgtggaccactgacggcccccgtcatcccccatgacggtgatcctagggtgaagccttcgtgtttcctcgagggaaatctaccagtgcgggattgatttagtcagcaccattggacacagggtttagttccattgcctggacccatcaatgaatcatggtgccaaggtcttgatggttcgacttcaaggtactgatattctccaggactattgttagcatcccttgtggtccatctgcattagcagtgaagaaagtcgcatggggacttgcttgatatgttgttattgctcagacatggctgagaaggaggaaacaaagggccgctgccctgcctgccacacacgttatgacaaggatatgatcgtcaagatggccgccacttgtgacaggacagtggcagataaaaatgcggagaagaagcaaaaggcccaaagggttaagccaaaggcagcaccaacagcaacaacaacatcaaccgtagaatctaagaagcatcttgctactatcagggttatccagagaaatctggtgtacataattgggctacctgcgcatttatgcaatgagagcgtacttgagcgtagggagtactttggtcattatgggaaagttttgaaggttttagtttcccgtccgactgggcctccctctcagcaggcatcagcaaacagcagtattagtgtgtatgtctctctgaattatacggtgtacatgcatgatctgttcatacttcatatgaatttagatttatactttcagtactggtcaattagcctgatggaatatcaaataactatctactgattctatgcaattgcatgtttcaagtttctaatgctgccttgtaatactggaacattggtattataagaaagtaaattcaaacttcaatattgttatgtggttttctattgaacctggtgaaaatgtgataattatgtccatatccttgcaagcagttcagtcatttaagtttaatctaggctacttagcagtgtgattttcctgtagcctcttgatttgcatagccgcacagcccgtgcttgaaagtaacatttttatcctcattgctgacattaggatatgtattgtattattggtgtgaaattcaaagaatcagatagatgcaagatatctgtttgtgggataggatcagaacccaatcctgtgtgtgcagatatagataaaaatcatcttttaatgaaatgtctatttttttctcggtttgagtactttatattgttctcctgggatgtgttttttttctttatgggtgatttctcttggaaatcctaggatagtgtttcgatgtattctgaaactttgttgtgccagaaacatgcattgttttatcattaaccagaattgagttagggattatcattaaggcattaaccaaaatggagttaggatgtctttttttgtagtgtagaaaacgttgtgtatactgaaatgtgcatgcttgcaacatgtctaatatagattatatttgagtggtatctttgttgaagaacatgtgaaattagagttctggtggtcttctagaacacacactgctcctcatctttactttctctacataattcttcaatatgttggtatgttcccgtgactccttggtttagctatccttatacatgcatgttgttacataaatcaattagtttttccctgaaggacaggcctggtgcagtggtgagaggcctttccactgagccaaagggcctgggtttgacgcagcctctgcgcaaaaatgtagggttaaggcttgccttggttattacttccccagacccgactcatgcgggagccgtcagcattgggagatatacgtggagcgtcagaattatatgtgcatctacaagaacagttacaacaattctccatcaggttgatgttcatacatctcagatataaatgtgggggagacggtgcctcatcaatgatgagtaggttgattctcatctagcggcaccattgctcactacaactggtttgcttgagcaacttaatgtcactctcaagaggaccctcctttcgaccgacaccctgaagcaccacacaagctttagaaaagtcggaattgtacttcgtatacataaattacatgatattatatgttcatgtaattctatgttgattctttagaaataatatatatgatattgtaatgtgtgttcgacatcaatttattttatttgagttcgccgtgcg

SEQ ID NO: 16556 - DNA, 2744 bp, Zea Mays
ctgccgcgcacaaatccgccgcgccctcggtcccgcaaatccgccgtgccagctccgcccgctcgattcccctcctagcgcccgcattccccgccgccgtcctcgcggccgcagcgcccctggaccccacgccagcaacgcccgcagtccccgccgtggatctcgcccgaaggcgccgccatggacgccctagatctaccacctcctcctctccccatcactgcgccgcctgcccccgccgcacacctacagcgcgccccttcccccaccgtggatctcgcccatacgccagcggatctcgcactccttccttcgacggcgcggtggcgaggaggtcagcgacggcggcgtcgagtcgaggtcgggcacgaaggcgcggaggccgtgggagcggtcgtggcctacgcacgcacgacgccgctcccccagttcaaaccgaggtcagcgacgacgcacgcacgcaccaccccttcccccttcgtcttccattcccagctggaggtgcacgctgccgggcagagcgtcttgctggaggtgcgatagccatgtctggacctccgtcgccgccatagaaggttgaaaaaattgctaaactgtcatttgagaaaaatgaagtaaaaaaagcctgattatgttggagttgatgatgataagtcaaaggctactgttgaaggcctgcagcagggttattgtgtcatttctagcgataaaaggttcttggttctgtatgctttcctaagaaagagaagataatggtgttcttctcatcatgtaattcagtaaagttccacgttgaacttctgaatttctttaggatagagtgttttgatatccatggaaaacagaagcaactgaagcgaactactacattctttagcttttgcaaggcaggaaagggcatcttattgtgtactaatgtggctgcccgtggacttgatactcctgacgtgaaggaaggcagtgttcatgtctcatccagttcaaatgaagtgacaggaaccattccagagacgaatggaggcgatcatcatatacctggaagctcttttcatgtttagtgaaggtctatgacatgtctgatagtcaaatgaagctaaatgattttatttcaagccttgttcttgagaggatggtcaagattaatttgagtagggtgacttcataatggacgacgaggaagaagtggaaggagaggaagaggaacaaaagagtgatgaccagaagcgaagaaacaaaactaaaaagaaaaggaagagtgctatagaggagcaacggtaccaggacgcgtcaaggttgacaaagctatctgggaccacttttgtaattgccaactcttcactgattattttcctatatgttgctccagaataaatggtaagtgttgatcggtaattcttgtgaacgtaggtaatactgaatctctgactgtttgtgacctatatcccctgaaaacctgaatctcagattgctttagcttagcgcctacatggcagtcctcttgtcgtgaacattttgatctgtgttccgtatatgcttgtaggatcatagtgcggtggtcatgggattgggatctgctccgtatttgcagggtgaagccttcgtgtctcctcgagggaaagtcactgacctttcttgggacgtggaccactgacggcccccgtcatcccccatgacggtgatcctagggtgaagccttcgtgtttcctcgagggaaatctaccagtgcgggattgatttagtcagcaccattggacacagggtttagttccattgcctggacccatcaatgaatcatggtgccaaggtcttgatggttcgacttcaaggtactgatattctccaggactattgttagcatcccttgtggtccatctgcattagcagtgaagaaagtcgcatggggacttgcttgatatgttgttattgctcagatttgtgtttcgtactggcaccacatcatagacatggctgagaaggaggaaacaaagggccgctgccctgcctgccacacacgttatgacaaggatatgatcgtcaagatggccgccacttgtgacaggacagtggcagataaaaatgcggagaagaagcaaaaggcccaaagggttaagccaaaggcagcaccaacagcaacaacaacatcaaccgtagaatctaagaagcatcttgctactatcagggttatccagagaaatctggtgtacataattgggctacctgcgcatttatgcaatgagagcgtacttgagcgtagggagtactttggtcattatgggaaagttttgaaggttttagtttcccgtccgactgggcctccctctcagcaggcatcagcaaacagcagtattagtgtgagatatacgtggagcgtcagaattatatgtgcatctacaagaacagttacaacaattctccatcaggttgatgttcatacatctcagatataaatgtgggggagacggtgcctcatcaatgatgagtaggttgattctcatctagcggcaccattgctcactacaactggtttgcttgagcaacttaatgtcactctcaagaggaccctcctttcgaccgacaccctgaagcaccacacaagctttagaaaagtcggaattgtacttcgtatacataaattacatgatattatatgttcatgtaattctatgttgattctttagaaataatatatatgatattgtaatgtgtgttcgacatcaatttattttatttgagttcgccgtgcg

SEQ ID NO: 16557 - DNA, 3050 bp, Zea Mays
ctgccgcgcacaaatccgccgcgccctcggtcccgcaaatccgccgtgccagctccgcccgctcgattcccctcctagcgcccgcattccccgccgccgtcctcgcggccgcagcgcccctggaccccacgccagcaacgcccgcagtccccgccgtggatctcgcccgaaggcgccgccatggacgccctagatctaccacctcctcctctccccatcactgcgccgcctgcccccgccgcacacctacagcgcgccccttcccccaccgtggatctcgcccatacgccagcggatctcgcactccttccttcgacggcgcggtggcgaggaggtcagcgacggcggcgtcgagtcgaggtcgggcacgaaggcgcggaggccgtgggagcggtcgtggcctacgcacgcacgacgccgctcccccagttcaaaccgaggtcagcgacgacgcacgcacgcaccaccccttcccccttcgtcttccattcccagctggaggtgcacgctgccgggcagagcgtcttgctggaggtgcgatagccatgtctggacctccgtcgccgccatagaagtgccttgtcattgatgaagccgatcgcatacttgagcaaaactttgaggcagactgttcttttttctgctacacagactctagatgttgaaaaaattgctaaactgtcatttgagaaaaatgaagtaaaaaaagcctgattatgttggagttgatgatgataagtcaaaggctactgttgaaggcctgcagcagggttattgtgtcatttctagcgataaaaggttcttggttctgtatgctttcctaagaaagagaagataatggtgttcttctcatcatcttttgcaaggcaggaaagggcatcttattgtgtactaatgtggctgcccgtggacttgatactcctgacgtgaaggaaggcagtgttcatgtctcatccagttcaaatgaagtgacaggaaccattccagagacgaatggaggcgatcatcatatacctggaagctcttttcatgtttagtgaaggtctatgacatgtctgatagtcaaatgaagctaaatgattttatttcaagccttgttcttgagaggatggtcaagattaatttgagtagggtgacttcataatggacgacgaggaagaagtggaaggagaggaagaggaacaaaagagtgatgaccagaagcgaagaaacaaaactaaaaagaaaaggaagaggtacctccctttgttcgtactaggaataaatgccaatgtactgtgtacacctatcctgaaatgaggatgactatatgttgctttaggataataacatcactgccatcactctcccaaagtcgctatgtttttctgtcatagtttgttgtcctgaccaaattttttaatttgttgtctatttctcttaggttgttctttcaataagctgtatctttctctcgtatgcaatgtaaatttcaggtatttgtgaaatatgagtgttgttttggtctcaaaataaatccacaaaagattttagcatctgtaagcactgttgcacattatccaattatatcagggtggtctagaactgttttgtgttgtttatttttagttgaggtgtgtatctttccccaccattgtatgttacaattttctaactacatctgttatgtttgggtgctcttgcattctcgcaaagtgctatagaggagcaacggtaccaggacgcgtcaaggttgacaaagctatctgggaccacttttgtaattgccaactcttcactgattattttcctatatgttgctccagaataaatggatcatagtgcggtggtcatgggattgggatctgctccgtatttgcagggtgaagccttcgtgtctcctcgagggaaagtcactgacctttcttgggacgtggaccactgacggcccccgtcatcccccatgacggtgatcctagggtgaagccttcgtgtttcctcgagggaaatctaccagtgcgggattgatttagtcagcaccattggacacagggtttagttccattgcctggacccatcaatgaatcatggtgccaaggtcttgatggttcgacttcaaggtactgatattctccaggactattgttagcatcccttgtggtccatctgcattagcagtgaagaaagtcgcatggggacttgcttgatatgttgttattgctcagacatggctgagaaggaggaaacaaagggccgctgccctgcctgccacacacgttatgacaaggatatgatcgtcaagatggccgccacttgtgacaggacagtggcagataaaaatgcggagaagaagcaaaaggcccaaagggttaagccaaaggcagcaccaacagcaacaacaacatcaaccgtagaatctaagaagcatcttgctactatcagggttatccagagaaatctggtgtacataattgggctacctgcgcatttatgcaatgagagcgtacttgagcgtagggagtactttggtcattatgggaaagttttgaaggttttagtttcccgtccgactgggcctccctctcagcaggcatcagcaaacagcagtattagtgtggttaaggcttgccttggttattacttccccagacccgactcatgcgggagccgtcagcattgggagatatacgtggagcgtcagaattatatgtgcatctacaagaacagttacaacaattctccatcaggttgatgttcatacatctcagatataaatgtgggggagacggtgcctcatcaatgatgagtaggttgattctcatctagcggcaccattgctcactacaactggtttgcttgagcaacttaatgtcactctcaagaggaccctcctttcgaccgacaccctgaagcaccacacaagctttagaaaagtcggaattgtacttcgtatacataaattacatgatattatatgttcatgtaattctatgttgattctttagaaataatatatatgatattgtaatgtgtgttcgacatcaatttattttatttgagttcgccgtgcg

SEQ ID NO: 16558 - DNA, 2959 bp, Zea Mays
ctgccgcgcacaaatccgccgcgccctcggtcccgcaaatccgccgtgccagctccgcccgctcgattcccctcctagcgcccgcattccccgccgccgtcctcgcggccgcagcgcccctggaccccacgccagcaacgcccgcagtccccgccgtggatctcgcccgaaggcgccgccatggacgccctagatctaccacctcctcctctccccatcactgcgccgcctgcccccgccgcacacctacagcgcgccccttcccccaccgtggatctcgcccatacgccagcggatctcgcactccttccttcgacggcgcggtggcgaggaggtcagcgacggcggcgtcgagtcgaggtcgggcacgaaggcgcggaggccgtgggagcggtcgtggcctacgcacgcacgacgccgctcccccagttcaaaccgaggtcagcgacgacgcacgcacgcaccaccccttcccccttcgtcttccattcccagctggaggtgcacgctgccgggcagagcgtcttgctggaggtgcgatagccatgtctggacctccgtcgccgccatagaaggttgaaaaaattgctaaactgtcatttgagaaaaatgaagtaaaaaaagcctgattatgttggagttgatgatgataagtcaaaggctactgttgaaggcctgcagcagggttattgtgtcatttctagcgataaaaggttcttggttctgtatgctttcctaagaaagagaagataatggtgttcttctcatcatgtaattcagtaaagttccacgttgaacttctgaatttctttaggatagagtgttttgatatccatggaaaacagaagcaactgaagcgaactactacattctttagcttttgcaaggcaggaaagggcatcttattgtgtactaatgtggctgcccgtggacttgatactcctgacgtgaaggaaggcagtgttcatgtctcatccagttcaaatgaagtgacaggaaccattccagagacgaatggaggcgatcatcatatacctggaagctcttttcatgtttagtgaaggtctatgacatgtctgatagtcaaatgaagctaaatgattttatttcaagccttgttcttgagaggatggtcaagattaatttgagtagggtgacttcataatggacgacgaggaagaagtggaaggagaggaagaggaacaaaagagtgatgaccagaagcgaagaaacaaaactaaaaagaaaaggaagaggtacctccctttgttcgtactaggaataaatgccaatgtactgtgtacacctatcctgaaatgaggatgactatatgttgctttaggataataacatcactgccatcactctcccaaagtcgctatgtttttctgtcatagtttgttgtcctgaccaaattttttaatttgttgtctatttctcttaggttgttctttcaataagctgtatctttctctcgtatgcaatgtaaatttcaggtatttgtgaaatatgagtgttgttttggtctcaaaataaatccacaaaagattttagcatctgtaagcactgttgcacattatccaattatatcagggtggtctagaactgttttgtgttgtttatttttagttgaggtgtgtatctttccccaccattgtatgttacaattttctaactacatctgttatgtttgggtgctcttgcattctcgcaaagtgctatagaggagcaacggtaccaggacgcgtcaaggttgacaaagctatctgggaccacttttgtaattgccaactcttcactgattattttcctatatgttgctccagaataaatgggtgaagccttcgtgtctcctcgagggaaagtcactgacctttcttgggacgtggaccactgacggcccccgtcatcccccatgacggtgatcctagggtgaagccttcgtgtttcctcgagggaaatctaccagtgcgggattgatttagtcagcaccattggacacagggtttagttccattgcctggacccatcaatgaatcatggtgccaaggtcttgatggttcgacttcaaggtactgatattctccaggactattgttagcatcccttgtggtccatctgcattagcagtgaagaaagtcgcatggggacttgcttgatatgttgttattgctcagacatggctgagaaggaggaaacaaagggccgctgccctgcctgccacacacgttatgacaaggatatgatcgtcaagatggccgccacttgtgacaggacagtggcagataaaaatgcggagaagaagcaaaaggcccaaagggttaagccaaaggcagcaccaacagcaacaacaacatcaaccgtagaatctaagaagcatcttgctactatcagggttatccagagaaatctggtgtacataattgggctacctgcgcatttatgcaatgagagcgtacttgagcgtagggagtactttggtcattatgggaaagttttgaaggttttagtttcccgtccgactgggcctccctctcagcaggcatcagcaaacagcagtattagtgtgagatatacgtggagcgtcagaattatatgtgcatctacaagaacagttacaacaattctccatcaggttgatgttcatacatctcagatataaatgtgggggagacggtgcctcatcaatgatgagtaggttgattctcatctagcggcaccattgctcactacaactggtttgcttgagcaacttaatgtcactctcaagaggaccctcctttcgaccgacaccctgaagcaccacacaagctttagaaaagtcggaattgtacttcgtatacataaattacatgatattatatgttcatgtaattctatgttgattctttagaaataatatatatgatattgtaatgtgtgttcgacatcaatttattttatttgagttcgccgtgcg

SEQ ID NO: 16559 - DNA, 4616 bp, Zea Mays
ctgccgcgcacaaatccgccgcgccctcggtcccgcaaatccgccgtgccagctccgcccgctcgattcccctcctagcgcccgcattccccgccgccgtcctcgcggccgcagcgcccctggaccccacgccagcaacgcccgcagtccccgccgtggatctcgcccgaaggcgccgccatggacgccctagatctaccacctcctcctctccccatcactgcgccgcctgcccccgccgcacacctacagcgcgccccttcccccaccgtggatctcgcccatacgccagcggatctcgcactccttccttcgacggcgcggtggcgaggaggtcagcgacggcggcgtcgagtcgaggtcgggcacgaaggcgcggaggccgtgggagcggtcgtggcctacgcacgcacgacgccgctcccccagttcaaaccgaggtcagcgacgacgcacgcacgcaccaccccttcccccttcgtcttccattcccagctggaggtgcacgctgccgggcagagcgtcttgctggaggtgcgatagccatgtctggacctccgtcgccgccatagaaggtaatggccctccgattgatgctgtttgattccttctcctttttgtttgggacgtcgccaaattccatcccatttctcagcgtcgtggtctccccgatgtggatgggggaaggtaatttgcttttttcttcgttaacaattgctagactcttgcctccggaggtaatcaactctgtcagggtaaccttggcatgtttatgaatgccaacacaccatggctgattgatcccctctccaacttactttgtgcatctatgtaattatgcagtgccttgtcattgatgaagccgatcgcatacttgagcaaaactttgaggcagactgttcttttttctgctacacagactctagatgttagtagatcttttatgctgcttgtagtcaacttttcattcatgatttatataatttgctcttcttatgcggtgatgcccacaggttgaaaaaattgctaaactgtcatttgagaaaaatgaagtaaaaaaagcctgattatgttggagttgatgatgataagtcaaaggctactgttgaaggcctgcagcagggttattgtgtcatttctagcgataaaaggttcttggttctgtatgctttcctaagaaagagaagataatggtgttcttctcatcatgtaattcagtaaagttccacgttgaacttctgaatttctttaggatagagtgttttgatatccatggaaaacagaagcaactgaagcgaactactacattctttagcttttgcaaggcaggaaagggcatcttattgtgtactaatgtggctgcccgtggacttgatactcctgacgtgaaggaaggcagtgttcatgtctcatccagttcaaatgaagtgacaggaaccattccagagacgaatggaggcgatcatcatatacctggaagctcttttcatgtttagtgaaggtctatgacatgtctgatagtcaaatgaagctaaatgattttatttcaagccttgttcttgagaggatggtcaagattaatttgagtagggtgacttcataatggacgacgaggaagaagtggaaggagaggaagaggaacaaaagagtgatgaccagaagcgaagaaacaaaactaaaaagaaaaggaagaggtacctccctttgttcgtactaggaataaatgccaatgtactgtgtacacctatcctgaaatgaggatgactatatgttgctttaggataataacatcactgccatcactctcccaaagtcgctatgtttttctgtcatagtttgttgtcctgaccaaattttttaatttgttgtctatttctcttaggttgttctttcaataagctgtatctttctctcgtatgcaatgtaaatttcaggtatttgtgaaatatgagtgttgttttggtctcaaaataaatccacaaaagattttagcatctgtaagcactgttgcacattatccaattatatcagggtggtctagaactgttttgtgttgtttatttttagttgaggtgtgtatctttccccaccattgtatgttacaattttctaactacatctgttatgtttgggtgctcttgcattctcgcaaagtgctatagaggagcaacggtaccaggacgcgtcaaggttgacaaagctatctgggaccacttttgtaattgccaactcttcactgattattttcctatatgttgctccagaataaatggatcatagtgcggtggtcatgggattgggatctgctccgtatttgcagggtgaagccttcgtgtctcctcgagggaaagtcactgacctttcttgggacgtggaccactgacggcccccgtcatcccccatgacggtgatcctagggtgaagccttcgtgtttcctcgagggaaatctaccagtgcgggattgatttagtcagcaccattggacacagggtttagttccattgcctggacccatcaatgaatcatggtgccaaggtcttgatggttcgacttcaaggtactgatattctccaggactattgttagcatcccttgtggtccatctgcattagcagtgaagaaagtcgcatggggacttgcttgatatgttgttattgctcagatttgtgtttcgtactggcaccacatcatagacatggctgagaaggaggaaacaaagggccgctgccctgcctgccacacacgttatgacaaggatatgatcgtcaagatggccgccacttgtgacaggacagtggcagataaaaatgcggagaagaagcaaaaggcccaaagggttaagccaaaggcagcaccaacagcaacaacaacatcaaccgtagaatctaagaagcatcttgctactatcagggttatccagagaaatctggtgtacataattgggctacctgcgcatttatgcaatgagagcgtacttgagcgtagggagtactttggtcattatgggaaagttttgaaggttttagtttcccgtccgactgggcctccctctcagcaggcatcagcaaacagcagtattagtgtgtatgtctctctgaattatacggtgtacatgcatgatctgttcatacttcatatgaatttagatttatactttcagtactggtcaattagcctgatggaatatcaaataactatctactgattctatgcaattgcatgtttcaagtttctaatgctgccttgtaatactggaacattggtattataagaaagtaaattcaaacttcaatattgttatgtggttttctattgaacctggtgaaaatgtgataattatgtccatatccttgcaagcagttcagtcatttaagtttaatctaggctacttagcagtgtgattttcctgtagcctcttgatttgcatagccgcacagcccgtgcttgaaagtaacatttttatcctcattgctgacattaggatatgtattgtattattggtgtgaaattcaaagaatcagatagatgcaagatatctgtttgtgggataggatcagaacccaatcctgtgtgtgcagatatagataaaaatcatcttttaatgaaatgtctatttttttctcggtttgagtactttatattgttctcctgggatgtgttttttttctttatgggtgatttctcttggaaatcctaggatagtgtttcgatgtattctgaaactttgttgtgccagaaacatgcattgttttatcattaaccagaattgagttagggattatcattaaggcattaaccaaaatggagttaggatgtctttttttgtagtgtagaaaacgttgtgtatactgaaatgtgcatgcttgcaacatgtctaatatagattatatttgagtggtatctttgttgaagaacatgtgaaattagagttctggtggtcttctagaacacacactgctcctcatctttactttctctacataattcttcaatatgttggtatgttcccgtgactccttggtttagctatccttatacatgcatgttgttacataaatcaattagtttttccctgaaggacaggcctggtgcagtggtgagaggcctttccactgagccaaagggcctgggtttgacgcagcctctgcgcaaaaatgtagggttaaggcttgccttggttattacttccccagacccgactcatgcgggagccgtcagcattgggagatatacgtggagcgtcagaattatatgtgcatctacaagaacagttacaacaattctccatcaggttgatgttcatacatctcagatataaatgtgggggagacggtgcctcatcaatgatgagtaggttgattctcatctagcggcaccattgctcactacaactggtttgcttgagcaacttaatgtcactctcaagaggaccctcctttcgaccgacaccctgaagcaccacacaagctttagaaaagtcggaattgtacttcgtatacataaattacatgatattatatgttcatgtaattctatgttgattctttagaaataatatatatgatattgtaatgtgtgttcgacatcaatttattttatttgagttcgccgtgcg

SEQ ID NO: 16560 - DNA, 2539 bp, Zea Mays
ctgccgcgcacaaatccgccgcgccctcggtcccgcaaatccgccgtgccagctccgcccgctcgattcccctcctagcgcccgcattccccgccgccgtcctcgcggccgcagcgcccctggaccccacgccagcaacgcccgcagtccccgccgtggatctcgcccgaaggcgccgccatggacgccctagatctaccacctcctcctctccccatcactgcgccgcctgcccccgccgcacacctacagcgcgccccttcccccaccgtggatctcgcccatacgccagcggatctcgcactccttccttcgacggcgcggtggcgaggaggtcagcgacggcggcgtcgagtcgaggtcgggcacgaaggcgcggaggccgtgggagcggtcgtggcctacgcacgcacgacgccgctcccccagttcaaaccgaggtcagcgacgacgcacgcacgcaccaccccttcccccttcgtcttccattcccagctggaggtgcacgctgccgggcagagcgtcttgctggaggtgcgatagccatgtctggacctccgtcgccgccatagaaggttgaaaaaattgctaaactgtcatttgagaaaaatgaagtaaaaaaagcctgattatgttggagttgatgatgataagtcaaaggctactgttgaaggcctgcagcagggttattgtgtcatttctagcgataaaaggttcttggttctgtatgctttcctaagaaagagaagataatggtgttcttctcatcatgtaattcagtaaagttccacgttgaacttctgaatttctttaggatagagtgttttgatatccatggaaaacagaagcaactgaagcgaactactacattctttagcttttgcaaggcaggaaagggcatcttattgtgtactaatgtggctgcccgtggacttgatactcctgacgtgaaggaaggcagtgttcatgtctcatccagttcaaatgaagtgacaggaaccattccagagacgaatggaggcgatcatcatatacctggaagctcttttcatgtttagtgaaggtctatgacatgtctgatagtcaaatgaagctaaatgattttatttcaagccttgttcttgagaggatggtcaagattaatttgagtagggtgacttcataatggacgacgaggaagaagtggaaggagaggaagaggaacaaaagagtgatgaccagaagcgaagaaacaaaactaaaaagaaaaggaagagaggagcaacggtaccaggacgcgtcaaggttgacaaagctatctgggaccacttttgtaattgccaactcttcactgattattttcctatatgttgctccagaataaatggatcatagtgcggtggtcatgggattgggatctgctccgtatttgcagggtgaagccttcgtgtctcctcgagggaaagtcactgacctttcttgggacgtggaccactgacggcccccgtcatcccccatgacggtgatcctagggtgaagccttcgtgtttcctcgagggaaatctaccagtgcgggattgatttagtcagcaccattggacacagggtttagttccattgcctggacccatcaatgaatcatggtgccaaggtcttgatggttcgacttcaaggtactgatattctccaggactattgttagcatcccttgtggtccatctgcattagcagtgaagaaagtcgcatggggacttgcttgatatgttgttattgctcagacatggctgagaaggaggaaacaaagggccgctgccctgcctgccacacacgttatgacaaggatatgatcgtcaagatggccgccacttgtgacaggacagtggcagataaaaatgcggagaagaagcaaaaggcccaaagggttaagccaaaggcagcaccaacagcaacaacaacatcaaccgtagaatctaagaagcatcttgctactatcagggttatccagagaaatctggtgtacataattgggctacctgcgcatttatgcaatgagagcgtacttgagcgtagggagtactttggtcattatgggaaagttttgaaggttttagtttcccgtccgactgggcctccctctcagcaggcatcagcaaacagcagtattagtgtgagatatacgtggagcgtcagaattatatgtgcatctacaagaacagttacaacaattctccatcaggttgatgttcatacatctcagatataaatgtgggggagacggtgcctcatcaatgatgagtaggttgattctcatctagcggcaccattgctcactacaactggtttgcttgagcaacttaatgtcactctcaagaggaccctcctttcgaccgacaccctgaagcaccacacaagctttagaaaagtcggaattgtacttcgtatacataaattacatgatattatatgttcatgtaattctatgttgattctttagaaataatatatatgatattgtaatgtgtgttcgacatcaatttattttatttgagttcgccgtgcg

SEQ ID NO: 16561 - DNA, 3089 bp, Zea Mays
ctgccgcgcacaaatccgccgcgccctcggtcccgcaaatccgccgtgccagctccgcccgctcgattcccctcctagcgcccgcattccccgccgccgtcctcgcggccgcagcgcccctggaccccacgccagcaacgcccgcagtccccgccgtggatctcgcccgaaggcgccgccatggacgccctagatctaccacctcctcctctccccatcactgcgccgcctgcccccgccgcacacctacagcgcgccccttcccccaccgtggatctcgcccatacgccagcggatctcgcactccttccttcgacggcgcggtggcgaggaggtcagcgacggcggcgtcgagtcgaggtcgggcacgaaggcgcggaggccgtgggagcggtcgtggcctacgcacgcacgacgccgctcccccagttcaaaccgaggtcagcgacgacgcacgcacgcaccaccccttcccccttcgtcttccattcccagctggaggtgcacgctgccgggcagagcgtcttgctggaggtgcgatagccatgtctggacctccgtcgccgccatagaaggttgaaaaaattgctaaactgtcatttgagaaaaatgaagtaaaaaaagcctgattatgttggagttgatgatgataagtcaaaggctactgttgaaggcctgcagcagggttattgtgtcatttctagcgataaaaggttcttggttctgtatgctttcctaagaaagagaagataatggtgttcttctcatcatgtaattcagtaaagttccacgttgaacttctgaatttctttaggatagagtgttttgatatccatggaaaacagaagcaactgaagcgaactactacattctttagcttttgcaaggcaggaaagggcatcttattgtgtactaatgtggctgcccgtggacttgatactcctgacgtgaaggaaggcagtgttcatgtctcatccagttcaaatgaagtgacaggaaccattccagagacgaatggaggcgatcatcatatacctggaagctcttttcatgtttagtgaaggtctatgacatgtctgatagtcaaatgaagctaaatgattttatttcaagccttgttcttgagaggatggtcaagattaatttgagtagggtgacttcataatggacgacgaggaagaagtggaaggagaggaagaggaacaaaagagtgatgaccagaagcgaagaaacaaaactaaaaagaaaaggaagaggtacctccctttgttcgtactaggaataaatgccaatgtactgtgtacacctatcctgaaatgaggatgactatatgttgctttaggataataacatcactgccatcactctcccaaagtcgctatgtttttctgtcatagtttgttgtcctgaccaaattttttaatttgttgtctatttctcttaggttgttctttcaataagctgtatctttctctcgtatgcaatgtaaatttcaggtatttgtgaaatatgagtgttgttttggtctcaaaataaatccacaaaagattttagcatctgtaagcactgttgcacattatccaattatatcagggtggtctagaactgttttgtgttgtttatttttagttgaggtgtgtatctttccccaccattgtatgttacaattttctaactacatctgttatgtttgggtgctcttgcattctcgcaaagtgctatagaggagcaacggtaccaggacgcgtcaaggttgacaaagctatctgggaccacttttgtaattgccaactcttcactgattattttcctatatgttgctccagaataaatgggtgaagccttcgtgtctcctcgagggaaagtcactgacctttcttgggacgtggaccactgacggcccccgtcatcccccatgacggtgatcctagggtgaagccttcgtgtttcctcgagggaaatctaccagtgcgggattgatttagtcagcaccattggacacagggtttagttccattgcctggacccatcaatgaatcatggtgccaaggtcttgatggttcgacttcaaggtactgatattctccaggactattgttagcatcccttgtggtccatctgcattagcagtgaagaaagtcgcatggggacttgcttgatatgttgttattgctcagacatggctgagaaggaggaaacaaagggccgctgccctgcctgccacacacgttatgacaaggatatgatcgtcaagatggccgccacttgtgacaggacagtggcagataaaaatgcggagaagaagcaaaaggcccaaagggttaagccaaaggcagcaccaacagcaacaacaacatcaaccgtagaatctaagaagcatcttgctactatcagggttatccagagaaatctggtgtacataattgggctacctgcgcatttatgcaatgagagcgtacttgagcgtagggagtactttggtcattatgggaaagttttgaaggttttagtttcccgtccgactgggcctccctctcagcaggcatcagcaaacagcagtattagtgtggttaaggcttgccttggttattacttccccagacccgactcatgcgggagccgtcagcattgggtctgttcttttactgatttgttgcgggtctagacaaatatgagctcataatgtattatctttcaggagatatacgtggagcgtcagaattatatgtgcatctacaagaacagttacaacaattctccatcaggttgatgttcatacatctcagatataaatgtgggggagacggtgcctcatcaatgatgagtaggttgattctcatctagcggcaccattgctcactacaactggtttgcttgagcaacttaatgtcactctcaagaggaccctcctttcgaccgacaccctgaagcaccacacaagctttagaaaagtcggaattgtacttcgtatacataaattacatgatattatatgttcatgtaattctatgttgattctttagaaataatatatatgatattgtaatgtgtgttcgacatcaatttattttatttgagttcgccgtgcg

SEQ ID NO: 16562 - DNA, 3586 bp, Zea Mays
ctgccgcgcacaaatccgccgcgccctcggtcccgcaaatccgccgtgccagctccgcccgctcgattcccctcctagcgcccgcattccccgccgccgtcctcgcggccgcagcgcccctggaccccacgccagcaacgcccgcagtccccgccgtggatctcgcccgaaggcgccgccatggacgccctagatctaccacctcctcctctccccatcactgcgccgcctgcccccgccgcacacctacagcgcgccccttcccccaccgtggatctcgcccatacgccagcggatctcgcactccttccttcgacggcgcggtggcgaggaggtcagcgacggcggcgtcgagtcgaggtcgggcacgaaggcgcggaggccgtgggagcggtcgtggcctacgcacgcacgacgccgctcccccagttcaaaccgaggtcagcgacgacgcacgcacgcaccaccccttcccccttcgtcttccattcccagctggaggtgcacgctgccgggcagagcgtcttgctggaggtgcgatagccatgtctggacctccgtcgccgccatagaaggttgaaaaaattgctaaactgtcatttgagaaaaatgaagtaaaaaaagcctgattatgttggagttgatgatgataagtcaaaggctactgttgaaggcctgcagcagggttattgtgtcatttctagcgataaaaggatagagtgttttgatatccatggaaaacagaagcaactgaagcgaactactacattctttagcttttgcaaggcaggaaagggcatcttattgtgtactaatgtggctgcccgtggacttgatactcctgacgtgaaggaaggcagtgttcatgtctcatccagttcaaatgaagtgacaggaaccattccagagacgaatggaggcgatcatcatatacctggaagctcttttcatgtttagtgaaggtctatgacatgtctgatagtcaaatgaagctaaatgattttatttcaagccttgttcttgagaggatggtcaagattaatttgagtagggtgacttcataatggacgacgaggaagaagtggaaggagaggaagaggaacaaaagagtgatgaccagaagcgaagaaacaaaactaaaaagaaaaggaagagtgctatagaggagcaacggtaccaggacgcgtcaaggttgacaaagctatctgggaccacttttgtaattgccaactcttcactgattattttcctatatgttgctccagaataaatggatcatagtgcggtggtcatgggattgggatctgctccgtatttgcagggtgaagccttcgtgtctcctcgagggaaagtcactgacctttcttgggacgtggaccactgacggcccccgtcatcccccatgacggtgatcctagggtgaagccttcgtgtttcctcgagggaaatctaccagtgcgggattgatttagtcagcaccattggacacagggtttagttccattgcctggacccatcaatgaatcatggtgccaaggtcttgatggttcgacttcaaggtactgatattctccaggactattgttagcatcccttgtggtccatctgcattagcagtgaagaaagtcgcatggggacttgcttgatatgttgttattgctcagacatggctgagaaggaggaaacaaagggccgctgccctgcctgccacacacgttatgacaaggatatgatcgtcaagatggccgccacttgtgacaggacagtggcagataaaaatgcggagaagaagcaaaaggcccaaagggttaagccaaaggcagcaccaacagcaacaacaacatcaaccgtagaatctaagaagcatcttgctactatcagggttatccagagaaatctggtgtacataattgggctacctgcgcatttatgcaatgagagcgtacttgagcgtagggagtactttggtcattatgggaaagttttgaaggttttagtttcccgtccgactgggcctccctctcagcaggcatcagcaaacagcagtattagtgtgtatgtctctctgaattatacggtgtacatgcatgatctgttcatacttcatatgaatttagatttatactttcagtactggtcaattagcctgatggaatatcaaataactatctactgattctatgcaattgcatgtttcaagtttctaatgctgccttgtaatactggaacattggtattataagaaagtaaattcaaacttcaatattgttatgtggttttctattgaacctggtgaaaatgtgataattatgtccatatccttgcaagcagttcagtcatttaagtttaatctaggctacttagcagtgtgattttcctgtagcctcttgatttgcatagccgcacagcccgtgcttgaaagtaacatttttatcctcattgctgacattaggatatgtattgtattattggtgtgaaattcaaagaatcagatagatgcaagatatctgtttgtgggataggatcagaacccaatcctgtgtgtgcagatatagataaaaatcatcttttaatgaaatgtctatttttttctcggtttgagtactttatattgttctcctgggatgtgttttttttctttatgggtgatttctcttggaaatcctaggatagtgtttcgatgtattctgaaactttgttgtgccagaaacatgcattgttttatcattaaccagaattgagttagggattatcattaaggcattaaccaaaatggagttaggatgtctttttttgtagtgtagaaaacgttgtgtatactgaaatgtgcatgcttgcaacatgtctaatatagattatatttgagtggtatctttgttgaagaacatgtgaaattagagttctggtggtcttctagaacacacactgctcctcatctttactttctctacataattcttcaatatgttggtatgttcccgtgactccttggtttagctatccttatacatgcatgttgttacataaatcaattagtttttccctgaaggacaggcctggtgcagtggtgagaggcctttccactgagccaaagggcctgggtttgacgcagcctctgcgcaaaaatgtagggttaaggcttgccttggttattacttccccagacccgactcatgcgggagccgtcagcattgggagatatacgtggagcgtcagaattatatgtgcatctacaagaacagttacaacaattctccatcaggttgatgttcatacatctcagatataaatgtgggggagacggtgcctcatcaatgatgagtaggttgattctcatctagcggcaccattgctcactacaactggtttgcttgagcaacttaatgtcactctcaagaggaccctcctttcgaccgacaccctgaagcaccacacaagctttagaaaagtcggaattgtacttcgtatacataaattacatgatattatatgttcatgtaattctatgttgattctttagaaataatatatatgatattgtaatgtgtgttcgacatcaatttattttatttgagttcgccgtgcg

SEQ ID NO: 16563 - DNA, 3598 bp, Zea Mays
ctgccgcgcacaaatccgccgcgccctcggtcccgcaaatccgccgtgccagctccgcccgctcgattcccctcctagcgcccgcattccccgccgccgtcctcgcggccgcagcgcccctggaccccacgccagcaacgcccgcagtccccgccgtggatctcgcccgaaggcgccgccatggacgccctagatctaccacctcctcctctccccatcactgcgccgcctgcccccgccgcacacctacagcgcgccccttcccccaccgtggatctcgcccatacgccagcggatctcgcactccttccttcgacggcgcggtggcgaggaggtcagcgacggcggcgtcgagtcgaggtcgggcacgaaggcgcggaggccgtgggagcggtcgtggcctacgcacgcacgacgccgctcccccagttcaaaccgaggtcagcgacgacgcacgcacgcaccaccccttcccccttcgtcttccattcccagctggaggtgcacgctgccgggcagagcgtcttgctggaggtgcgatagccatgtctggacctccgtcgccgccatagaagtgccttgtcattgatgaagccgatcgcatacttgagcaaaactttgaggcagactgttcttttttctgctacacagactctagatgttgaaaaaattgctaaactgtcatttgagaaaaatgaagtaaaaaaagcctgattatgttggagttgatgatgataagtcaaaggctactgttgaaggcctgcagcagggttattgtgtcatttctagcgataaaaggttcttggttctgtatgctttcctaagaaagagaagataatggtgttcttctcatcatcttttgcaaggcaggaaagggcatcttattgtgtactaatgtggctgcccgtggacttgatactcctgacgtgaaggaaggcagtgttcatgtctcatccagttcaaatgaagtgacaggaaccattccagagacgaatggaggcgatcatcatatacctggaagctcttttcatgtttagtgaaggtctatgacatgtctgatagtcaaatgaagctaaatgattttatttcaagccttgttcttgagaggatggtcaagattaatttgagtagggtgacttcataatggacgacgaggaagaagtggaaggagaggaagaggaacaaaagagtgatgaccagaagcgaagaaacaaaactaaaaagaaaaggaagagtgctatagaggagcaacggtaccaggacgcgtcaaggttgacaaagctatctgggaccacttttgtaattgccaactcttcactgattattttcctatatgttgctccagaataaatggatcatagtgcggtggtcatgggattgggatctgctccgtatttgcagggtgaagccttcgtgtctcctcgagggaaagtcactgacctttcttgggacgtggaccactgacggcccccgtcatcccccatgacggtgatcctagggtgaagccttcgtgtttcctcgagggaaatctaccagtgcgggattgatttagtcagcaccattggacacagggtttagttccattgcctggacccatcaatgaatcatggtgccaaggtcttgatggttcgacttcaaggtactgatattctccaggactattgttagcatcccttgtggtccatctgcattagcagtgaagaaagtcgcatggggacttgcttgatatgttgttattgctcagacatggctgagaaggaggaaacaaagggccgctgccctgcctgccacacacgttatgacaaggatatgatcgtcaagatggccgccacttgtgacaggacagtggcagataaaaatgcggagaagaagcaaaaggcccaaagggttaagccaaaggcagcaccaacagcaacaacaacatcaaccgtagaatctaagaagcatcttgctactatcagggttatccagagaaatctggtgtacataattgggctacctgcgcatttatgcaatgagagcgtacttgagcgtagggagtactttggtcattatgggaaagttttgaaggttttagtttcccgtccgactgggcctccctctcagcaggcatcagcaaacagcagtattagtgtgtatgtctctctgaattatacggtgtacatgcatgatctgttcatacttcatatgaatttagatttatactttcagtactggtcaattagcctgatggaatatcaaataactatctactgattctatgcaattgcatgtttcaagtttctaatgctgccttgtaatactggaacattggtattataagaaagtaaattcaaacttcaatattgttatgtggttttctattgaacctggtgaaaatgtgataattatgtccatatccttgcaagcagttcagtcatttaagtttaatctaggctacttagcagtgtgattttcctgtagcctcttgatttgcatagccgcacagcccgtgcttgaaagtaacatttttatcctcattgctgacattaggatatgtattgtattattggtgtgaaattcaaagaatcagatagatgcaagatatctgtttgtgggataggatcagaacccaatcctgtgtgtgcagatatagataaaaatcatcttttaatgaaatgtctatttttttctcggtttgagtactttatattgttctcctgggatgtgttttttttctttatgggtgatttctcttggaaatcctaggatagtgtttcgatgtattctgaaactttgttgtgccagaaacatgcattgttttatcattaaccagaattgagttagggattatcattaaggcattaaccaaaatggagttaggatgtctttttttgtagtgtagaaaacgttgtgtatactgaaatgtgcatgcttgcaacatgtctaatatagattatatttgagtggtatctttgttgaagaacatgtgaaattagagttctggtggtcttctagaacacacactgctcctcatctttactttctctacataattcttcaatatgttggtatgttcccgtgactccttggtttagctatccttatacatgcatgttgttacataaatcaattagtttttccctgaaggacaggcctggtgcagtggtgagaggcctttccactgagccaaagggcctgggtttgacgcagcctctgcgcaaaaatgagatatacgtggagcgtcagaattatatgtgcatctacaagaacagttacaacaattctccatcaggttgatgttcatacatctcagatataaatgtgggggagacggtgcctcatcaatgatgagtaggttgattctcatctagcggcaccattgctcactacaactggtttgcttgagcaacttaatgtcactctcaagaggaccctcctttcgaccgacaccctgaagcaccacacaagctttagaaaagtcggaattgtacttcgtatacataaattacatgatattatatgttcatgtaattctatgttgattctttagaaataatatatatgatattgtaatgtgtgttcgacatcaatttattttatttgagttcgccgtgcg

SEQ ID NO: 16564 - DNA, 3071 bp, Zea Mays
ctgccgcgcacaaatccgccgcgccctcggtcccgcaaatccgccgtgccagctccgcccgctcgattcccctcctagcgcccgcattccccgccgccgtcctcgcggccgcagcgcccctggaccccacgccagcaacgcccgcagtccccgccgtggatctcgcccgaaggcgccgccatggacgccctagatctaccacctcctcctctccccatcactgcgccgcctgcccccgccgcacacctacagcgcgccccttcccccaccgtggatctcgcccatacgccagcggatctcgcactccttccttcgacggcgcggtggcgaggaggtcagcgacggcggcgtcgagtcgaggtcgggcacgaaggcgcggaggccgtgggagcggtcgtggcctacgcacgcacgacgccgctcccccagttcaaaccgaggtcagcgacgacgcacgcacgcaccaccccttcccccttcgtcttccattcccagctggaggtgcacgctgccgggcagagcgtcttgctggaggtgcgatagccatgtctggacctccgtcgccgccatagaaggttgaaaaaattgctaaactgtcatttgagaaaaatgaagtaaaaaaagcctgattatgttggagttgatgatgataagtcaaaggctactgttgaaggcctgcagcagggttattgtgtcatttctagcgataaaaggttcttggttctgtatgctttcctaagaaagagaagataatggtgttcttctcatcatgtaattcagtaaagttccacgttgaacttctgaatttctttaggatagagtgttttgatatccatggaaaacagaagcaactgaagcgaactactacattctttagcttttgcaaggcaggaaagggcatcttattgtgtactaatgtggctgcccgtggacttgatactcctgacgtgaaggaaggcagtgttcatgtctcatccagttcaaatgaagtgacaggaaccattccagagacgaatggaggcgatcatcatatacctggaagctcttttcatgtttagtgaaggtctatgacatgtctgatagtcaaatgaagctaaatgattttatttcaagccttgttcttgagaggatggtcaagattaatttgagtagggtgacttcataatggacgacgaggaagaagtggaaggagaggaagaggaacaaaagagtgatgaccagaagcgaagaaacaaaactaaaaagaaaaggaagaggtacctccctttgttcgtactaggaataaatgccaatgtactgtgtacacctatcctgaaatgaggatgactatatgttgctttaggataataacatcactgccatcactctcccaaagtcgctatgtttttctgtcatagtttgttgtcctgaccaaattttttaatttgttgtctatttctcttaggttgttctttcaataagctgtatctttctctcgtatgcaatgtaaatttcaggtatttgtgaaatatgagtgttgttttggtctcaaaataaatccacaaaagattttagcatctgtaagcactgttgcacattatccaattatatcagggtggtctagaactgttttgtgttgtttatttttagttgaggtgtgtatctttccccaccattgtatgttacaattttctaactacatctgttatgtttgggtgctcttgcattctcgcaaagtgctatagaggagcaacggtaccaggacgcgtcaaggttgacaaagctatctgggaccacttttgtaattgccaactcttcactgattattttcctatatgttgctccagaataaatggatcatagtgcggtggtcatgggattgggatctgctccgtatttgcagggtgaagccttcgtgtctcctcgagggaaagtcactgacctttcttgggacgtggaccactgacggcccccgtcatcccccatgacggtgatcctagggtgaagccttcgtgtttcctcgagggaaatctaccagtgcgggattgatttagtcagcaccattggacacagggtttagttccattgcctggacccatcaatgaatcatggtgccaaggtcttgatggttcgacttcaaggtactgatattctccaggactattgttagcatcccttgtggtccatctgcattagcagtgaagaaagtcgcatggggacttgcttgatatgttgttattgctcagacatggctgagaaggaggaaacaaagggccgctgccctgcctgccacacacgttatgacaaggatatgatcgtcaagatggccgccacttgtgacaggacagtggcagataaaaatgcggagaagaagcaaaaggcccaaagggttaagccaaaggcagcaccaacagcaacaacaacatcaaccgtagaatctaagaagcatcttgctactatcagggttatccagagaaatctggtgtacataattgggctacctgcgcatttatgcaatgagagcgtacttgagcgtagggagtactttggtcattatgggaaagttttgaaggttttagtttcccgtccgactgggcctccctctcagcaggcatcagcaaacagcagtattagtgtggttaaggcttgccttggttattacttccccagacccgactcatgcgggagccgtcagcattgggagatatacgtggagcgtcagaattatatgtgcatctacaagaacagttacaacaattctccatcaggttgatgttcatacatctcagatataaatgtgggggagacggtgcctcatcaatgatgagtaggttgattctcatctagcggcaccattgctcactacaactggtttgcttgagcaacttaatgtcactctcaagaggaccctcctttcgaccgacaccctgaagcaccacacaagctttagaaaagtcggaattgtacttcgtatacataaattacatgatattatatgttcatgtaattctatgttgattctttagaaataatatatatgatattgtaatgtgtgttcgacatcaatttattttatttgagttcgccgtgcg

SEQ ID NO: 16565 - DNA, 2903 bp, Zea Mays
ctgccgcgcacaaatccgccgcgccctcggtcccgcaaatccgccgtgccagctccgcccgctcgattcccctcctagcgcccgcattccccgccgccgtcctcgcggccgcagcgcccctggaccccacgccagcaacgcccgcagtccccgccgtggatctcgcccgaaggcgccgccatggacgccctagatctaccacctcctcctctccccatcactgcgccgcctgcccccgccgcacacctacagcgcgccccttcccccaccgtggatctcgcccatacgccagcggatctcgcactccttccttcgacggcgcggtggcgaggaggtcagcgacggcggcgtcgagtcgaggtcgggcacgaaggcgcggaggccgtgggagcggtcgtggcctacgcacgcacgacgccgctcccccagttcaaaccgaggtcagcgacgacgcacgcacgcaccaccccttcccccttcgtcttccattcccagctggaggtgcacgctgccgggcagagcgtcttgctggaggtgcgatagccatgtctggacctccgtcgccgccatagaagaggttgaaaaaattgctaaactgtcatttgagaaaaatgaagtaaaaaaagcctgattatgttggagttgatgatgataagtcaaaggctactgttgaaggcctgcagcagggttattgtgtcatttctagcgataaaaggttcttggttctgtatgctttcctaagaaagagaagataatggtgttcttctcatcatcttttgcaaggcaggaaagggcatcttattgtgtactaatgtggctgcccgtggacttgatactcctgacgtgaaggaaggcagtgttcatgtctcatccagttcaaatgaagtgacaggaaccattccagagacgaatggaggcgatcatcatatacctggaagctcttttcatgtttagtgaaggtctatgacatgtctgatagtcaaatgaagctaaatgattttatttcaagccttgttcttgagaggatggtcaagattaatttgagtagggtgacttcataatggacgacgaggaagaagtggaaggagaggaagaggaacaaaagagtgatgaccagaagcgaagaaacaaaactaaaaagaaaaggaagaggtacctccctttgttcgtactaggaataaatgccaatgtactgtgtacacctatcctgaaatgaggatgactatatgttgctttaggataataacatcactgccatcactctcccaaagtcgctatgtttttctgtcatagtttgttgtcctgaccaaattttttaatttgttgtctatttctcttaggttgttctttcaataagctgtatctttctctcgtatgcaatgtaaatttcaggtatttgtgaaatatgagtgttgttttggtctcaaaataaatccacaaaagattttagcatctgtaagcactgttgcacattatccaattatatcagggtggtctagaactgttttgtgttgtttatttttagttgaggtgtgtatctttccccaccattgtatgttacaattttctaactacatctgttatgtttgggtgctcttgcattctcgcaaagtgctatagaggagcaacggtaccaggacgcgtcaaggttgacaaagctatctgggaccacttttgtaattgccaactcttcactgattattttcctatatgttgctccagaataaatggatcatagtgcggtggtcatgggattgggatctgctccgtatttgcagggtgaagccttcgtgtctcctcgagggaaagtcactgacctttcttgggacgtggaccactgacggcccccgtcatcccccatgacggtgatcctagggtgaagccttcgtgtttcctcgagggaaatctaccagtgcgggattgatttagtcagcaccattggacacagggtttagttccattgcctggacccatcaatgaatcatggtgccaaggtcttgatggttcgacttcaaggtactgatattctccaggactattgttagcatcccttgtggtccatctgcattagcagtgaagaaagtcgcatggggacttgcttgatatgttgttattgctcagacatggctgagaaggaggaaacaaagggccgctgccctgcctgccacacacgttatgacaaggatatgatcgtcaagatggccgccacttgtgacaggacagtggcagataaaaatgcggagaagaagcaaaaggcccaaagggttaagccaaaggcagcaccaacagcaacaacaacatcaaccgtagaatctaagaagcatcttgctactatcagggttatccagagaaatctggtgtacataattgggctacctgcgcatttatgcaatgagagcgtacttgagcgtagggagtactttggtcattatgggaaagttttgaaggttttagtttcccgtccgactgggcctccctctcagcaggcatcagcaaacagcagtattagtgtgagatatacgtggagcgtcagaattatatgtgcatctacaagaacagttacaacaattctccatcaggttgatgttcatacatctcagatataaatgtgggggagacggtgcctcatcaatgatgagtaggttgattctcatctagcggcaccattgctcactacaactggtttgcttgagcaacttaatgtcactctcaagaggaccctcctttcgaccgacaccctgaagcaccacacaagctttagaaaagtcggaattgtacttcgtatacataaattacatgatattatatgttcatgtaattctatgttgattctttagaaataatatatatgatattgtaatgtgtgttcgacatcaatttattttatttgagttcgccgtgcg

SEQ ID NO: 16566 - DNA, 2986 bp, Zea Mays
ctgccgcgcacaaatccgccgcgccctcggtcccgcaaatccgccgtgccagctccgcccgctcgattcccctcctagcgcccgcattccccgccgccgtcctcgcggccgcagcgcccctggaccccacgccagcaacgcccgcagtccccgccgtggatctcgcccgaaggcgccgccatggacgccctagatctaccacctcctcctctccccatcactgcgccgcctgcccccgccgcacacctacagcgcgccccttcccccaccgtggatctcgcccatacgccagcggatctcgcactccttccttcgacggcgcggtggcgaggaggtcagcgacggcggcgtcgagtcgaggtcgggcacgaaggcgcggaggccgtgggagcggtcgtggcctacgcacgcacgacgccgctcccccagttcaaaccgaggtcagcgacgacgcacgcacgcaccaccccttcccccttcgtcttccattcccagctggaggtgcacgctgccgggcagagcgtcttgctggaggtgcgatagccatgtctggacctccgtcgccgccatagaagtgccttgtcattgatgaagccgatcgcatacttgagcaaaactttgaggcagactgttcttttttctgctacacagactctagatgttgaaaaaattgctaaactgtcatttgagaaaaatgaagtaaaaaaagcctgattatgttggagttgatgatgataagtcaaaggctactgttgaaggcctgcagcagggttattgtgtcatttctagcgataaaaggttcttggttctgtatgctttcctaagaaagagaagataatggtgttcttctcatcatcttttgcaaggcaggaaagggcatcttattgtgtactaatgtggctgcccgtggacttgatactcctgacgtgaaggaaggcagtgttcatgtctcatccagttcaaatgaagtgacaggaaccattccagagacgaatggaggcgatcatcatatacctggaagctcttttcatgtttagtgaaggtctatgacatgtctgatagtcaaatgaagctaaatgattttatttcaagccttgttcttgagaggatggtcaagattaatttgagtagggtgacttcataatggacgacgaggaagaagtggaaggagaggaagaggaacaaaagagtgatgaccagaagcgaagaaacaaaactaaaaagaaaaggaagaggtacctccctttgttcgtactaggaataaatgccaatgtactgtgtacacctatcctgaaatgaggatgactatatgttgctttaggataataacatcactgccatcactctcccaaagtcgctatgtttttctgtcatagtttgttgtcctgaccaaattttttaatttgttgtctatttctcttaggttgttctttcaataagctgtatctttctctcgtatgcaatgtaaatttcaggtatttgtgaaatatgagtgttgttttggtctcaaaataaatccacaaaagattttagcatctgtaagcactgttgcacattatccaattatatcagggtggtctagaactgttttgtgttgtttatttttagttgaggtgtgtatctttccccaccattgtatgttacaattttctaactacatctgttatgtttgggtgctcttgcattctcgcaaagtgctatagaggagcaacggtaccaggacgcgtcaaggttgacaaagctatctgggaccacttttgtaattgccaactcttcactgattattttcctatatgttgctccagaataaatggatcatagtgcggtggtcatgggattgggatctgctccgtatttgcagggtgaagccttcgtgtctcctcgagggaaagtcactgacctttcttgggacgtggaccactgacggcccccgtcatcccccatgacggtgatcctagggtgaagccttcgtgtttcctcgagggaaatctaccagtgcgggattgatttagtcagcaccattggacacagggtttagttccattgcctggacccatcaatgaatcatggtgccaaggtcttgatggttcgacttcaaggtactgatattctccaggactattgttagcatcccttgtggtccatctgcattagcagtgaagaaagtcgcatggggacttgcttgatatgttgttattgctcagacatggctgagaaggaggaaacaaagggccgctgccctgcctgccacacacgttatgacaaggatatgatcgtcaagatggccgccacttgtgacaggacagtggcagataaaaatgcggagaagaagcaaaaggcccaaagggttaagccaaaggcagcaccaacagcaacaacaacatcaaccgtagaatctaagaagcatcttgctactatcagggttatccagagaaatctggtgtacataattgggctacctgcgcatttatgcaatgagagcgtacttgagcgtagggagtactttggtcattatgggaaagttttgaaggttttagtttcccgtccgactgggcctccctctcagcaggcatcagcaaacagcagtattagtgtgagatatacgtggagcgtcagaattatatgtgcatctacaagaacagttacaacaattctccatcaggttgatgttcatacatctcagatataaatgtgggggagacggtgcctcatcaatgatgagtaggttgattctcatctagcggcaccattgctcactacaactggtttgcttgagcaacttaatgtcactctcaagaggaccctcctttcgaccgacaccctgaagcaccacacaagctttagaaaagtcggaattgtacttcgtatacataaattacatgatattatatgttcatgtaattctatgttgattctttagaaataatatatatgatattgtaatgtgtgttcgacatcaatttattttatttgagttcgccgtgcg

SEQ ID NO: 16567 - DNA, 3153 bp, Zea Mays
ctgccgcgcacaaatccgccgcgccctcggtcccgcaaatccgccgtgccagctccgcccgctcgattcccctcctagcgcccgcattccccgccgccgtcctcgcggccgcagcgcccctggaccccacgccagcaacgcccgcagtccccgccgtggatctcgcccgaaggcgccgccatggacgccctagatctaccacctcctcctctccccatcactgcgccgcctgcccccgccgcacacctacagcgcgccccttcccccaccgtggatctcgcccatacgccagcggatctcgcactccttccttcgacggcgcggtggcgaggaggtcagcgacggcggcgtcgagtcgaggtcgggcacgaaggcgcggaggccgtgggagcggtcgtggcctacgcacgcacgacgccgctcccccagttcaaaccgaggtcagcgacgacgcacgcacgcaccaccccttcccccttcgtcttccattcccagctggaggtgcacgctgccgggcagagcgtcttgctggaggtgcgatagccatgtctggacctccgtcgccgccatagaagtgccttgtcattgatgaagccgatcgcatacttgagcaaaactttgaggcagactgttcttttttctgctacacagactctagatgttgaaaaaattgctaaactgtcatttgagaaaaatgaagtaaaaaaagcctgattatgttggagttgatgatgataagtcaaaggctactgttgaaggcctgcagcagggttattgtgtcatttctagcgataaaaggttcttggttctgtatgctttcctaagaaagagaagataatggtgttcttctcatcatgtaattcagtaaagttccacgttgaacttctgaatttctttaggatagagtgttttgatatccatggaaaacagaagcaactgaagcgaactactacattctttagcttttgcaaggcaggaaagggcatcttattgtgtactaatgtggctgcccgtggacttgatactcctgacgtgaaggaaggcagtgttcatgtctcatccagttcaaatgaagtgacaggaaccattccagagacgaatggaggcgatcatcatatacctggaagctcttttcatgtttagtgaaggtctatgacatgtctgatagtcaaatgaagctaaatgattttatttcaagccttgttcttgagaggatggtcaagattaatttgagtagggtgacttcataatggacgacgaggaagaagtggaaggagaggaagaggaacaaaagagtgatgaccagaagcgaagaaacaaaactaaaaagaaaaggaagaggtacctccctttgttcgtactaggaataaatgccaatgtactgtgtacacctatcctgaaatgaggatgactatatgttgctttaggataataacatcactgccatcactctcccaaagtcgctatgtttttctgtcatagtttgttgtcctgaccaaattttttaatttgttgtctatttctcttaggttgttctttcaataagctgtatctttctctcgtatgcaatgtaaatttcaggtatttgtgaaatatgagtgttgttttggtctcaaaataaatccacaaaagattttagcatctgtaagcactgttgcacattatccaattatatcagggtggtctagaactgttttgtgttgtttatttttagttgaggtgtgtatctttccccaccattgtatgttacaattttctaactacatctgttatgtttgggtgctcttgcattctcgcaaagtgctatagaggagcaacggtaccaggacgcgtcaaggttgacaaagctatctgggaccacttttgtaattgccaactcttcactgattattttcctatatgttgctccagaataaatggtaagtgttgatcggtaattcttgtgaacgtaggtaatactgaatctctgactgtttgtgacctatatcccctgaaaacctgaatctcagattgctttagcttagcgcctacatggcagtcctcttgtcgtgaacattttgatctgtgttccgtatatgcttgtaggatcatagtgcggtggtcatgggattgggatctgctccgtatttgcagggtgaagccttcgtgtctcctcgagggaaagtcactgacctttcttgggacgtggaccactgacggcccccgtcatcccccatgacggtgatcctagggtgaagccttcgtgtttcctcgagggaaatctaccagtgcgggattgatttagtcagcaccattggacacagggtttagttccattgcctggacccatcaatgaatcatggtgccaaggtcttgatggttcgacttcaagacatggctgagaaggaggaaacaaagggccgctgccctgcctgccacacacgttatgacaaggatatgatcgtcaagatggccgccacttgtgacaggacagtggcagataaaaatgcggagaagaagcaaaaggcccaaagggttaagccaaaggcagcaccaacagcaacaacaacatcaaccgtagaatctaagaagcatcttgctactatcagggttatccagagaaatctggtgtacataattgggctacctgcgcatttatgcaatgagagcgtacttgagcgtagggagtactttggtcattatgggaaagttttgaaggttttagtttcccgtccgactgggcctccctctcagcaggcatcagcaaacagcagtattagtgtgagatatacgtggagcgtcagaattatatgtgcatctacaagaacagttacaacaattctccatcaggttgatgttcatacatctcagatataaatgtgggggagacggtgcctcatcaatgatgagtaggttgattctcatctagcggcaccattgctcactacaactggtttgcttgagcaacttaatgtcactctcaagaggaccctcctttcgaccgacaccctgaagcaccacacaagctttagaaaagtcggaattgtacttcgtatacataaattacatgatattatatgttcatgtaattctatgttgattctttagaaataatatatatgatattgtaatgtgtgttcgacatcaatttattttatttgagttcgccgtgcg

SEQ ID NO: 16568 - DNA, 3870 bp, Zea Mays
ctgccgcgcacaaatccgccgcgccctcggtcccgcaaatccgccgtgccagctccgcccgctcgattcccctcctagcgcccgcattccccgccgccgtcctcgcggccgcagcgcccctggaccccacgccagcaacgcccgcagtccccgccgtggatctcgcccgaaggcgccgccatggacgccctagatctaccacctcctcctctccccatcactgcgccgcctgcccccgccgcacacctacagcgcgccccttcccccaccgtggatctcgcccatacgccagcggatctcgcactccttccttcgacggcgcggtggcgaggaggtcagcgacggcggcgtcgagtcgaggtcgggcacgaaggcgcggaggccgtgggagcggtcgtggcctacgcacgcacgacgccgctcccccagttcaaaccgaggtcagcgacgacgcacgcacgcaccaccccttcccccttcgtcttccattcccagctggaggtgcacgctgccgggcagagcgtcttgctggaggtgcgatagccatgtctggacctccgtcgccgccatagaagtgccttgtcattgatgaagccgatcgcatacttgagcaaaactttgaggcagactgttcttttttctgctacacagactctagaggttgaaaaaattgctaaactgtcatttgagaaaaatgaagtaaaaaaagcctgattatgttggagttgatgatgataagtcaaaggctactgttgaaggcctgcagcagggttattgtgtcatttctagcgataaaaggttcttggttctgtatgctttcctaagaaagagaagataatggtgttcttctcatcatgtaattcagtaaagttccacgttgaacttctgaatttctttaggatagagtgttttgatatccatggaaaacagaagcaactgaagcgaactactacattctttagcttttgcaaggcaggaaagggcatcttattgtgtactaatgtggctgcccgtggacttgatactcctgacgtgaaggaaggcagtgttcatgtctcatccagttcaaatgaagtgacaggaaccattccagagacgaatggaggcgatcatcatatacctggaagctcttttcatgtttagtgaaggtctatgacatgtctgatagtcaaatgaagctaaatgattttatttcaagccttgttcttgagaggatggtcaagattaatttgagtagggtgacttcataatggacgacgaggaagaagtggaaggagaggaagaggaacaaaagagtgatgaccagaagcgaagaaacaaaactaaaaagaaaaggaagagtgctatagaggagcaacggtaccaggacgcgtcaaggttgacaaagctatctgggaccacttttgtaattgccaactcttcactgattattttcctatatgttgctccagaataaatggtaagtgttgatcggtaattcttgtgaacgtaggtaatactgaatctctgactgtttgtgacctatatcccctgaaaacctgaatctcagattgctttagcttagcgcctacatggcagtcctcttgtcgtgaacattttgatctgtgttccgtatatgcttgtaggatcatagtgcggtggtcatgggattgggatctgctccgtatttgcagggtgaagccttcgtgtctcctcgagggaaagtcactgacctttcttgggacgtggaccactgacggcccccgtcatcccccatgacggtgatcctagggtgaagccttcgtgtttcctcgagggaaatctaccagtgcgggattgatttagtcagcaccattggacacagggtttagttccattgcctggacccatcaatgaatcatggtgccaaggtcttgatggttcgacttcaaggtactgatattctccaggactattgttagcatcccttgtggtccatctgcattagcagtgaagaaagtcgcatggggacttgcttgatatgttgttattgctcagacatggctgagaaggaggaaacaaagggccgctgccctgcctgccacacacgttatgacaaggatatgatcgtcaagatggccgccacttgtgacaggacagtggcagataaaaatgcggagaagaagcaaaaggcccaaagggttaagccaaaggcagcaccaacagcaacaacaacatcaaccgtagaatctaagaagcatcttgctactatcagggttatccagagaaatctggtgtacataattgggctacctgcgcatttatgcaatgagagcgtacttgagcgtagggagtactttggtcattatgggaaagttttgaaggttttagtttcccgtccgactgggcctccctctcagcaggcatcagcaaacagcagtattagtgtgtatgtctctctgaattatacggtgtacatgcatgatctgttcatacttcatatgaatttagatttatactttcagtactggtcaattagcctgatggaatatcaaataactatctactgattctatgcaattgcatgtttcaagtttctaatgctgccttgtaatactggaacattggtattataagaaagtaaattcaaacttcaatattgttatgtggttttctattgaacctggtgaaaatgtgataattatgtccatatccttgcaagcagttcagtcatttaagtttaatctaggctacttagcagtgtgattttcctgtagcctcttgatttgcatagccgcacagcccgtgcttgaaagtaacatttttatcctcattgctgacattaggatatgtattgtattattggtgtgaaattcaaagaatcagatagatgcaagatatctgtttgtgggataggatcagaacccaatcctgtgtgtgcagatatagataaaaatcatcttttaatgaaatgtctatttttttctcggtttgagtactttatattgttctcctgggatgtgttttttttctttatgggtgatttctcttggaaatcctaggatagtgtttcgatgtattctgaaactttgttgtgccagaaacatgcattgttttatcattaaccagaattgagttagggattatcattaaggcattaaccaaaatggagttaggatgtctttttttgtagtgtagaaaacgttgtgtatactgaaatgtgcatgcttgcaacatgtctaatatagattatatttgagtggtatctttgttgaagaacatgtgaaattagagttctggtggtcttctagaacacacactgctcctcatctttactttctctacataattcttcaatatgttggtatgttcccgtgactccttggtttagctatccttatacatgcatgttgttacataaatcaattagtttttccctgaaggacaggcctggtgcagtggtgagaggcctttccactgagccaaagggcctgggtttgacgcagcctctgcgcaaaaatgagatatacgtggagcgtcagaattatatgtgcatctacaagaacagttacaacaattctccatcaggttgatgttcatacatctcagatataaatgtgggggagacggtgcctcatcaatgatgagtaggttgattctcatctagcggcaccattgctcactacaactggtttgcttgagcaacttaatgtcactctcaagaggaccctcctttcgaccgacaccctgaagcaccacacaagctttagaaaagtcggaattgtacttcgtatacataaattacatgatattatatgttcatgtaattctatgttgattctttagaaataatatatatgatattgtaatgtgtgttcgacatcaatttattttatttgagttcgccgtgcg

SEQ ID NO: 16569 - DNA, 2901 bp, Zea Mays
ccttgttctgcctccccgcgcatcggctgctgccgcgcacaaatccgccgcgccctcggtcccgcaaatccgccgtgccagctccgcccgctcgattcccctcctagcgcccgcattccccgccgccgtcctcgcggccgcagcgcccctggaccccacgccagcaacgcccgcagtccccgccgtggatctcgcccgaaggcgccgccatggacgccctagatctaccacctcctcctctccccatcactgcgccgcctgcccccgccgcacacctacagcgcgccccttcccccaccgtggatctcgcccatacgccagcggatctcgcactccttccttcgacggcgcggtggcgaggaggtcagcgacggcggcgtcgagtcgaggtcgggcacgaaggcgcggaggccgtgggagcggtcgtggcctacgcacgcacgacgccgctcccccagttcaaaccgaggttgaaaaaattgctaaactgtcatttgagaaaaatgaagtaaaaaaagcctgattatgttggagttgatgatgataagtcaaaggctactgttgaaggcctgcagcagggttattgtgtcatttctagcgataaaaggttcttggttctgtatgctttcctaagaaagagaagataatggtgttcttctcatcatgtaattcagtaaagttccacgttgaacttctgaatttctttaggatagagtgttttgatatccatggaaaacagaagcaactgaagcgaactactacattctttagcttttgcaaggcaggaaagggcatcttattgtgtactaatgtggctgcccgtggacttgatactcctgacgtgaaggaaggcagtgttcatgtctcatccagttcaaatgaagtgacaggaaccattccagagacgaatggaggcgatcatcatatacctggaagctcttttcatgtttagtgaaggtctatgacatgtctgatagtcaaatgaagctaaatgattttatttcaagccttgttcttgagaggatggtcaagattaatttgagtagggtgacttcataatggacgacgaggaagaagtggaaggagaggaagaggaacaaaagagtgatgaccagaagcgaagaaacaaaactaaaaagaaaaggaagaggtacctccctttgttcgtactaggaataaatgccaatgtactgtgtacacctatcctgaaatgaggatgactatatgttgctttaggataataacatcactgccatcactctcccaaagtcgctatgtttttctgtcatagtttgttgtcctgaccaaattttttaatttgttgtctatttctcttaggttgttctttcaataagctgtatctttctctcgtatgcaatgtaaatttcaggtatttgtgaaatatgagtgttgttttggtctcaaaataaatccacaaaagattttagcatctgtaagcactgttgcacattatccaattatatcagggtggtctagaactgttttgtgttgtttatttttagttgaggtgtgtatctttccccaccattgtatgttacaattttctaactacatctgttatgtttgggtgctcttgcattctcgcaaagtgctatagaggagcaacggtaccaggacgcgtcaaggttgacaaagctatctgggaccacttttgtaattgccaactcttcactgattattttcctatatgttgctccagaataaatggatcatagtgcggtggtcatgggattgggatctgctccgtatttgcagggtgaagccttcgtgtctcctcgagggaaagtcactgacctttcttgggacgtggaccactgacggcccccgtcatcccccatgacggtgatcctagggtgaagccttcgtgtttcctcgagggaaatctaccagtgcgggattgatttagtcagcaccattggacacagggtttagttccattgcctggacccatcaatgaatcatggtgccaaggtcttgatggttcgacttcaaggtactgatattctccaggactattgttagcatcccttgtggtccatctgcattagcagtgaagaaagtcgcatggggacttgcttgatatgttgttattgctcagacatggctgagaaggaggaaacaaagggccgctgccctgcctgccacacacgttatgacaaggatatgatcgtcaagatggccgccacttgtgacaggacagtggcagataaaaatgcggagaagaagcaaaaggcccaaagggttaagccaaaggcagcaccaacagcaacaacaacatcaaccgtagaatctaagaagcatcttgctactatcagggttatccagagaaatctggtgtacataattgggctacctgcgcatttatgcaatgagagcgtacttgagcgtagggagtactttggtcattatgggaaagttttgaaggttttagtttcccgtccgactgggcctccctctcagcaggcatcagcaaacagcagtattagtgtgagatatacgtggagcgtcagaattatatgtgcatctacaagaacagttacaacaattctccatcaggttgatgttcatacatctcagatataaatgtgggggagacggtgcctcatcaatgatgagtaggttgattctcatctagcggcaccattgctcactacaactggtttgcttgagcaacttaatgtcactctcaagaggaccctcctttcgaccgacaccctgaagcaccacacaagctttagaaaagtcggaattgtacttcgtatacataaattacatgatattatatgttcatgtaattctatgttgattctttagaaataatatatatgatattgtaatgtgtgttcgacatcaatttattttatttgagttcgccgtgcg

SEQ ID NO: 16570 - DNA, 1374 bp, Zea Mays
gccaaattgagatcacgtgagtttaggagcgaaatggacgaggctgttcctgctttggctaccggccaagcttcaaccgacgccgtgacagagcagcctgtgaatgtgtacatatgggacatggatgagacactcattttgctcaagtcacttctggatggctcatatgctggggcttttgatggcctcaaggatcatgagaaaagtactgaaataggaaagcgatgggagaacctcattcttgaactctgtgatgagcacttcttttatgaggagattgagaactacaatgaaccctatctcaatgccttgaatgaatatgacgatgggagagacttgacctcatatgattttgaggctgactgttttagttcaccatatgatgatgcgaacaaaaagaagcttgcttacaggcatcgtgctattggagagaaatatgcaaagggtttggaaaaggttctggacggacacatggtcaaagtctgcaatgatcagtacagtttgactgacaaatatactgatggctggctgtcttcagctcataagttactggaagaagcattgggcaaatcagcatcagcaccttcagccaactcttcaagcatcaactgcatagttacatcagggtcactgattccaagccttgccaaatgtttgctgtatcacctggatgatgtggtctcatctgagaacgtctacagctcatgggaagtgggtaagctgcagtgcttcaaatggatcaaggagcgcttcgacggtccaaacgtccgcttctgtgcaatcggtgatggccacgaggagtgcagtgctgcgcaggtcatgaaatggccattcatcaagatcgagttccgccctgaagcccatcacaggttccctggcctagacttgcccacagtgcagacctacatggatgtgatatacgagtcatcgagcaaagatggttgaccgacgattgatgtcgattctgttttctcctctgacctccaccacccatggagctattgtttgaggaaactgtaagcaaagagatgtcgtgggaaaggaacgtgtcgtcctccctagatctttcaccttggcgaattaggaggcaggtgtgataaataagagtcttgctagttcgtcgtcgtcgtccatgttgtcatagatcctgtcttgtgtgttcatgttactgtgatgcaggcaatggtgtgttgtgtccgggcgttatttcctgtgttgtgctttgccaatttgccagcttcagtttatgtgtatatgctttttaggctgtcttcggcagatcgtgtaaaataggggacgtgacagtgtagatgacaccgtttaacttgtttttaaaatgaagtttgaaatatacacacatcatagttcatcatc

SEQ ID NO: 16571 - DNA, 845 bp, Zea Mays
aatttagggggaaccgctgaagacagtctcagcagcagcagcagctgctgcctgctgctgtctagtccatcttcatcctccccatcgcccgactggatttctcccccgaattcgcacctcccccctcacttcgctgtgtctcatcaacgccggcatcaccgcgaggactgggccagctctccctccctttctcctccctccgccttcattgctgacggcgacgactgggcgagctctaccgccgctctgcgctaggtgcccaggtcttcctcgggcacttcaccggcgacgagcacccatcaggagcgaaatggacgaggctgttcctgctttggctaccggccaagcttcaaccgacgccgtgacagagcagcctgtgaatgtgtacatatgggacatggatgagacactcattttgctcaagtcacttctggatggctcatatgctggggcttttgatggcctcaaggatcatgagaaaagtactgaaataggaaagcgatgggagaacctcattcttgaactctgtgatgagcacttcttttatgaggagattgagaactacaatgaaccctatctcaatgccttgaatgaatatgacgatgggagagacttgacctcatatgattttgaggctgactgttttagttcaccatatgatgatgcgaacaaaaagaagcttgcttacaggcatcgtgctattggagagaaatatgcaaagggtttggaaaaggttctggacggacacatggtcaaagtctgcaatgatcagtacagtttgactgacaaatatactgatggctggctgtcttcagaaaagtattaggtctttaacttttgttgat

SEQ ID NO: 16572 - DNA, 713 bp, Zea Mays
cagcagcagcagctgctgcctgctgctgtctagtccatcttcatcctccccatcgcccgactggatttctcccccgaattcgcacctcccccctcacttcgctgtgtctcatcaacgccggcatcaccgcgaggactgggccagctctccctccctttctcctccctccgccttcattgctgacggcgacgactgggcgagctctaccgccgctctgcgctaggtgcccaggtcttcctcgggcacttcaccggcgacgagcacccatcaggagcgaaatggacgaggctgttcctgctttggctaccggccaagcttcaaccgacgccgtgacagagcagcctgtgaatgtgtacatatgggacatggatgagacactcattttgctcaagtcacttctggatggctcatatgctggggcttttgatggcctcaaggatcatgagaaaagtactgaaataggaaagcgatgggagaacctcattcttgaactctgtgatgagcacttcttttatgaggagattgagaactacaatgaaccctatctcaatgccttgaatgaatatgacgatgggagagacttgacctcatatgattttgaggctgactgttttagttcaccatatgatgatgcgaacaaaaagaagcttgcttacaggcatcgtgctattggagagaaatatgcaaagaagggcaggcctggtatagtggtg

SEQ ID NO: 16573 - DNA, 1778 bp, Zea Mays
aatccaaccacctagaccgctggacgccaccgccccgcccctcctcggcgccgccgctccatccaactgcctcaacgccaccatccatccaacctcctcggtgtctcctcctcactacgtggtcgtgatcaagatgccccctggaaggatggatagagaaaggacacgcaaagaccttggtgaggtgccaattactgagtatgaaaaggagagggctttaaatgtgatgaggaacaacaaaatgttgagtagccttggtataactggattaacatcagttattcgatcaagtagtacaaggaagaactctatcgctcgtgaagactttgatccattgtatgaacctgatcatagtgagaacaatgatcatcatgtggctgatcaggatgaacctttctacattgaaagaaggaacaccaacatgtctattggttttggaggaacaaaaggatccaagagagtggtagcacctaatgtagaagaccaagttggtagagtaactatccttagttgagaaagatatacatggttcgactgtaaatacagatgagcacacattgatttctgccaattttcctgcacaccatgatgacgagattaagatgtgtgatgaagggaatagacatcctgaggttcctatgcaagctgcaatgcttgcatcagaaggaggaattgtaattaggcaacatatgccgatcctaacacattggaaggaatacaagaatgacaaatcctatttggaagacttcgtcggtagaattggtgtaagtaaatagtctttcttcctaaacatcaaatgaatatggtggtagggcctatgtcatatattgccaatttattagtatatagttagcaggtgcactttgtctcataaattgctaaaagaactatggcagaaagaattacatatgtttctctcttccaaatgacaccttaccttataaattgttctatctaatttcattagacactatgaatctctctattctaatatgcatgttttttactagggtcaatttgccatagacaccaaaaacaaagatgtcaaatatgcatgtgctgatttgatgaggtgtaatcagcgacaaatgagttataagctcaagaaggcttactttaatggtgtggcagctgacaaagtgagaacaacatcaccgttgagcactatgatagatgagcaatggatgcaactagtgaatatgtggtctaccccaaagcacaaggacaaatgtgtgaacaacaaagtgattcgtggaaaagttcggttccagcaaaagacaggatctcggagttacattgcacatatgcatgccaaacaagccaaatatggagatgcaccaccaagtgcgattgatctttttaaagagtgccattgtagtaggaaaactggttttgttgagcctgtaaaggaagcaattgacacaatggaagcacttgtggttgagcctggagtagaagggaaagaatctaagacccctacagaagcagttgctcaagtgctgtcttcatcaaaaattcttcataatattggtcttgtacccgccacaaagaaaagttgcaatggtgatgatcctacacgtgtggcagaactcgaggctaaacttgaatcagagaagcaaaactcattagcagttagagctcagttagatgccctaaagaagaaggtagaagaatcagaagaagcaagggctaaggagttagaaaagattaatgatctgcaaaaaggagcagatgagaccaatgctgtccttcgtcgtctctttagcctcaataagtag

SEQ ID NO: 16574 - DNA, 1472 bp, Zea Mays
cccatcttcctcgcctcaactccgccacccaatccaaccacctagaccgctggacgccaccgccccgcccctcctcggcgccgccgctccatccaactgcctcaacgccaccatccatccaacctcctcggtgtctcctcctcactacgtggtcgtgatcaagatgccccctggaaggatggatagagaaaggacacgcaaagaccttggtgaggtgccaattactgagtatgaaaaggagagggctttaaatgtgatgaggaacaacaaaatgttgagtagccttggtataactggattaacatcagttattcgatcaagtagtacaaggaagaactctatcgctcgtgaagactttgatccattgtatgaacctgatcatagtgagaacaatgatcatcatgtggctgatcaggatgaacctttctacattgaaagaaggaacaccaacatgtctattggttttggaggaacaaaaggatccaagagagtggtagcacctaatgtagaagaccaagttggtagagtaactatccttagttgagaaagatatacatggttcgactgtaaatacagatgagcacacattgatttctgccaattttcctgcacaccatgatgacgagattaagatgtgtgatgaagggaatagacatcctgaggttcctatgcaagctgcaatgcttgcatcagaaggaggaattgtaattaggcaacatatgccgatcctaacacattggaaggaatacaagaatgacaaatcctatttggaagacttcgtcggtagaattggtggtcaatttgccatagacaccaaaaacaaagatgtcaaatatgcatgtgctgatttgatgaggtgtaatcagcgacaaatgagttataagctcaagaaggcttactttaatggtgtggcagctgacaaagtgagaacaacatcaccgttgagcactatgatagatgagcaatggatgcaactagtgaatatgtggtctaccccaaagcacaagaaacaagccaaatatggagatgcaccaccaagtgcgattgatctttttaaagagtgccattgtagtaggaaaactggttttgttgagcctgtaaaggaagcaattgacacaatggaagcacttgtggttgagcctggagtagaagggaaagaatctaagacccctacagaagcagttgctcaagtgctgtcttcatcaaaaattcttcataatattggtcttgtacccgccacaaagaaaagttgcaatggtgatgatcctacacgtgtggcagaactcgaggctaaacttgaatcagagaagcaaaactcattagcagttagagctcagttagatgccctaaagaagaaggtagaagaatcagaagaagcaagggctaaggagttagaaaagattaatgatctgcaaaaaggagcagatgagaccaatgctgtccttcgtcgtctctttagcctcaataagtag

SEQ ID NO: 16575 - DNA, 1808 bp, Zea Mays
cttgcatcaacgccaccacccaatccaaccgtctggaccgctggacgccactgccccgcccctcctcggcgccgccgctcctacgctaccccacgaccccacaccacgcccatcttcctcgcctcaactccgccacccaatccaaccacctagaccgctggacgccaccgccccgcccctcctcggcgccgccgctccatccaactgcctcaacgccaccatccatccaacctcctcggtgtctcctcctcactacgtggtcgtgatcaagatgccccctggaaggatggatagagaaaggacacgcaaagaccttggtgaggtgccaattactgagtatgaaaaggagagggctttaaatgtgatgaggaacaacaaaatgttgagtagccttggtataactggattaacatcagttattcgatcaagtagtacaaggaagaactctatcgctcgtgaagactttgatccattgtatgaacctgatcatagtgagaacaatgatcatcatgtggctgatcaggatgaacctttctacattgaaagaaggaacaccaacatgtctattggttttggaggaacaaaaggatccaagagagtggtagcacctaatgtagaagaccaagttggtagagtaactatccttagttgagaaagatatacatggttcgactgtaaatacagatgagcacacattgatttctgccaattttcctgcacaccatgatgacgagattaagatgtgtgatgaagggaatagacatcctgaggttcctatgcaagctgcaatgcttgcatcagaaggaggaattgtaattaggcaacatatgccgatcctaacacattggaaggaatacaagaatgacaaatcctatttggaagacttcgtcggtagaattggtggtcaatttgccatagacaccaaaaacaaagatgtcaaatatgcatgtgctgatttgatgaggtgtaatcagcgacaaatgagttataagctcaagaaggcttactttaatggtgtggcagctgacaaagtgagaacaacatcaccgttgagcactatgatagatgagcaatggatgcaactagtgaatatgtggtctaccccaaagcacaaggaacataccttgttgtgctgttcaaaggaacacgcagtaacatacctagtattccaacaaaacataccttcttcaaaggaacaagctggaacataatttaatctatgtttctagttttacaagataatagttttataggacaaatgtgtgaacaacaaagtgattcgtggaaaagttcggttccagcaaaagacaggatctcggagttacattgcacatatgcatgccaaacaagccaaatatggagatgcaccaccaagtgcgattgatctttttaaagagtgccattgtagtaggaaaactggttttgttgagcctgtaaaggaagcaattgacacaatggaagcacttgtggttgagcctggagtagaagggaaagaatctaagacccctacagaagcagttgctcaagtgctgtcttcatcaaaaattcttcataatattggtcttgtacccgccacaaagaaaagttgcaatggtgatgatcctacacgtgtggcagaactcgaggctaaacttgaatcagagaagcaaaactcattagcagttagagctcagttagatgccctaaagaagaaggtagaagaatcagaagaagcaagggctaaggagttagaaaagattaatgatctgcaaaaaggagcagatgagaccaatgctgtccttcgtcgtctctttagcctcaataagtag

SEQ ID NO: 16576 - DNA, 2330 bp, Zea Mays
cacaaccccacaccacgcccatctttcttgcatcaacgccaccacccaatccaaccgtctggaccgctggacgccactgccccgcccctcctcggcgccgccgctcctacgctaccccacgaccccacaccacgcccatcttcctcgcctcaactccgccacccaatccaaccacctagaccgctggacgccaccgccccgcccctcctcggcgccgccgctccatccaactgcctcaacgccaccatccatccaacctcctcggtgtctcctcctcactacgtggtcgtgatcaagatgccccctggaaggatggatagagaaaggacacgcaaagaccttggtgaggtgccaattactgagtatgaaaaggagagggctttaaatgtgatgaggaacaacaaaatgttgagtagccttggtataactggattaacatcagttattcgatcaagtagtacaaggaagaactctatcgctcgtgaagactttgatccattgtatgaacctgatcatagtgagaacaatgatcatcatgtggctgatcaggatgaacctttctacattgaaagaaggaacaccaacatgtctattggttttggaggaacaaaaggatccaagagagtggtagcacctaatgtagaagaccaagttggtagagtaactatccttagttgagaaagatatacatggttcgactgtaaatacagatgagcacacattgatttctgccaattttcctgcacaccatgatgacgagattaagatgtgtgatgaagggaatagacatcctgaggttcctatgcaagctgcaatgcttgcatcagaaggaggaattgtaattaggcaacatatgccgatcctaacacattggaaggaatacaagaatgacaaatcctatttggaagacttcgtcggtagaattggtggtcaatttgccatagacaccaaaaacaaagatgtcaaatatgcatgtgctgatttgatgaggtgtaatcagcgacaaatgagttataagctcaagaaggcttactttaatggtgtggcagctgacaaagtgagaacaacatcaccgttgagcactatgatagatgagcaatggatgcaactagtgaatatgtggtctaccccaaagcacaaggtatagaattactagttgcaatttgtgttttctactattgtcaacatgacattagacataaactatcttatgctttgagctatttccacttgtggtttgtacttaaatcaaaagattttgattttgattataatacccactttagaggataaattgttggatactattgttttctcaaaaaaatactggttttctcaagcatgtaggagtggtatgtgtctttaagttaaaaagagaaaactggtctgaaacacacacaaaataaataatataaacacttttttagttgctgtttgaacacaagggtgtatcctttacaactgtttgggtcattttcatgactcacttattagcttaacctccatatgcgaagctaaaaagaaagcaagtttggactgctctagtgtagacttaaaattccaaggcatatgaggttagaaacgtgtgtggtgccattgtttcttgagctacattttttgttcaaatgaatatgcaggaacataccttgttgtgctgttcaaaggaacacgcagtaacatacctagtattccaacaaaacataccttcttcaaaggaacaagctggaacataatttaatctatgtttctagttttacaagataatagttttataggacaaatgtgtgaacaacaaagtgattcgtggaaaagttcggttccagcaaaagacaggatctcggagttacattgcacatatgcatgccaaacaagccaaatatggagatgcaccaccaagtgcgattgatctttttaaagagtgccattgtagtaggaaaactggttttgttgagcctgtaaaggaagcaattgacacaatggaagcacttgtggttgagcctggagtagaagggaaagaatctaagacccctacagaagcagttgctcaagtgctgtcttcatcaaaaattcttcataatattggtcttgtacccgccacaaagaaaagttgcaatggtgatgatcctacacgtgtggcagaactcgaggctaaacttgaatcagagaagcaaaactcattagcagttagagctcagttagatgccctaaagaagaaggtagaagaatcagaagaagcaagggctaaggagttagaaaagattaatgatctgcaaaaaggagcagatgagaccaatgctgtccttcgtcgtctctttagcctcaataagtag

SEQ ID NO: 16577 - DNA, 1891 bp, Zea Mays
ctaatgtttctcttcctagccggatgcctcgacataggttgttgcgccaccccgaattctcagctggaggctgttaaggccgtgtccgtccataaaactgtggccgcgaagatcgcctcgcccttccgtgcatcggaatcaagctgtagcgccgggagttgcaagcgaaatcaagggagagagagagcaccgagcacagagatccgtcgcgtgaaagcctcgtttcgccatcgaccgagccctcggggttattccttggggcttctccaggctagaaggagcatggtcgaagctgcaccgctcgggattcatcaccagcaccttaagaattgctcaccgtcgacgatagcttgatgcggaccgcaagtccccgcggccagggctgcccacgctactatcctcgaggtgccaattactgagtatgaaaaggagagggctttaaatgtgatgaggaacaacaaaatgttgagtagccttggtataactggattaacatcagttattcgatcaagtagtacaaggaagaactctatcgctcgtgaagactttgatccattgtatgaacctgatcatagtgagaacaatgatcatcatgtggctgatcaggatgaacctttctacattgaaagaaggaacaccaacatgtctattggttttggaggaacaaaaggatccaagagagtggtagcacctaatgtagaagaccaagttggtagagtaactatccttagttgagaaagatatacatggttcgactgtaaatacagatgagcacacattgatttctgccaattttcctgcacaccatgatgacgagattaagatgtgtgatgaagggaatagacatcctgaggttcctatgcaagctgcaatgcttgcatcagaaggaggaattgtaattaggcaacatatgccgatcctaacacattggaaggaatacaagaatgacaaatcctatttggaagacttcgtcggtagaattggtggtcaatttgccatagacaccaaaaacaaagatgtcaaatatgcatgtgctgatttgatgaggtgtaatcagcgacaaatgagttataagctcaagaaggcttactttaatggtgtggcagctgacaaagtgagaacaacatcaccgttgagcactatgatagatgagcaatggatgcaactagtgaatatgtggtctaccccaaagcacaaggaacataccttgttgtgctgttcaaaggaacacgcagtaacatacctagtattccaacaaaacataccttcttcaaaggaacaagctggaacataatttaatctatgtttctagttttacaagataatagttttataggacaaatgtgtgaacaacaaagtgattcgtggaaaagttcggttccagcaaaagacaggatctcggagttacattgcacatatgcatgccaaacaagccaaatatggagatgcaccaccaagtgcgattgatctttttaaagagtgccattgtagtaggaaaactggttttgttgagcctgtaaaggaagcaattgacacaatggaagcacttgtggttgagcctggagtagaagggaaagaatctaagacccctacagaagcagttgctcaagtgctgtcttcatcaaaaattcttcataatattggtcttgtacccgccacaaagaaaagttgcaatggtgatgatcctacacgtgtggcagaactcgaggctaaacttgaatcagagaagcaaaactcattagcagttagagctcagttagatgccctaaagaagaaggtagaagaatcagaagaagcaagggctaaggagttagaaaagattaatgatctgcaaaaaggagcagatgagaccaatgctgtccttcgtcgtctctttagcctcaataagtag

SEQ ID NO: 16578 - DNA, 832 bp, Zea Mays
cttgcatcaacgccaccacccaatccaaccgtctggaccgctggacgccactgccccgcccctcctcggcgccgccgctcctacgctaccccacgaccccacaccacgcccatcttcctcgcctcaactccgccacccaatccaaccacctagaccgctggacgccaccgccccgcccctcctcggcgccgccgctccatccaactgcctcaacgccaccatccatccaacctcctcggtgtctcctcctcactacgtggtcgtgatcaagatgccccctggaaggatggatagagaaaggacacgcaaagaccttggtgaggtgccaattactgagtatgaaaaggagagggctttaaatgtgatgaggaacaacaaaatgttgagtagccttggtataactggattaacatcagttattcgatcaagtagtacaaggaagaactctatcgctcgtgaagactttgatccattgtatgaacctgatcatagtgagaacaatgatcatcatgtggctgatcaggatgaacctttctacattgaaagaaggaacaccaacatgtctattggttttggaggaacaaaaggatccaagagagtggtagcacctaatgtagaagaccaagttggtagagtaactatccttagttgagaaagatatacatggttcgactgtaaatacagatgagcacacattgatttctgccaattttcctgcacaccatgatgacgagattaagatgtgtgatgaaggtcaaatagatgtcatgacagataaatggataaggggaaaaagtatgggcagacaattggaaaggataagtcaaggctt

SEQ ID NO: 16579 - DNA, 3102 bp, Zea Mays
ctcccatcgccagggcgtcggagcgagctcattctcaactcgactcaagagctctgcctcctccatcttcccttctctggcctccggagccacgctgatcagagatggaggcgaatccgaagaacaccttcacgatcaaagtggaggacgggaagcccgggaaggacggccggctggcggtcggaccggtgttccggagcgttctggccaaggatgggttcccgcagcttgagcctgacatgaagacatcatgggacgtgttcagggtagcagcagtcaagtatgccgacaaccggatgctcggatggcgtccgttcaaagatggagtgccagggccctacttgtggaaatcatacaaggagatctacgacgaggtgctgcaagcaggctctgcgttgcagaagctgggagtgcagccaggttcccgggtggggatctacggagcgaactgtcctcagtggatagtggcaatgcaggcttgcaatggctatagtctagtctgtgtcccactgtacgatactttaggtgcgggagctgtcgactacatcatcgatcatgccgagatcgatgttgtcttcatacaggacaagaaaataaaagagatactgtccccaaactgcaagtctgccaagagactgaaagcattggtggcgttcacttcggcgacaactgaacagaacaaagaagcggatcaaattgggatcaaaatgtatgcctgggacgatttcttgaaagtggggaaggataatcctcgtcaaccttgccctccgcaagcaagtgacatctgcactgtcatgtacacgagtgggacaagcggacagcccaaaggtgtgatgctgacccatgaaagccacgccatgtatgtgaaaggggtggacctcttcatggaccagtttgatgataagatgacaacagatgatgtcttcctgtcgtttctcccgcttgctcacatccttgaccgcatgatcgaagagtatttctttcacaaaggggcctcaattggctactaccacggagatctgaatgccttgagggacgacattgtggagctgaagccgactctactggttggggtgccccgagtgtacgaaaggatttatgaaggtatcttgaaggccattgcggaactcagacctctaagaagggtcatctttaatgctttgtacaaccgcaaactggcaagcatgaaagcaggctactcgcacaaaaccgcttcacctttcgcggacatgctggcttttcgcaaggtcaaggcaaggcttggaggtcgtcttcgcttactgatttcaggaggggctccgttgagtaatgagatcgaggagttcatgagagtgaccacctgtgcatacttcatccaaggctatggtttaacagaaacactgggacctagcactgtctgctacatcgacgacatggccctggtcggaagcgctggtgtgcctgccacctacaccgaaattcggctggaagaagtgcccgagatgggttataatccactcggcgttccttcgcgtggtgaaatctgcatccggggaaaatccctcttcgctgggtactacaaaagtccagaactcacaaacgaagccatcgttgatgggtggtttcatacaggtgacattggagagatgaccccagacgggatcttgaaggtgattgacagaaaaaagaacatatttaagctgtcgcaaggggagtatgttgcggttgagtacctggagaaagtttatggcttccctccactcgttgaagatatctgggtatacggggacagtttcagatcaagtttagttgcagtagtcaatccacaccaagaaaacacaatgaagtgggcagagtccaatggctacaagggttcttttgatgaaatctgcaaacttgaaggactcaaagagtacatcctgaaagagctggcagccgttgcgcagaagaacaaggtacggtcatctatttactctgacagacccaaaaaaaaaacctcttcaccttaaagtatcgtaatgtagtattgaatgtagcttgtttctgttttgtacaagaaacaggaagagaaaacatcttagttctgtagactccttgtgtttcaaactttcactgtatttcagatctatagttttatatatggtaacccttattgcatgccgcaaatcagctacgaggcttcgagtacatcaaaggcgtagtgttggatcctgtgccttttgacatcgagagggatttggtgactgcaacaatgaagaagaagagaaagaatatgctgaactattaccagtctgagattgacacaatatacaaaaagctggaggcgcagaagagtgctgccagagctaagtgaagagatgtgccctattcgaccatcagctgaaaacaagggaaacgacaccgttgtaaatttcacattaatattgcgaagtaacaactcagggctatgagtaaggaataaaatgtatattgtgcctttgtctatagtaccggatgattcccaaatcccaactagagttgagaagagtgaaggccgtcaccaacaagatggcaatctggaccgaacctcacccgctcacccccactactgttcaaaagcatagcatcctaactgaagggggtgtctggatatcgccactaaattttaatccctactgtggatgctagttagaaatattaaataatctaattatacagacgaagacgggaactaaaggacaagatgaacctattaaactcaattagtctatagattgctcatgcgtggtgctatgacaagtatttgccgattatggattaattagaattaataaatttatctcacaatttaatctttatctatacaattagttttgtaattgaagtatatttaatacatgtgactggcattcaaatatttgatgtaacacataccaacatttagttaggtgaaccaaaacacctcatgagtgcctaagcactatgcgtcagcctagatccatcattttcttacttctctcttttttgtttggtttgtagaatgtaatgagttgattcatcatcaccttattgctcatagttagttagtattaacataaaaaattagactatttcaccaaatttaaaaaataaattttatcaaac

SEQ ID NO: 16580 - DNA, 2888 bp, Zea Mays
cctcccatcgccagggcgtcggagcgagctcattctcaactcgactcaagagctctgcctcctccatcttcccttctctggcctccggagccacgctgatcagagatggaggcgaatccgaagaacaccttcacgatcaaagtggaggacgggaagcccgggaaggacggccggctggcggtcggaccggtgttccggagcgttctggccaaggatgggttcccgcagcttgagcctgacatgaagacatcatgggacgtgttcagggtagcagcagtcaagtatgccgacaaccggatgctcggatggcgtccgttcaaagatggagtgccagggccctacttgtggaaatcatacaaggagatctacgacgaggtgctgcaagcaggctctgcgttgcagaagctgggagtgcagccaggttcccgggtggggatctacggagcgaactgtcctcagtggatagtggcaatgcaggcttgcaatggctatagtctagtctgtgtcccactgtacgatactttaggtgcgggagctgtcgactacatcatcgatcatgccgagatcgatgttgtcttcatacaggacaagaaaataaaagagatactgtccccaaactgcaagtctgccaagagactgaaagcattggtggcgttcacttcggcgacaactgaacagaacaaagaagcggatcaaattgggatcaaaatgtatgcctgggacgatttcttgaaagtggggaaggataatcctcgtcaaccttgccctccgcaagcaagtgacatctgcactgtcatgtacacgagtgggacaagcggacagcccaaaggtgtgatgctgacccatgaaagccacgccatgtatgtgaaaggggtggacctcttcatggaccagtttgatgataagatgacaacagatgatgtcttcctgtcgtttctcccgcttgctcacatccttgaccgcatgatcgaagagtatttctttcacaaaggggcctcaattggctactaccacggagatctgaatgccttgagggacgacattgtggagctgaagccgactctactggttggggtgccccgagtgtacgaaaggatttatgaaggtatcttgaaggccattgcggaactcagacctctaagaagggtcatctttaatgctttgtacaaccgcaaactggcaagcatgaaagcaggctactcgcacaaaaccgcttcacctttcgcggacatgctggcttttcgcaaggtcaaggcaaggcttggaggtcgtcttcgcttactgatttcaggaggggctccgttgagtaatgagatcgaggagttcatgagagtgaccacctgtgcatacttcatccaaggctatggtttaacagaaacactgggacctagcactgtctgctacatcgacgacatggccctggtcggaagcgctggtgtgcctgccacctacaccgaaattcggctggaagaagtgcccgagatgggttataatccactcggcgttccttcgcgtggtgaaatctgcatccggggaaaatccctcttcgctgggtactacaaaagtccagaactcacaaacgaagccatcgttgatgggtggtttcatacaggtgacattggagagatgaccccagacgggatcttgaaggtgattgacagaaaaaagaacatatttaagctgtcgcaaggggagtatgttgcggttgagtacctggagaaagtttatggcttccctccactcgttgaagatatctgggtatacggggacagtttcagatcaagtttagttgcagtagtcaatccacaccaagaaaacacaatgaagtgggcagagtccaatggctacaagggttcttttgatgaaatctgcaaacttgaaggactcaaagagtacatcctgaaagagctggcagccgttgcgcagaagaacaagctacgaggcttcgagtacatcaaaggcgtagtgttggatcctgtgccttttgacatcgagagggatttggtgactgcaacaatgaagaagaagagaaagaatatgctgaactattaccagtctgagattgacacaatatacaaaaagctggaggcgcagaagagtgctgccagagctaagtgaagagatgtgccctattcgaccatcagctgaaaacaagggaaacgacaccgttgtaaatttcacattaatattgcgaagtaacaactcagggctatgagtaaggaataaaatgtatattgtgcctttgtctatagtaccggatgattcccaaatcccaactagagttgagaagagtgaaggccgtcaccaacaagatggcaatctggaccgaacctcacccgctcacccccactactgttcaaaagcatagcatcctaactgaagggggtgtctggatatcgccactaaattttaatccctactgtggatgctagttagaaatattaaataatctaattatacagacgaagacgggaactaaaggacaagatgaacctattaaactcaattagtctatagattgctcatgcgtggtgctatgacaagtatttgccgattatggattaattagaattaataaatttatctcacaatttaatctttatctatacaattagttttgtaattgaagtatatttaatacatgtgactggcattcaaatatttgatgtaacacataccaacatttagttaggtgaaccaaaacacctcatgagtgcctaagcactatgcgtcagcctagatccatcattttcttacttctctcttttttgtttggtttgtagaatgtaatgagttgattcatcatcaccttattgctcatagttagttagtattaacataaaaaattagactatttcaccaaatttaaaaaataaattttatcaaac

SEQ ID NO: 16581 - DNA, 3149 bp, Zea Mays
caacacttctcctccatccgcacacaacctctcttcgccatggcacccttgccctcggcataccgcatatatagggaaggaagaggcctctcttctccctcccatcgccagggcgtcggagcgagctcattctcaactcgactcaagagctctgcctcctccatcttcccttctctttctggacgttcagggcctccggagccacgctgatcagagatggaggcgaatccgaagaacaccttcacgatcaaagtggaggacgggaagcccgggaaggacggccggctggcggtcggaccggtgttccggagcgttctggccaaggatgggttcccgcagcttgagcctgacatgaagacatcatgggacgtgttcagggtagcagcagtcaagtatgccgacaaccggatgctcggatggcgtccgttcaaagatggagtgccagggccctacttgtggaaatcatacaaggagatctacgacgaggtgctgcaagcaggctctgcgttgcagaagctgggagtgcagccaggttcccgggtggggatctacggagcgaactgtcctcagtggatagtggcaatgcaggcttgcaatggctatagtctagtctgtgtcccactgtacgatactttaggtgcgggagctgtcgactacatcatcgatcatgccgagatcgatgttgtcttcatacaggacaagaaaataaaagagatactgtccccaaactgcaagtctgccaagagactgaaagcattggtggcgttcacttcggcgacaactgaacagaacaaagaagcggatcaaattgggatcaaaatgtatgcctgggacgatttcttgaaagtggtaggcgcattggttgttggtcgtttacagttcaacctactgacaaacatctagacaaacctattcaggtttcagagtcagttttgtagcgatgtaatgtttacgatggttatatttgtaaccaagtgatgctttggaactgggtttcaggggaaggataatcctcgtcaaccttgccctccgcaagcaagtgacatctgcactgtcatgtacacgagtgggacaagcggacagcccaaaggtgtgatgctgacccatgaaagccacgccatgtatgtgaaaggggtggacctcttcatggaccagtttgatgataagatgacaacagatgatgtcttcctgtcgtttctcccgcttgctcacatccttgaccgcatgatcgaagagtatttctttcacaaaggggcctcaattggctactaccacggagatctgaatgccttgagggacgacattgtggagctgaagccgactctactggttggggtgccccgagtgtacgaaaggatttatgaaggtatcttgaaggccattgcggaactcagacctctaagaagggtcatctttaatgctttgtacaaccgcaaactggcaagcatgaaagcaggctactcgcacaaaaccgcttcacctttcgcggacatgctggcttttcgcaaggtcaaggcaaggcttggaggtcgtcttcgcttactgatttcaggaggggctccgttgagtaatgagatcgaggagttcatgagagtgaccacctgtgcatacttcatccaaggctatggtttaacagaaacactgggacctagcactgtctgctacatcgacgacatggccctggtcggaagcgctggtgtgcctgccacctacaccgaaattcggctggaagaagtgcccgagatgggttataatccactcggcgttccttcgcgtggtgaaatctgcatccggggaaaatccctcttcgctgggtactacaaaagtccagaactcacaaacgaagccatcgttgatgggtggtttcatacaggtgacattggagagatgaccccagacgggatcttgaaggtgattgacagaaaaaagaacatatttaagctgtcgcaaggggagtatgttgcggttgagtacctggagaaagtttatggcttccctccactcgttgaagatatctgggtatacggggacagtttcagatcaagtttagttgcagtagtcaatccacaccaagaaaacacaatgaagtgggcagagtccaatggctacaagggttcttttgatgaaatctgcaaacttgaaggactcaaagagtacatcctgaaagagctggcagccgttgcgcagaagaacaagctacgaggcttcgagtacatcaaaggcgtagtgttggatcctgtgccttttgacatcgagagggatttggtgactgcaacaatgaagaagaagagaaagaatatgctgaactattaccagtctgagattgacacaatatacaaaaagctggaggcgcagaagagtgctgccagagctaagtgaagagatgtgccctattcgaccatcagctgaaaacaagggaaacgacaccgttgtaaatttcacattaatattgcgaagtaacaactcagggctatgagtaaggaataaaatgtatattgtgcctttgtctatagtaccggatgattcccaaatcccaactagagttgagaagagtgaaggccgtcaccaacaagatggcaatctggaccgaacctcacccgctcacccccactactgttcaaaagcatagcatcctaactgaagggggtgtctggatatcgccactaaattttaatccctactgtggatgctagttagaaatattaaataatctaattatacagacgaagacgggaactaaaggacaagatgaacctattaaactcaattagtctatagattgctcatgcgtggtgctatgacaagtatttgccgattatggattaattagaattaataaatttatctcacaatttaatctttatctatacaattagttttgtaattgaagtatatttaatacatgtgactggcattcaaatatttgatgtaacacataccaacatttagttaggtgaaccaaaacacctcatgagtgcctaagcactatgcgtcagcctagatccatcattttcttacttctctcttttttgtttggtttgtagaatgtaatgagttgattcatcatcaccttattgctcatagttagttagtattaacataaaaaattagactatttcaccaaatttaaaaaataaattttatcaaac

SEQ ID NO: 16582 - DNA, 2794 bp, Zea Mays
ctaccctcaccctcctcctcttcctccctctgcccatggaggcgaatccgaagaacaccttcacgatcaaagtggaggacgggaagcccgggaaggacggccggctggcggtcggaccggtgttccggagcgttctggccaaggatgggttcccgcagcttgagcctgacatgaagacatcatgggacgtgttcagggtagcagcagtcaagtatgccgacaaccggatgctcggatggcgtccgttcaaagatggagtgccagggccctacttgtggaaatcatacaaggagatctacgacgaggtgctgcaagcaggctctgcgttgcagaagctgggagtgcagccaggttcccgggtggggatctacggagcgaactgtcctcagtggatagtggcaatgcaggcttgcaatggctatagtctagtctgtgtcccactgtacgatactttaggtgcgggagctgtcgactacatcatcgatcatgccgagatcgatgttgtcttcatacaggacaagaaaataaaagagatactgtccccaaactgcaagtctgccaagagactgaaagcattggtggcgttcacttcggcgacaactgaacagaacaaagaagcggatcaaattgggatcaaaatgtatgcctgggacgatttcttgaaagtggggaaggataatcctcgtcaaccttgccctccgcaagcaagtgacatctgcactgtcatgtacacgagtgggacaagcggacagcccaaaggtgtgatgctgacccatgaaagccacgccatgtatgtgaaaggggtggacctcttcatggaccagtttgatgataagatgacaacagatgatgtcttcctgtcgtttctcccgcttgctcacatccttgaccgcatgatcgaagagtatttctttcacaaaggggcctcaattggctactaccacggagatctgaatgccttgagggacgacattgtggagctgaagccgactctactggttggggtgccccgagtgtacgaaaggatttatgaaggtatcttgaaggccattgcggaactcagacctctaagaagggtcatctttaatgctttgtacaaccgcaaactggcaagcatgaaagcaggctactcgcacaaaaccgcttcacctttcgcggacatgctggcttttcgcaaggtcaaggcaaggcttggaggtcgtcttcgcttactgatttcaggaggggctccgttgagtaatgagatcgaggagttcatgagagtgaccacctgtgcatacttcatccaaggctatggtttaacagaaacactgggacctagcactgtctgctacatcgacgacatggccctggtcggaagcgctggtgtgcctgccacctacaccgaaattcggctggaagaagtgcccgagatgggttataatccactcggcgttccttcgcgtggtgaaatctgcatccggggaaaatccctcttcgctgggtactacaaaagtccagaactcacaaacgaagccatcgttgatgggtggtttcatacagacgggatcttgaaggtgattgacagaaaaaagaacatatttaagctgtcgcaaggggagtatgttgcggttgagtacctggagaaagtttatggcttccctccactcgttgaagatatctgggtatacggggacagtttcagatcaagtttagttgcagtagtcaatccacaccaagaaaacacaatgaagtgggcagagtccaatggctacaagggttcttttgatgaaatctgcaaacttgaaggactcaaagagtacatcctgaaagagctggcagccgttgcgcagaagaacaagctacgaggcttcgagtacatcaaaggcgtagtgttggatcctgtgccttttgacatcgagagggatttggtgactgcaacaatgaagaagaagagaaagaatatgctgaactattaccagtctgagattgacacaatatacaaaaagctggaggcgcagaagagtgctgccagagctaagtgaagagatgtgccctattcgaccatcagctgaaaacaagggaaacgacaccgttgtaaatttcacattaatattgcgaagtaacaactcagggctatgagtaaggaataaaatgtatattgtgcctttgtctatagtaccggatgattcccaaatcccaactagagttgagaagagtgaaggccgtcaccaacaagatggcaatctggaccgaacctcacccgctcacccccactactgttcaaaagcatagcatcctaactgaagggggtgtctggatatcgccactaaattttaatccctactgtggatgctagttagaaatattaaataatctaattatacagacgaagacgggaactaaaggacaagatgaacctattaaactcaattagtctatagattgctcatgcgtggtgctatgacaagtatttgccgattatggattaattagaattaataaatttatctcacaatttaatctttatctatacaattagttttgtaattgaagtatatttaatacatgtgactggcattcaaatatttgatgtaacacataccaacatttagttaggtgaaccaaaacacctcatgagtgcctaagcactatgcgtcagcctagatccatcattttcttacttctctcttttttgtttggtttgtagaatgtaatgagttgattcatcatcaccttattgctcatagttagttagtattaacataaaaaattagactatttcaccaaatttaaaaaataaattttatcaaac

SEQ ID NO: 16583 - DNA, 1209 bp, Zea Mays
gcgttattaacgtgtcttccttctctctccggcgtcgcgtcgcgtccctccttcctccctctccatttccgccaccaccccccctctctctctctcttcttcttcttcaatcctccctccccgcgccggagttggaggagggagaggggacaagctttccggcgccgacgccgacgcggacccggcgccgacacgatccggtggatcaagtgcatcacacctttagggaggccccttggacagcagtttgtgctgcaaattctatatagctctgtcgcagcatggcctcggtgggcgtggcacgctcttctttgggatttcagaatggcacaagttctagcagtgacccagatcgtcttcccaacgagttgggcagtatgagcataagggacgacaaggacgttgaagatattgtagtcaatggcaatggggcggagcctggtcatatcatagtgaccagcattgatgggagaaatgggcaggcaaagcagaccattagttacatggctgagcgggtggtaggtcatgggtccttcggaaccgttttccaggccaagtgtcttgaaactggtgagaccgtagctataaaaaaggttcttcaagacaagagatacaagaatcgtgagctgcaaaccatgcgagtgcttgaccacccaaatgtggtggctctaaagcactgtttcttctcaaagactgagaaagaggagctttacctcaatttggtgcttgagtatgtaccggagactgctcatcgtgtcatcaaacattacaacaagatgaaccagcgcatgcctttgatttatgcaaaactgtatatgtatcagatttgtagagccttggcatacattcacaacagcattggagtgtgccacagggacattaagccgcaaaatctcctggtactacagagctccagagctcatatttggtgctactgaatacacaacagccattgatgtttggtctgctggctgtgtgctcgctgagctgcttctaggacagcctctgttccctggagaaagcggtgttgatcagcttgttgaaatcatcaaggttctgggcacacccacacgtgaagaaattaagtgcatgaatccaaattataccgagtttaaattcccgcaaatcaaagctcacccatggcataagatattccgtttaaagatgcctgctgaagcggtagatctcgtgtccaggcttctacgaatc

SEQ ID NO: 16584 - DNA, 1726 bp, Zea Mays
ccgcggacggtggcctcggcggtgctccgcatccagatggcgctcctggacggcgcagcggcgtgcaacgaggctgtcctccacgcgtccgcgctcctctcccgcgccgactacgacgacgtcgtcaccgagcgcaccatcgcggacgcctgcggcaacccggcgcgcgccagccctctcctgcctccgccgccgcggggccccgcttccgcatcgccctcagcgagcaccgcgtctacgacctcgaggaggcgcgcagcttctgctccggccgctgcctcgtcgcctccaaggccctacggtgtcccgccagaccgcctcgctgcgctcgtcgagggctccgccgccggggacgggttagggtttgagggcgtggatgggaatggaaagatggagggcgagggaaggaaggttgaggtaaaggagatggaggtcgccggggctggggggtctcgctgcagtactggatggggcccttctatgccattgacattgagggttatgtgccacgccgtgaccgcattgcccaggggcaaaagccacaagctaagcagaacaaagttgctggatctgagcagtccagaaccgagaatgtggattatagggcttgtgctcctagtgaagatggcatgacaagttcaccttcattggttgaagcacacgcaagctcagaagtaatagctgagggaatggacggcctggttcttggtaagagtacaaggacacctggaaggaagaaaactaaaaccccatcaaagatgttggagcaagaggaagataacagtatgctgtcatcttgcatatgtgattccattgccaagcagctcgaggatgtagttttcgaagagagaaaaggcagtcagaaaattaaagtgagtagagcatcatcaagagcacagaagggtaagtctagaaccatgcctgctgaaagtgatggtcgtgaggtggactttacgagtaccatcattattggggatgcttcgacaaacttggaggaaagcggtatgaatcagtataactacttgtcaagttctgtattggtagacaatcatccctcatcatcttagtcttcagcaaaagattcaacacaaacttatgctgaacaactgtgtgaagaattcagtgaagcagtgaacattggaaattacaagacaagtgatgaaaagatgagacctgcatggaagtcatcgttgaaaaagttgctgggtctaagagcggtagacggactgttacatgggcagatgagaatggaactgtcctagaaactagcaaagcatatgaaagcccttctagtagcataaaacaacctgaggaaggcatagacagttcaccaaggttcgcatctgcagaggcatgtgctgcagcacttattaaggcagcagaagctatttcttcaggcacggcagaagcagaagattttcaaaggctggaatcattattctgcctgacatgcttagccagaaagaatatgacaattgcaaaaacactggcggagatgttgacccagtggcctaagaaacctgtacttctggatacagacatgttttaagttgatgactcttggcatgacacacctccagaaggttttagtgtaactgtaagtaatattaagaagggaaaagagagagagagagagagagagagagagagagagagagagagagagatagagagataccagttttcttcgtttaattcagtctcagcacgatgtacgattcttttc

SEQ ID NO: 16585 - DNA, 1450 bp, Zea Mays
tactcctccgcatccttttctgctccgagacacctgctgaagctggaagtacatggtgccttattcctctcttttctccttatggtacaaggatgattactttaattgaattggtctgccactggctgctgccatccactgcgggctcggtcgccacgtcgacgccatccctgtcctcgagcgcgctgtcacagtcgtggcgccgacacaagaatcgtctgccgacagcgagcctgaggccggtgcagccggcggcgacgactaccagcagctgcagcctgtcgagcccgactagaggggtggaaaatttacgagaccagctactgaaggagggaagtttgagggcttctctggagtctgggctaatgaatatgcgaagaggacaagtgtccttcccctcaacgatagacaccaagactaaggctgatcttgaggaagttgttgccgctgaagctgatattatgaacttgaagcaaaaggtttctgatcttcggggacaactcaacaaccaagttcagttgagttccacctcgttatgtgaatcatgcaacaacaagcgatccataaatgcagacaagcttgtcgaaggtgaacaaaacactgccctttctccatagattgcctcagtcgaagcaccaccaattgtagggtcttattctgtacctgacatgttctgggctacaaaccaaatggttcaggagatgttgtattcaaagggtgagattgcgaaggatggccaagacggatcacttacatcaagatggaactttgcacagagaccacactcaaatagtccagtcgtgagcagggttcaaggttccgatgcctattcaagtactaaaaccgaggaatctggaggcgcgccttcctctgcattagccaagctgacatatgtatctttcaagtagtccagtagaacctctgattcatcaagtagtccaagaacgtcgctgtgtggttcgacgcgttcgcggaccgctgccgccggcgagccgcgcacgccggcgacttcaccgcgcggctcgtagacatcatggctggctgacacgcggcggtgcgcgtacgtgctcggtcgcaatggagggacgcagacggggatgtgtggagcggaaggtcggtggctaggccgagctttatagagaaggatcgagagagcggaggcgggcgggcgctggatgtgagaagtgagggccgaggccagcaggcggcggggctcccgtcagttctgtccgttgcttgcaggacactgtccgagtactagaaaaacaaaactagccctcccctgtggcaggcgaccgggcactggtgttcgggttccaaaccgcgagtcccaacccacgtggcggcgcggtgttgccagaggcagactcgctcgtggcggcactcgtgtaggccgcgcgtggaaggagacgagggggggcggagtggatgacacccccagcccacgagc

SEQ ID NO: 16586 - DNA, 1362 bp, Zea Mays
aaattgtggaaataggccagtggcggcagcttcttgccctcttcctccattgacttgccgatgcagatcgaggggcgaggctgccgtcgtcgtcccgggctctctgtgcgcgtacgcggaagagtgaggaagctctagtccactcatacagcctttacggttcaggagagaccgtgatgcaattgggatgttcggcaaggtttgtgatgaacatgaagggtactttgttcatgaggccctttccattgccatcgattgcttacaacttgatattcaaatgaggccagaaatggaacatgtacttttccgtctccggatcattgttgctagaagcaaacttgctgctggtagtaacaataaacctagccaacatattggtcgggcccttgttaacaacattgataaacttcacccaactctcatatcaaccatttccatggaggaactgaatgaagcaaccgggaacttcagtaatgatgttcttataggacagggaccatacgccgaatgtttcctgggagttcttaaagatgggcagaatcttgctgtaaaaaggctacgtacttctgaagaaattcaagtagaggttccgaccattttaagaatgtgttaccatgacaatgttgtgcaatttctaggatgttttcttgaagggggaactcgtgttcttgcttatgagtacgccccaaggggctccttgcatgatattcttcatggtaaaatgggcatcaagggagcccgaccagggccacctctatcgtggttgcagcgtgtgaagattgccgtaagtgctgcaaaaggcatcgagttcctccatgagaaggtgacattggtgtttcaatacatgatgcccatcgccgggttcataattgggccgagtactattctgtcagggaacatctagcacctgagttcgcattcagaagaaggtatagcacaaagagcgatgtctacagcttcgggcttgtactgttggagcttttaactggccgctcagtttttcatgttgcgacacaatgtggcccgaggagcgcagttagatgggctaaaccaatgcttagtcaagacaaggtggaacagtgcatagatccaaggcttggaggagggtacctactaaacgatgtcagaaagatggcttctgttgctgcactgtgtttacaagacgagccagagttccggcctgaaatgagcatcgtcgtcgaggctctgagcctgttactgaacagcaagtgaacaagtaaccgtccctgcattggtgaagcacgtggaatgtgatttccttgcatgtcattgcgagctcaagatcacgggtttcgtgaaggcgattggcccccaacagaaaacgagcaagccactttggaa

SEQ ID NO: 16587 - DNA, 3164 bp, Zea Mays
aaattgtggaaataggccagtggcggcagcttcttgccctcttcctccattgacttgccgatgcagatcgaggggcgaggctgccgtcgtcgtcccgggctctctgtgcgcgtacgcggaagagtgaggaagctctagtccactcatacagcctttacggttcaggcaagcaaccacccatagcattcctatcactgtgcttggttgcgcatggattaccaaggggacaatcttagagatttctttcaaactaatgggcgtaaggtgcttcagagagcggaaaacaactatagcttgaaatattttacagaaaatgagatacgaaacataactgatgggtataagtctgttctgggaagaggggcatttggtgaggtctacaaaggaacgctagaagaccaatcctcagttgcagtaaagagatatatacatgggacccacaaagaggtgtttgccaaggaagtcatagtgcactctcaaataaaccacaagaatgttgtcagactcttgggctgctgcacagaagaaaatgctctaatgattgtcatggagtttatctccaatgggaacctcgacagcatacttcatggcaacagaggtaatggtcgggttcccttccctctgaagaaaaggatagaaattgccattgaggttgctgaagtattatggtgcatgcattcgatgtatagtcctgttcttcatggtgacatcaaacctgctaacatactgctagatgaaaattttcagccaaagatatcagattttggaattgcaagactgctttctgctaatggcccccagcaagctaccactgtcattggttccataggctaccttgatccagcatactgtgagagtggaattctaaccccaaagagcgatgtttacagctttggagtggttttgctggaaattatcacaaggaataaagcagtggatggcaccgttacccttgctcaaagttttaatgaggctcttacaaaaggggaggatgtgcagcacatgtttgatgaggaaatcagtgttgcagaaaacaagaagtttcttcgacgcattggacagttagcagctaaatgcttgcagagggacgtcaaaacgcgtcctgaaatggttgaagttgctaatagtctaaggatgatcaggaaagctatgcagagagaccaggatgaggatgtactgttagcagcataccaatttggagatctaaaaattttcaatgaaactgaaatgaaggaaatgacaaaaaactacagcatggcctttaggaaatcgatgtgtgaatgtctctacaatggagtcatcggcatgaatcgtccaattatagtaagactacttgagacaagttcagaaactggcagagagatatttctgaacactatgagcatattgagtcaaaagaaccacaaaaatgttgtgaatattgttggcttccacatagggaagtccagtttagagtgtgtatatgagtcttgctgtgatctatccaagacaatgcttggctctatatcactatctaacagaaacctttatgacactatctgttccatgaaaaaacttcatcttcaacaacgcctgtcaatagcagtccagtgtgcagagggtctggttcatatccattcattagcagctgaaagtcctgaatcatgtggcaccagcctcttaggaaacttcagatctgccaacatatttttggacgagaactttgtaccaaaaatcttcaatgtgaacttgtcaacatttcttggactttcaggtgcacaaaaacatacagtgttttcaattcattacaatggaccagaaaagtattattcagacccaagggatgtttctggtcaacttcttaacaaaaaatctgatgtatatagctttggagttgttcttttagagctcatcacttggaagactgtgagatacatgtacaatcttagggctcgtgtgcttaccacagacttccttgattcttataggagagaccgtgatgcaattgggatgttcggcaaggtttgtgatgaacatgaagggtactttgttcatgaggccctttccattgccatcgattgcttacaacttgatattcaaatgaggccagaaatggaacatgtacttttccgtctccggatcattgttgctagaagcaaacttgctgctggtagtaacaataaacctagccaacatattggtcgggcccttgttaacaacattgataaacttcacccaactctcatatcaaccatttccatggaggaactgaatgaagcaaccgggaacttcagtaatgatgttcttataggacagggaccatacgccgaatgtttcctgggagttcttaaagatgggcagaatcttgctgtaaaaaggctacgtacttctgaagaaattcaagtagaggttccgaccattttaagaatgtgttaccatgacaatgttgtgcaatttctaggatgttttcttgaagggggaactcgtgttcttgcttatgagtacgccccaaggggctccttgcatgatattcttcatggtaaaatgggcatcaagggagcccgaccagggccacctctatcgtggttgcagcgtgtgaagattgccgtaagtgctgcaaaaggcatcgagttcctccatgagaaggtgacattggtgtttcaatacatgatgcccatcgccgggttcataattgggccgagtactattctgtcagggaacatctagcacctgagttcgcattcagaagaaggtatagcacaaagagcgatgtctacagcttcgggcttgtactgttggagcttttaactggccgctcagtttttcatgttgcgacacaatgtggcccgaggagcgcagttagatgggctaaaccaatgcttagtcaagacaaggtggaacagtgcatagatccaaggcttggaggagggtacctactaaacgatgtcagaaagatggcttctgttgctgcactgtgtttacaagacgagccagagttccggcctgaaatgagcatcgtcgtcgaggctctgagcctgttactgaacagcaagtgaacaagtaaccgtccctgcattggtgaagcacgtggaatgtgatttccttgcatgtcattgcgagctcaagatcacgggtttcgtgaaggcgattggcccccaacagaaaacgagcaagccactttggaa

SEQ ID NO: 16588 - DNA, 3215 bp, Zea Mays
ttgccctcttcctccattgacttgccgatgcagatcgaggggcgaggctgccgtcgtcgtcccgggctctctgtgcgcgtacgcggaagagtgaggaagctctagtccactcatacagcctttacggttcaggcaagcaaccacccatagcattcctatcactgtgcttggttgcgcatggattaccaaggggacaatcttagagatttctttcaaactaatgggcgtaaggtgcttcagagagcggaaaacaactatagcttgaaatattttacagaaaatgagatacgaaacataactgatgggtataagtctgttctgggaagaggggcatttggtgaggtctacaaaggaacgctagaagaccaatcctcagttgcagtaaagagatatatacatgggacccacaaagaggtgtttgccaaggaagtcatagtgcactctcaaataaaccacaagaatgttgtcagactcttgggctgctgcacagaagaaaatgctctaatgattgtcatggagtttatctccaatgggaacctcgacagcatacttcatggcaacagaggtaatggtcgggttcccttccctctgaagaaaaggatagaaattgccattgaggttgctgaagtattatggtgcatgcattcgatgtatagtcctgttcttcatggtgacatcaaacctgctaacatactgctagatgaaaattttcagccaaagatatcagattttggaattgcaagactgctttctgctaatggcccccagcaagctaccactgtcattggttccataggctaccttgatccagcatactgtgagagtggaattctaaccccaaagagcgatgtttacagctttggagtggttttgctggaaattatcacaaggaataaagcagtggatggcaccgttacccttgctcaaagttttaatgaggctcttacaaaaggggaggatgtgcagcacatgtttgatgaggaaatcagtgttgcagaaaacaagaagtttcttcgacgcattggacagttagcagctaaatgcttgcagagggacgtcaaaacgcgtcctgaaatggttgaagttgctaatagtctaaggatgatcaggaaagctatgcagagagaccaggatgaggatgtactgttagcagcataccaatttggagatctaaaaattttcaatgaaactgaaatgaaggaaatgacaaaaaactacagcatggcctttaggaaatcgatgtgtgaatgtctctacaatggagtcatcggcatgaatcgtccaattatagtaagactacttgagacaagttcagaaactggcagagagatatttctgaacactatgagcatattgagtcaaaagaaccacaaaaatgttgtgaatattgttggcttccacatagggaagtccagtttagagtgtgtatatgagtcttgctgtgatctatccaagacaatgcttggctctatatcactatctaacagaaacctttatgacactatctgttccatgaaaaaacttcatcttcaacaacgcctgtcaatagcagtccagtgtgcagagggtctggttcatatccattcattagcagctgaaagtcctgaatcatgtggcaccagcctcttaggaaacttcagatctgccaacatatttttggacgagaactttgtaccaaaaatcttcaatgtgaacttgtcaacatttcttggactttcaggtgcacaaaaacatacagtgttttcaattcattacaatggaccagaaaagtattattcagacccaagggatgtttctggtcaacttcttaacaaaaaatctgatgtatatagctttggagttgttcttttagagctcatcacttggaagactgtgagatacatgtacaatcttagggctcgtgtgcttaccacagacttccttgattcttataggagagaccgtgatgcaattgggatgttcggcaaggtttgtgatgaacatgaagggtactttgttcatgaggccctttccattgccatcgattgcttacaacttgatattcaaatgaggccagaaatggaacatgtacttttccgtctccggatcattgttgctagaagcaaacttgctgctggtagtaacaataaacctagccaacatattggtcgggcccttgttaacaacattgataaacttcacccaactctcatatcaaccatttccatggaggaactgaatgaagcaaccgggaacttcagtaatgatgttcttataggacagggaccatacgccgaatgtttcctgggagttcttaaagatgggcagaatcttgctgtaaaaaggctacgtacttctgaagaaattcaagtagagggttccgaccattttaagaatgtgttaccatgacaatgttgtgcaatttctaggatgttttcttgaagggggaactcgtgttcttgcttatgagtacgccccaaggggctccttgcatgatattcttcatggtaaaatgggcatcaagggagcccgaccagggccacctctatcgtggttgcagcgtgtgaagattgccgtaagtgctgcaaaaggcatcgagttcctccatgagaaggtgacattggtgtttcaatacatgatgcccatcgccgggttcataattgggccgagtactattctgtcagggaacatctagcacctgagttcgcattcagaagaaggtatagcacaaagagcgatgtctacagcttcgggcttgtactgttggagcttttaactggccgctcagtttttcatgttgcgacacaatgtggcccgaggagcgcagttagatgggctaaaccaatgcttagtcaagacaaggtggaacagtgcatagatccaaggcttggaggagggtacctactaaacgatgtcagaaagatggcttctgttgctgcactgtgtttacaagacgagccagagttccggcctgaaatgagcatcgtcgtcgaggctctgagcctgttactgaacagcaagtgaacaagtaaccgtccctgcattggtgaagcacgtggaatgtgatttccttgcatgtcattgcgagctcaagatcacgggtttcgtgaaggcgattggcccccaacagaaagttatgattactgcattcatctaggcttggaacttgtgctttctttgtctgtgcacatgtaatactcaaaattctaaataaagaatatagagagatcttctca

SEQ ID NO: 16589 - DNA, 2847 bp, Zea Mays
gcttcttgccctcttcctccattgacttgccgatgcagatcgaggggcgaggctgccgtcgtcgtcccgggctctctgtgcgcgtacgcggaagagtgaggaagctctagtccactcatacagcctttacggttcaggcaagcaaccacccatagcattcctatcactgtgcttggttgcgcatggattaccaaggggacaatcttagagatttctttcaaactaatgggcgtaaggtgcttcagagagcggaaaacaactatagcttgaaatattttacagaaaatgagatacgaaacataactgatgggtataagtctgttctgggaagaggggcatttggtgaggtctacaaaggaacgctagaagaccaatcctcagttgcagtaaagagatatatacatgggacccacaaagaggtgtttgccaaggaagtcatagtgcactctcaaataaaccacaagaatgttgtcagactcttgggctgctgcacagaagaaaatgctctaatgattgtcatggagtttatctccaatgggaacctcgacagcatacttcatggcaacagaggtaatggtcgggttcccttccctctgaagaaaaggatagaaattgccattgaggttgctgaagtattatggtgcatgcattcgatgtatagtcctgttcttcatggtgacatcaaacctgctaacatactgctagatgaaaattttcagccaaagatatcagattttggaattgcaagactgctttctgctaatggcccccagcaagctaccactgtcattggttccataggctaccttgatccagcatactgtgagagtggaattctaaccccaaagagcgatgtttacagctttggagtggttttgctggaaattatcacaaggaataaagcagtggatggcaccgttacccttgctcaaagttttaatgaggctcttacaaaaggggaggatgtgcagcacatgtttgatgaggaaatcagtgttgcagaaaacaagaagtttcttcgacgcattggacagttagcagctaaatgcttgcagagggacgtcaaaacgcgtcctgaaatggttgaagttgctaatagtctaaggatgatcaggaaagctatgcagagagaccaggatgaggatgtactgttagcagcataccaatttggagatctaaaaattttcaatgaaactgaaatgaaggaaatgacaaaaaactacagcatggcctttaggaaatcgatgtgtgaatgtctctacaatggagtcatcggcatgaatcgtccaattatagtaagactacttgagacaagttcagaaactggcagagagatatttctgaacactatgagcatattgagtcaaaagaaccacaaaaatgttgtgaatattgttggcttccacatagggaagtccagtttagagtgtgtatatgagtcttgctgtgatctatccaagacaatgcttggctctatatcactatctaacagaaacctttatgacactatctgttccatgaaaaaacttcatcttcaacaacgcctgtcaatagcagtccagtgtgcagagggtctggttcatatccattcattagcagctgaaagtcctgaatcatgtggcaccagcctcttaggaaacttcagatctgccaacatatttttggacgagaactttgtaccaaaaatcttcaatgtgaacttgtcaacatttcttggactttcaggtgcacaaaaacatacagtgttttcaattcattacaatggaccagaaaagtattattcagacccaagggatgtttctggtcaacttcttaacaaaaaatctgatgtatatagctttggagttgttcttttagagctcatcacttggaagactgtgagatacatgtacaatcttagggctcgtgtgcttaccacagacttccttgattcttataggagagaccgtgatgcaattgggatgttcggcaaggtttgtgatgaacatgaagggtactttgttcatgaggccctttccattgccatcgattgcttacaacttgatattcaaatgaggccagaaatggaacatgtacttttccgtctccggatcattgttgctagaagcaaacttgctggtaaaatgggcatcaagggagcccgaccagggccacctctatcgtggttgcagcgtgtgaagattgccgtaagtgctgcaaaaggcatcgagttcctccatgagaaggtgacattggtgtttcaatacatgatgcccatcgccgggttcataattgggccgagtactattctgtcagggaacatctagcacctgagttcgcattcagaagaaggtatagcacaaagagcgatgtctacagcttcgggcttgtactgttggagcttttaactggccgctcagtttttcatgttgcgacacaatgtggcccgaggagcgcagttagatgggctaaaccaatgcttagtcaagacaaggtggaacagtgcatagatccaaggcttggaggagggtacctactaaacgatgtcagaaagatggcttctgttgctgcactgtgtttacaagacgagccagagttccggcctgaaatgagcatcgtcgtcgaggctctgagcctgttactgaacagcaagtgaacaagtaaccgtccctgcattggtgaagcacgtggaatgtgatttccttgcatgtcattgcgagctcaagatcacgggtttcgtgaaggcgattggcccccaacagaaagttatgattactgcattcatctaggcttggaacttgtgctttctttgtctgtgcacatgtaatactcaaaattctaaataaagaatatagagagatcttctca

SEQ ID NO: 16590 - DNA, 3005 bp, Zea Mays
gcttcttgccctcttcctccattgacttgccgatgcagatcgaggggcgaggctgccgtcgtcgtcccgggctctctgtgcgcgtacgcggaagagtgaggaagctctagtccactcatacagcctttacggttcaggcaagcaaccacccatagcattcctatcactgtgcttggttgcgcatggattaccaaggggacaatcttagagatttctttcaaactaatgggcgtaaggtgcttcagagagcggaaaacaactatagcttgaaatattttacagaaaatgagatacgaaacataactgatgggtataagtctgttctgggaagaggggcatttggtgaggtctacaaaggaacgctagaagaccaatcctcagttgcagtaaagagatatatacatgggacccacaaagaggtgtttgccaaggaagtcatagtgcactctcaaataaaccacaagaatgttgtcagactcttgggctgctgcacagaagaaaatgctctaatgattgtcatggagtttatctccaatgggaacctcgacagcatacttcatggcaacagaggtaatggtcgggttcccttccctctgaagaaaaggatagaaattgccattgaggttgctgaagtattatggtgcatgcattcgatgtatagtcctgttcttcatggtgacatcaaacctgctaacatactgctagatgaaaattttcagccaaagatatcagattttggaattgcaagactgctttctgctaatggcccccagcaagctaccactgtcattggttccataggctaccttgatccagcatactgtgagagtggaattctaaccccaaagagcgatgtttacagctttggagtggttttgctggaaattatcacaaggaataaagcagtggatggcaccgttacccttgctcaaagttttaatgaggctcttacaaaaggggaggatgtgcagcacatgtttgatgaggaaatcagtgttgcagaaaacaagaagtttcttcgacgcattggacagttagcagctaaatgcttgcagagggacgtcaaaacgcgtcctgaaatggttgaagttgctaatagtctaaggatgatcaggaaagctatgcagagagaccaggatgaggatgtactgttagcagcataccaatttggagatctaaaaattttcaatgaaactgaaatgaaggaaatgacaaaaaactacagcatggcctttaggaaatcgatgtgtgaatgtctctacaatggagtcatcggcatgaatcgtccaattatagtaagactacttgagacaagttcagaaactggcagagagatatttctgaacactatgagcatattgagtcaaaagaaccacaaaaatgttgtgaatattgttggcttccacatagggaagtccagtttagagtgtgtatatgagtcttgctgtgatctatccaagacaatgcttggctctatatcactatctaacagaaacctttatgacactatctgttccatgaaaaaacttcatcttcaacaacgcctgtcaatagcagtccagtgtgcagagggtctggttcatatccattcattagcagctgaaagtcctgaatcatgtggcaccagcctcttaggaaacttcagatctgccaacatatttttggacgagaactttgtaccaaaaatcttcaatgtgaacttgtcaacatttcttggactttcaggagagaccgtgatgcaattgggatgttcggcaaggtttgtgatgaacatgaagggtactttgttcatgaggccctttccattgccatcgattgcttacaacttgatattcaaatgaggccagaaatggaacatgtacttttccgtctccggatcattgttgctagaagcaaacttgctgctggtagtaacaataaacctagccaacatattggtcgggcccttgttaacaacattgataaacttcacccaactctcatatcaaccatttccatggaggaactgaatgaagcaaccgggaacttcagtaatgatgttcttataggacagggaccatacgccgaatgtttcctgggagttcttaaagatgggcagaatcttgctgtaaaaaggctacgtacttctgaagaaattcaagtagaggttccgaccattttaagaatgtgttaccatgacaatgttgtgcaatttctaggatgttttcttgaagggggaactcgtgttcttgcttatgagtacgccccaaggggctccttgcatgatattcttcatggtaaaatgggcatcaagggagcccgaccagggccacctctatcgtggttgcagcgtgtgaagattgccgtaagtgctgcaaaaggcatcgagttcctccatgagaaggtgacattggtgtttcaatacatgatgcccatcgccgggttcataattgggccgagtactattctgtcagggaacatctagcacctgagttcgcattcagaagaaggtatagcacaaagagcgatgtctacagcttcgggcttgtactgttggagcttttaactggccgctcagtttttcatgttgcgacacaatgtggcccgaggagcgcagttagatgggctaaaccaatgcttagtcaagacaaggtggaacagtgcatagatccaaggcttggaggagggtacctactaaacgatgtcagaaagatggcttctgttgctgcactgtgtttacaagacgagccagagttccggcctgaaatgagcatcgtcgtcgaggctctgagcctgttactgaacagcaagtgaacaagtaaccgtccctgcattggtgaagcacgtggaatgtgatttccttgcatgtcattgcgagctcaagatcacgggtttcgtgaaggcgattggcccccaacagaaagttatgattactgcattcatctaggcttggaacttgtgctttctttgtctgtgcacatgtaatactcaaaattctaaataaagaatatagagagatcttctca

SEQ ID NO: 16591 - DNA, 3228 bp, Zea Mays
gcttcttgccctcttcctccattgacttgccgatgcagatcgaggggcgaggctgccgtcgtcgtcccgggctctctgtgcgcgtacgcggaagagtgaggaagctctagtccactcatacagcctttacggttcaggcaagcaaccacccatagcattcctatcactgtgcttggttgcgcatggattaccaaggggacaatcttagagatttctttcaaactaatgggcgtaaggtgcttcagagagcggaaaacaactatagcttgaaatattttacagaaaatgagatacgaaacataactgatgggtataagtctgttctgggaagaggggcatttggtgaggtctacaaaggaacgctagaagaccaatcctcagttgcagtaaagagatatatacatgggacccacaaagaggtgtttgccaaggaagtcatagtgcactctcaaataaaccacaagaatgttgtcagactcttgggctgctgcacagaagaaaatgctctaatgattgtcatggagtttatctccaatgggaacctcgacagcatacttcatggcaacagaggtaatggtcgggttcccttccctctgaagaaaaggatagaaattgccattgaggttgctgaagtattatggtgcatgcattcgatgtatagtcctgttcttcatggtgacatcaaacctgctaacatactgctagatgaaaattttcagccaaagatatcagattttggaattgcaagactgctttctgctaatggcccccagcaagctaccactgtcattggttccataggctaccttgatccagcatactgtgagagtggaattctaaccccaaagagcgatgtttacagctttggagtggttttgctggaaattatcacaaggaataaagcagtggatggcaccgttacccttgctcaaagttttaatgaggctcttacaaaaggggaggatgtgcagcacatgtttgatgaggaaatcagtgttgcagaaaacaagaagtttcttcgacgcattggacagttagcagctaaatgcttgcagagggacgtcaaaacgcgtcctgaaatggttgaagttgctaatagtctaaggatgatcaggaaagctatgcagagagaccaggatgaggatgtactgttagcagcataccaatttggagatctaaaaattttcaatgaaactgaaatgaaggaaatgacaaaaaactacagcatggcctttaggaaatcgatgtgtgaatgtctctacaatggagtcatcggcatgaatcgtccaattatagtaagactacttgagacaagttcagaaactggcagagagatatttctgaacactatgagcatattgagtcaaaagaaccacaaaaatgttgtgaatattgttggcttccacatagggaagtccagtttagagtgtgtatatgagtcttgctgtgatctatccaagacaatgcttggctctatatcactatctaacagaaacctttatgacactatctgttccatgaaaaaacttcatcttcaacaacgcctgtcaatagcagtccagtgtgcagagggtctggttcatatccattcattagcagctgaaagtcctgaatcatgtggcaccagcctcttaggaaacttcagatctgccaacatatttttggacgagaactttgtaccaaaaatcttcaatgtgaacttgtcaacatttcttggactttcaggtgcacaaaaacatacagtgttttcaattcattacaatggaccagaaaagtattattcagacccaagggatgtttctggtcaacttcttaacaaaaaatctgatgtatatagctttggagttgttcttttagagctcatcacttggaagactgtgagatacatgtacaatcttagggctcgtgtgcttaccacagacttccttgattcttataggagagaccgtgatgcaattgggatgttcggcaaggtttgtgatgaacatgaagggtactttgttcatgaggccctttccattgccatcgattgcttacaacttgatattcaaatgaggccagaaatggaacatgtacttttccgtctccggatcattgttgctagaagcaaacttgctgctggtagtaacaataaacctagccaacatattggtcgggcccttgttaacaacattgataaacttcacccaactctcatatcaaccatttccatggaggaactgaatgaagcaaccgggaacttcagtaatgatgttcttataggacagggaccatacgccgaatgtttcctgggagttcttaaagatgggcagaatcttgctgtaaaaaggctacgtacttctgaagaaattcaagtagaggtcatgcatgttccgaccattttaagaatgtgttaccatgacaatgttgtgcaatttctaggatgttttcttgaagggggaactcgtgttcttgcttatgagtacgccccaaggggctccttgcatgatattcttcatggtaaaatgggcatcaagggagcccgaccagggccacctctatcgtggttgcagcgtgtgaagattgccgtaagtgctgcaaaaggcatcgagttcctccatgagaaggtgacattggtgtttcaatacatgatgcccatcgccgggttcataattgggccgagtactattctgtcagggaacatctagcacctgagttcgcattcagaagaaggtatagcacaaagagcgatgtctacagcttcgggcttgtactgttggagcttttaactggccgctcagtttttcatgttgcgacacaatgtggcccgaggagcgcagttagatgggctaaaccaatgcttagtcaagacaaggtggaacagtgcatagatccaaggcttggaggagggtacctactaaacgatgtcagaaagatggcttctgttgctgcactgtgtttacaagacgagccagagttccggcctgaaatgagcatcgtcgtcgaggctctgagcctgttactgaacagcaagtgaacaagtaaccgtccctgcattggtgaagcacgtggaatgtgatttccttgcatgtcattgcgagctcaagatcacgggtttcgtgaaggcgattggcccccaacagaaagttatgattactgcattcatctaggcttggaacttgtgctttctttgtctgtgcacatgtaatactcaaaattctaaataaagaatatagagagatcttctca

SEQ ID NO: 16592 - DNA, 3184 bp, Zea Mays
ggcagcttcttgccctcttcctccattgacttgccgatgcagatcgaggggcgaggctgccgtcgtcgtcccgggctctctgtgcgcgtacgcggaagagtgaggaagctctagtccactcatacagcctttacggttcaggcaagcaaccacccatagcattcctatcactgtgcttggttgcgcatggattaccaaggggacaatcttagagatttctttcaaactaatgggcgtaaggtgcttcagagagcggaaaacaactatagcttgaaatattttacagaaaatgagatacgaaacataactgatgggtataagtctgttctgggaagaggggcatttggtgaggtctacaaaggaacgctagaagaccaatcctcagttgcagtaaagagatatatacatgggacccacaaagaggtgtttgccaaggaagtcatagtgcactctcaaataaaccacaagaatgttgtcagactcttgggctgctgcacagaagaaaatgctctaatgattgtcatggagtttatctccaatgggaacctcgacagcatacttcatggcaacagaggtaatggtcgggttcccttccctctgaagaaaaggatagaaattgccattgaggttgctgaagtattatggtgcatgcattcgatgtatagtcctgttcttcatggtgacatcaaacctgctaacatactgctagatgaaaattttcagccaaagatatcagattttggaattgcaagactgctttctgctaatggcccccagcaagctaccactgtcattggttccataggctaccttgatccagcatactgtgagagtggaattctaaccccaaagagcgatgtttacagctttggagtggttttgctggaaattatcacaaggaataaagcagtggatggcaccgttacccttgctcaaagttttaatgaggctcttacaaaaggggaggatgtgcagcacatgtttgatgaggaaatcagtgttgcagaaaacaagaagtttcttcgacgcattggacagttagcagctaaatgcttgcagagggacgtcaaaacgcgtcctgaaatggttgaagttgctaatagtctaaggatgatcaggaaagctatgcagagagaccaggatgaggatgtactgttagcagcataccaatttggagatctaaaaattttcaatgaaactgaaatgaaggaaatgacaaaaaactacagcatggcctttaggaaatcgatgtgtgaatgtctctacaatggagtcatcggcatgaatcgtccaattatagtaagactacttgagacaagttcagaaactggcagagagatatttctgaacactatgagcatattgagtcaaaagaaccacaaaaatgttgtgaatattgttggcttccacatagggaagtccagtttagagtgtgtatatgagtcttgctgtgatctatccaagacaatgcttggctctatatcactatctaacagaaacctttatgacactatctgttccatgaaaaaacttcatcttcaacaacgcctgtcaatagcagtccagtgtgcagagggtctggttcatatccattcattagcagctgaaagtcctgaatcatgtggcaccagcctcttaggaaacttcagatctgccaacatatttttggacgagaactttgtaccaaaaatcttcaatgtgaacttgtcaacatttcttggactttcaggtgcacaaaaacatacagtgttttcaattcattacaatggaccagaaaagtattattcagacccaagggatgtttctggtcaacttcttaacaaaaaatctgatgtatatagctttggagttgttcttttagagctcatcacttggaagactgtgagatacatgtacaatcttagggctcgtgtgcttaccacagacttccttgattcttataggagagaccgtgatgcaattgggatgttcggcaaggtttgtgatgaacatgaagggtactttgttcatgaggccctttccattgccatcgattgcttacaacttgatattcaaatgaggccagaaatggaacatgtacttttccgtctccggatcattgttgctagaagcaaacttgctgctggtagtaacaataaacctagccaacatattggtcgggcccttgttaacaacattgataaacttcacccaactctcatatcaaccatttccatggaggaactgaatgaagcaaccgggaacttcagtaatgatgttcttataggacagggaccatacgccgaatgtttcctgggagttcttaaagatgggcagaatcttgctgtaaaaaggctacgtacttctgaagaaattcaagtagaggttccgaccattttaagaatgtgttaccatgacaatgttgtgcaatttctaggatgttttcttgaagggggaactcgtgttcttgcttatgagtacgccccaaggggctccttgcatgatattcttcatggtaaaatgggcatcaagggagcccgaccagggccacctctatcgtggttgcagcgtgtgaagattgccgtgacattggtgtttcaatacatgatgcccatcgccgggttcataattgggccgagtactattctgtcagggaacatctagcacctgagttcgcattcagaagaaggtatagcacaaagagcgatgtctacagcttcgggcttgtactgttggagcttttaactggccgctcagtttttcatgttgcgacacaatgtggcccgaggagcgcagttagatgggctaaaccaatgcttagtcaagacaaggtggaacagtgcatagatccaaggcttggaggagggtacctactaaacgatgtcagaaagatggcttctgttgctgcactgtgtttacaagacgagccagagttccggcctgaaatgagcatcgtcgtcgaggctctgagcctgttactgaacagcaagtgaacaagtaaccgtccctgcattggtgaagcacgtggaatgtgatttccttgcatgtcattgcgagctcaagatcacgggtttcgtgaaggcgattggcccccaacagaaagttatgattactgcattcatctaggcttggaacttgtgctttctttgtctgtgcacatgtaatactcaaaattctaaataaagaatatagagagatcttctca

SEQ ID NO: 16593 - DNA, 2085 bp, Zea Mays
aatttccgggatcctcgactcgtttcccttcccactactctgatcctctctatcagcgccgcctgcctccaagtccctgaatccacgggcgactcgcttgctccccctgttttcctcggccgccggagcgcgtcgcctccgagcagcagcagcactccggcagtccctggttgttcctggtggttcttgcctcctcgtctgggtgggtgggtggtggaatagcgtcgtcttcgctggaacccacctgcctgctcttgctccgctcgcgcagtcgcgctggagtttgcagctaaagctactgattggttcgtactgaccagccaagccaaagagggattctttggaggcaaccagaggtgtttggtttggtcaagctcccttcttttgtcttgcccatggaatgcttgctgtgaactgcttgtattcatgcttgagagaatttcagtgtagcatcttgtggtcttgtcctctctgattggaagagaaaacgtgctgtcttgtggcttgctatgtctgtctcggagaaggtggtgctatcatcatcagtttcttcgtcgtcagatttagatccgttgctgaagggtcttacggagaagaagttgagctttaggaggaacgtggtgtcattggcagccgagctcaaggatgtgaggagcaagcttgcttcccaggagcagctgtttgtaagggaatctcaaactagaaagcttgtggatacaaaagcaaggagcatggaagaggaagtaagcaagttgcagaaatgcttacaggacaaggatgagcaactgcgttcatccacaagtagcacggaacagtacctccatgagttggatgatcttagaacacaactgtcatttactcaagctacagcagaagcaagtgctgcatcagctaagtcagcccagatgcagtgcttatcattgctgaaagagctgaatgagaaggacatctcgctcaaagagcacgggcttcgagtgaacaagctaggtgagcagcttgatcttctccagagggaactacaagcaagggagctctcgcaaatgcaacttaaagatgaagttataagaatcgagaccgacatcatggatgcagttgccaaagctgggtctaggtctgacaaagataatgagcttttaaagatcttatctgatgtttcaccaaggaatgtccagaacctcaacaaccttttgaatgctaaggatacagaaattgcgaggttgagagaggaaatcagaatattgtctgctcactggacgaacaaaaccaaggaacttgagtcacatttagaaaagcaccggagaactgatcaggagctgaagaagagggttctaaagcttgaattttgccttcaagaatcccagtctcagatgcgaaaattaaagaggatgggcgagagaagagacaaggctctcaaggagctcatggaccaggtggccacgaagcagccaaacagcatgtgccatggcaacaaggagaatttctgggagggccagggcttcaagttcatcgtgtctatgtcgatgctggcactagtgatcctcgcaaagcgatgaagcagcatcgcatacccaatcttgtgtaaagaaggtagagattccatctatcgttaggtgagcaactagctcatagcttaagcagatgtcgatgtagcgtttacattagtttgttgtttgtattcttgggcagctgtgcataatgcatggtcagaagttgcagtctgtaatccgtagtctctgctagggcatgtgaactcagaaggtgtcttgtactcacatctagttcatgtcagctcttgagcagtcatgaatctacatcttgtaatttcagagtagcttcagcagttgtcacatgtaactctataattgctgaatctacatcttataatttgcactcttatggttgcgaatttggtaaaaacgcgtgatgcagcattcatcgtttctttttagttgtcgctggatagttcaattttgcactatccagcgacaactaaaacgaaacggagtatgacgcaagcccagcttgaattagaaatatatggtgttgttgaacaccctcaaatcaaatgaatatgattattcaccg

SEQ ID NO: 16594 - DNA, 2353 bp, Zea Mays
aatttccgggatcctcgactcgtttcccttcccactactctgatcctctctatcagcgccgcctgcctccaagtccctgaatccacgggcgactcgcttgctccccctgttttcctcggccgccggagcgcgtcgcctccgagcagcagcagcactccggcagtccctggttgttcctggtggttcttgcctcctcgtctgggtgggtgggtggtggaatagcgtcgtcttcgctggaacccacctgcctgctcttgctccgctcgcgcagtcgcgctggaggtgcgtgattctttttcgccgccacgtcctcagttcatgctgtgttgttcgcctgcgaccgtgaatccgtgattgccacgcacatttcattagtctgcatttatttctatcttggggataaaagaatgtcgggagctcggaactctccgtgttatttgaatgccaagacaaatgcttagcaccagcgaactcgtggccttgacctgaagaaaaatcgtttttttctctcactcgtagtattaaatatttactatcattatttcttaagtttgcagctaaagctactgattggttcgtactgaccagccaagccaaagagggattctttggaggcaaccagaggtgtttggtttggtcaagctcccttcttttgtcttgcccatggaatgcttgctgtgaactgcttgtattcatgcttgagagaatttcagtgtagcatcttgtggtcttgtcctctctgattggaagagaaaacgtgctgtcttgtggcttgctatgtctgtctcggagaaggtggtgctatcatcatcagtttcttcgtcgtcagatttagatccgttgctgaagggtcttacggagaagaagttgagctttaggaggaacgtggtgtcattggcagccgagctcaaggatgtgaggagcaagcttgcttcccaggagcagctgtttgtaagggaatctcaaactagaaagcttgtggatacaaaagcaaggagcatggaagaggaagtaagcaagttgcagaaatgcttacaggacaaggatgagcaactgcgttcatccacaagtagcacggaacagtacctccatgagttggatgatcttagaacacaactgtcatttactcaagctacagcagaagcaagtgctgcatcagctaagtcagcccagatgcagtgcttatcattgctgaaagagctgaatgagaaggacatctcgctcaaagagcacgggcttcgagtgaacaagctaggtgagcagcttgatcttctccagagggaactacaagcaagggagctctcgcaaatgcaacttaaagatgaagttataagaatcgagaccgacatcatggatgcagttgccaaagctgggtctaggtctgacaaagataatgagcttttaaagatcttatctgatgtttcaccaaggaatgtccagaacctcaacaaccttttgaatgctaaggatacagaaattgcgaggttgagagaggaaatcagaatattgtctgctcactggacgaacaaaaccaaggaacttgagtcacatttagaaaagcaccggagaactgatcaggagctgaagaagagggttctaaagcttgaattttgccttcaagaatcccagtctcagatgcgaaaattaaagaggatgggcgagagaagagacaaggctctcaaggagctcatggaccaggtggccacgaagcagccaaacagcatgtgccatggcaacaaggagaatttctgggagggccagggcttcaagttcatcgtgtctatgtcgatgctggcactagtgatcctcgcaaagcgatgaagcagcatcgcatacccaatcttgtgtaaagaaggtagagattccatctatcgttaggtgagcaactagctcatagcttaagcagatgtcgatgtagcgtttacattagtttgttgtttgtattcttgggcagctgtgcataatgcatggtcagaagttgcagtctgtaatccgtagtctctgctagggcatgtgaactcagaaggtgtcttgtactcacatctagttcatgtcagctcttgagcagtcatgaatctacatcttgtaatttcagagtagcttcagcagttgtcacatgtaactctataattgctgaatctacatcttataatttgcactcttatggttgcgaatttggtaaaaacgcgtgatgcagcattcatcgtttctttttagttgtcgctggatagttcaattttgcactatccagcgacaactaaaacgaaacggagtatgacgcaagcccagcttgaattagaaatatatggtgttgttgaacaccctcaaatcaaatgaatatgattattcaccg

SEQ ID NO: 16595 - DNA, 647 bp, Zea Mays
ctttaggccccgttcgtttcggccggattggcccattcccggccttgttccgggtggaacaaattggctcggtttagaatttggtggaacaaattggtcccgttcgtttcggtcggatctggaactaaaattggcctggtttgaagtttaccctctctccacagcccgacaccaatcctggtctcatcccttccggattgaaccctgctgtgatgcgagacagcgcaatgctggcggcgcgggaggcgaataagcggctgcgcgcagcgccgacggcgaccctccccaccgccttctcactgttctacaatgagtatgtcattacgagatcatattagaaagaggagggaagaagaagatgatgacatgatgttgtttattttccctgccttatatctgatgggttcaactagaagtggggggacaaaagaagaaacgccatacatcagatgagacaactccgtatgtgtattgtcaagtattgggaagacaactccgtatgtgtgaccattgttattactgtatttgcttatgtagctgattacttatataactgtttcttggcgagtatgcgtgaacaattgcaagtctttttgttattactgtatgtattaaattgatttgaacaaattgagtgcatcgtgatt

SEQ ID NO: 16596 - DNA, 349 bp, Zea Mays
ctttaggccccgttcgtttcggccggattggcccattcccggccttgttccgggtggaacaaattggctcggtttagaatttggtggaacaaattggtcccgttcgtttcggtcggatctggaactaaaattggcctggtttgaagtttaccctctctccacagcccgacaccaatcctggtctcatcccttccggattgaaccctgctgtgatgcgagacagcgcaatgctggcggcgcgggaggcgaataagcggctgcgcgcagcgccgacggcgaccctccccaccgccttctcactgatccctacaacaccaattatagttggggaaggtgaacctccctcttg

SEQ ID NO: 16597 - DNA, 1163 bp, Zea Mays
gccgaactgggcctcaaccggaacttgttttaccccatctcatcccactgactccacccacccgcccgctgcctccgccggatctcgtcggactcggatccgcccgaccaccccgcgccgccgccgcgcagcagcagcaggtacgagaaatatgcccagaagaatgggtggaaatttgatgtcattgacataatggagtctgctgtgaaaggatacaaggaagctagtggaactatatcaggtcctggggcgttcggcaaactaaagtttgagagtggcatccatagagttcagcgagtgccagcgactgagaaatctggacgaatgcacactagtgctgtatcagttgctgttcttccgcaagctgatgaggttgatgtccagctgcgaaatgaggacctgagaattgatacctacagatcaggtggctctggaggtcagtctgtcaatacaaccgatagtgctgttaggataactcatattccaaccggaacagtggttgcaatccaagatgagagatcacagcacatgaacaaggccaaagctctgaaagttctccgagcgcgactgtatgagttggagaggcgtagactacacatggacaggtcaaagcttcgatcagaacagattggaagcggtgacaggtctgagcgaatcagaacatacaacttcccacagggccgtgtcaccgaccatcgcgttggagtcacacaccactccatagcagatgtcatggagggggagagcctggacatgttcgttgatgcgctcctgcttcaagaagagatggacgccattgcttcatttggcgcatagctagattaaaccttgcaacattgattcacgtcatggacaaaatagagatcagcgaaaaacaataccgagcagtccactagtgaattgcctgtgcattgtgtcctgttttggcgtgtgctagttttacataatgctgaatttttaatgtaggcatgtgttataattgttgccgataaacgtgtcgctcatccaattctttccaaactacagttttgctggcaatgttttgttgttcgttctttccaaactacagttgtgctggcatggttttgttattcataaacttggtgcgcctgaattgtctatggacaaacatgtttataagtgatccttatttaagcttcagt

SEQ ID NO: 16598 - DNA, 1062 bp, Zea Mays
gccgaactgggcctcaaccggaacttgttttaccccatctcatcccactgactccacccacccgcccgctgcctccgccggatctcgtcggactcggatccgcccgaccaccccgcgccgccgccgcgcagcagcagcaggtcctggggcgttcggcaaactaaagtttgagagtggcatccatagagttcagcgagtgccagcgactgagaaatctggacgaatgcacactagtgctgtatcagttgctgttcttccgcaagctgatgaggttgatgtccagctgcgaaatgaggacctgagaattgatacctacagatcaggtggctctggaggtcagtctgtcaatacaaccgatagtgctgttaggataactcatattccaaccggaacagtggttgcaatccaagatgagagatcacagcacatgaacaaggccaaagctctgaaagttctccgagcgcgactgtatgagttggagaggcgtagactacacatggacaggtcaaagcttcgatcagaacagattggaagcggtgacaggtctgagcgaatcagaacatacaacttcccacagggccgtgtcaccgaccatcgcgttggagtcacacaccactccatagcagatgtcatggagggggagagcctggacatgttcgttgatgcgctcctgcttcaagaagagatggacgccattgcttcatttggcgcatagctagattaaaccttgcaacattgattcacgtcatggacaaaatagagatcagcgaaaaacaataccgagcagtccactagtgaattgcctgtgcattgtgtcctgttttggcgtgtgctagttttacataatgctgaatttttaatgtaggcatgtgttataattgttgccgataaacgtgtcgctcatccaattctttccaaactacagttttgctggcaatgttttgttgttcgttctttccaaactacagttgtgctggcatggttttgttattcataaacttggtgcgcctgaattgtctatggacaaacatgtttataagtgatccttatttaagcttcagt

SEQ ID NO: 16599 - DNA, 1159 bp, Zea Mays
gccgaactgggcctcaaccggaacttgttttaccccatctcatcccactgactccacccacccgcccgctgcctccgccggatctcgtcggactcggatccgcccgaccaccccgcgccgccgccgcgcagcagcagcaggtacgagaaatatgcccagaagaatgggtggaaatttgatgtcattgacataatggagtctgctgtgaaaggatacaagctagtggaactatatcaggtcctggggcgttcggcaaactaaagtttgagagtggcatccatagagttcagcgagtgccagcgactgagaaatctggacgaatgcacactagtgctgtatcagttgctgttcttccgcaagctgatgaggttgatgtccagctgcgaaatgaggacctgagaattgatacctacagatcaggtggctctggaggtcagtctgtcaatacaaccgatagtgctgttaggataactcatattccaaccggaacagtggttgcaatccaagatgagagatcacagcacatgaacaaggccaaagctctgaaagttctccgagcgcgactgtatgagttggagaggcgtagactacacatggacaggtcaaagcttcgatcagaacagattggaagcggtgacaggtctgagcgaatcagaacatacaacttcccacagggccgtgtcaccgaccatcgcgttggagtcacacaccactccatagcagatgtcatggagggggagagcctggacatgttcgttgatgcgctcctgcttcaagaagagatggacgccattgcttcatttggcgcatagctagattaaaccttgcaacattgattcacgtcatggacaaaatagagatcagcgaaaaacaataccgagcagtccactagtgaattgcctgtgcattgtgtcctgttttggcgtgtgctagttttacataatgctgaatttttaatgtaggcatgtgttataattgttgccgataaacgtgtcgctcatccaattctttccaaactacagttttgctggcaatgttttgttgttcgttctttccaaactacagttgtgctggcatggttttgttattcataaacttggtgcgcctgaattgtctatggacaaacatgtttataagtgatccttatttaagcttcagt

SEQ ID NO: 16600 - DNA, 1080 bp, Zea Mays
gccgaactgggcctcaaccggaacttgttttaccccatctcatcccactgactccacccacccgcccgctgcctccgccggatctcgtcggactcggatccgcccgaccaccccgcgccgccgccgcgcagcagcagcagctagtggaactatatcaggtcctggggcgttcggcaaactaaagtttgagagtggcatccatagagttcagcgagtgccagcgactgagaaatctggacgaatgcacactagtgctgtatcagttgctgttcttccgcaagctgatgaggttgatgtccagctgcgaaatgaggacctgagaattgatacctacagatcaggtggctctggaggtcagtctgtcaatacaaccgatagtgctgttaggataactcatattccaaccggaacagtggttgcaatccaagatgagagatcacagcacatgaacaaggccaaagctctgaaagttctccgagcgcgactgtatgagttggagaggcgtagactacacatggacaggtcaaagcttcgatcagaacagattggaagcggtgacaggtctgagcgaatcagaacatacaacttcccacagggccgtgtcaccgaccatcgcgttggagtcacacaccactccatagcagatgtcatggagggggagagcctggacatgttcgttgatgcgctcctgcttcaagaagagatggacgccattgcttcatttggcgcatagctagattaaaccttgcaacattgattcacgtcatggacaaaatagagatcagcgaaaaacaataccgagcagtccactagtgaattgcctgtgcattgtgtcctgttttggcgtgtgctagttttacataatgctgaatttttaatgtaggcatgtgttataattgttgccgataaacgtgtcgctcatccaattctttccaaactacagttttgctggcaatgttttgttgttcgttctttccaaactacagttgtgctggcatggttttgttattcataaacttggtgcgcctgaattgtctatggacaaacatgtttataagtgatccttatttaagcttcagt

SEQ ID NO: 16601 - DNA, 1386 bp, Zea Mays
gccgaactgggcctcaaccggaacttgttttaccccatctcatcccactgactccacccacccgcccgctgcctccgccggatctcgtcggactcggatccgcccgaccaccccgcgccgccgccgcgcagcagcagcaggaaatcgagggtctcaaatctttggtagcaaatgatcatgaagagaaagacatgcgtgagatggcagaagaggagcttcttgtggctgtcgaggaggagaaacgattgcagcatgaactgtttagatcgctgcttccaaaggatgaagcagatgaaaaggattgcatattggaggaactggaggagaagaggcttctttgtttgcaatggatatatttagaatgtacgagaaatatgcccagaagaatgggtggaaatttgatgtcattgacataatggagtctgctgtgaaaggatacaaggaagctagtggaactatatcaggtcctggggcgttcggcaaactaaagtttgagagtggcatccatagagttcagcgagtgccagcgactgagaaatctggacgaatgcacactagtgctgtatcagttgctgttcttccgcaagctgatgaggttgatgtccagctgcgaaatgaggacctgagaattgatacctacagatcaggtggctctggaggtcagtctgtcaatacaaccgatagtgctgttaggataactcatattccaaccggaacagtggttgcaatccaagatgagagatcacagcacatgaacaaggccaaagctctgaaagttctccgagcgcgactgtatgagttggagaggcgtagactacacatggacaggtcaaagcttcgatcagaacagattggaagcggtgacaggtctgagcgaatcagaacatacaacttcccacagggccgtgtcaccgaccatcgcgttggagtcacacaccactccatagcagatgtcatggagggggagagcctggacatgttcgttgatgcgctcctgcttcaagaagagatggacgccattgcttcatttggcgcatagctagattaaaccttgcaacattgattcacgtcatggacaaaatagagatcagcgaaaaacaataccgagcagtccactagtgaattgcctgtgcattgtgtcctgttttggcgtgtgctagttttacataatgctgaatttttaatgtaggcatgtgttataattgttgccgataaacgtgtcgctcatccaattctttccaaactacagttttgctggcaatgttttgttgttcgttctttccaaactacagttgtgctggcatggttttgttattcataaacttggtgcgcctgaattgtctatggacaaacatgtttataagtgatccttatttaagcttcagt

SEQ ID NO: 16602 - DNA, 1029 bp, Zea Mays
gccgaactgggcctcaaccggaacttgttttaccccatctcatcccactgactccacccacccgcccgctgcctccgccggatctcgtcggactcggatccgcccgaccaccccgcgccgccgccgcgcagcagcagaagctagtggaactatatcaggtcctggggcgttcggcaaactaaagtttgagagtggcatccatagagttcagcgagtgccagcgactgagaaatctggacgaatgcacactagtgctgtatcagttgctgttcttccgcaagctgatgaggttgatgtccagctgcgaaatgaggacctgagaattgatacctacagatcaggtggctctggaggtcagtctgtcaatacaaccgatagtgctgttaggataactcatattccaaccggaacagtggttgcaatccaagatgagagatcacagcacatgaacaaggccaaagctctgaaagttctccgagcgcgactgtatgagttggagaggcgtagactacacatggacaggtcaaagcttcgatcagaacagggccgtgtcaccgaccatcgcgttggagtcacacaccactccatagcagatgtcatggagggggagagcctggacatgttcgttgatgcgctcctgcttcaagaagagatggacgccattgcttcatttggcgcatagctagattaaaccttgcaacattgattcacgtcatggacaaaatagagatcagcgaaaaacaataccgagcagtccactagtgaattgcctgtgcattgtgtcctgttttggcgtgtgctagttttacataatgctgaatttttaatgtaggcatgtgttataattgttgccgataaacgtgtcgctcatccaattctttccaaactacagttttgctggcaatgttttgttgttcgttctttccaaactacagttgtgctggcatggttttgttattcataaacttggtgcgcctgaattgtctatggacaaacatgtttataagtgatccttatttaagcttcagt

SEQ ID NO: 16603 - DNA, 1323 bp, Zea Mays
gccgaactgggcctcaaccggaacttgttttaccccatctcatcccactgactccacccacccgcccgctgcctccgccggatctcgtcggactcggatccgcccgaccaccccgcgccgccgccgcgcagcagcagcaggaaatcgagggtctcaaatctttggtagcaaatgatcatgaagagaaagacatgcgtgagatggcagaagaggagcttcttgtggctgtcgaggaggagaaacgattgcagcatgaactgtttagatcgctgcttccaaaggatgaagcagatgaaaaggattgcatattggaggtgcgggcaggaactggaggagaagaggcttctttgtttgcaatggatatatttagaatgtacgagaaatatgcccagaagaatgggtggaaatttgatgtcattgacataatggagtctgctgtgaaaggatacaaggtcctggggcgttcggcaaactaaagtttgagagtggcatccatagagttcagcgagtgccagcgactgagaaatctggacgaatgcacactagtgctgtatcagttgctgttcttccgcaagctgatgaggttgatgtccagctgcgaaatgaggacctgagaattgatacctacagatcaggtggctctggaggtcagtctgtcaatacaaccgatagtgctgttaggataactcatattccaaccggaacagtggttgcaatccaagatgagagatcacagcacatgaacaaggccaaagctctgaaagttctccgagcgcgactgtatgagttggagaggcgtagactacacatggacaggtcaaagcttcgatcagaacagggccgtgtcaccgaccatcgcgttggagtcacacaccactccatagcagatgtcatggagggggagagcctggacatgttcgttgatgcgctcctgcttcaagaagagatggacgccattgcttcatttggcgcatagctagattaaaccttgcaacattgattcacgtcatggacaaaatagagatcagcgaaaaacaataccgagcagtccactagtgaattgcctgtgcattgtgtcctgttttggcgtgtgctagttttacataatgctgaatttttaatgtaggcatgtgttataattgttgccgataaacgtgtcgctcatccaattctttccaaactacagttttgctggcaatgttttgttgttcgttctttccaaactacagttgtgctggcatggttttgttattcataaacttggtgcgcctgaattgtctatggacaaacatgtttataagtgatccttatttaagcttcagt

SEQ ID NO: 16604 - DNA, 1574 bp, Zea Mays
gccgaactgggcctcaaccggaacttgttttaccccatctcatcccactgactccacccacccgcccgctgcctccgccggatctcgtcggactcggatccgcccgaccaccccgcgccgccgccgcgcagcagcagcagagatgagccagcagctccctgcgaacctagtggagatcatggagcagagaatgaagttgatcgagcagaggagcgcgtacctccaagagcaaatcaaccagccagccgcctcgccggaagagtactcgagggctaacaaggagttccgcaagctggagagcaccatggagttgatcaaagacctgagatcgaaacaggaggaaatcgagggtctcaaatctttggtagcaaatgatcatgaagagaaagacatgcgtgagatggcagaagaggagcttcttgtggctgtcgaggaggagaaacgattgcagcatgaactgtttagatcgctgcttccaaaggatgaagcagatgaaaaggattgcatattggaggtgcgggcaggaactggaggagaagaggcttctttgtttgcaatggatatatttagaatgtacgagaaatatgcccagaagaatgggtggaaatttgatgtcattgacataatggagtctgctgtgaaaggatacaaggtcctggggcgttcggcaaactaaagtttgagagtggcatccatagagttcagcgagtgccagcgactgagaaatctggacgaatgcacactagtgctgtatcagttgctgttcttccgcaagctgatgaggttgatgtccagctgcgaaatgaggacctgagaattgatacctacagatcaggtggctctggaggtcagtctgtcaatacaaccgatagtgctgttaggataactcatattccaaccggaacagtggttgcaatccaagatgagagatcacagcacatgaacaaggccaaagctctgaaagttctccgagcgcgactgtatgagttggagaggcgtagactacacatggacaggtcaaagcttcgatcagaacagattggaagcggtgacaggtctgagcgaatcagaacatacaacttcccacagggccgtgtcaccgaccatcgcgttggagtcacacaccactccatagcagatgtcatggagggggagagcctggacatgttcgttgatgcgctcctgcttcaagaagagatggacgccattgcttcatttggcgcatagctagattaaaccttgcaacattgattcacgtcatggacaaaatagagatcagcgaaaaacaataccgagcagtccactagtgaattgcctgtgcattgtgtcctgttttggcgtgtgctagttttacataatgctgaatttttaatgtaggcatgtgttataattgttgccgataaacgtgtcgctcatccaattctttccaaactacagttttgctggcaatgttttgttgttcgttctttccaaactacagttgtgctggcatggttttgttattcataaacttggtgcgcctgaattgtctatggacaaacatgtttataagtgatccttatttaagcttcagt

SEQ ID NO: 16605 - DNA, 1392 bp, Zea Mays
gccgaactgggcctcaaccggaacttgttttaccccatctcatcccactgactccacccacccgcccgctgcctccgccggatctcgtcggactcggatccgcccgaccaccccgcgccgccgccgcgcagcagcagcaggaaatcgagggtctcaaatctttggtagcaaatgatcatgaagagaaagacatgcgtgagatggcagaagaggagcttcttgtggctgtcgaggaggagaaacgattgcagcatgaactgtttagatcgctgcttccaaaggatgaagcagatgaaaaggattgcatattggaggtgcgggcaggaactggaggagaagaggcttctttgtttgcaatggatatatttagaatgtacgagaaatatgcccagaagaatgggtggaaatttgatgtcattgacataatggagtctgctgtgaaaggatacaagctagtggaactatatcaggtcctggggcgttcggcaaactaaagtttgagagtggcatccatagagttcagcgagtgccagcgactgagaaatctggacgaatgcacactagtgctgtatcagttgctgttcttccgcaagctgatgaggttgatgtccagctgcgaaatgaggacctgagaattgatacctacagatcaggtggctctggaggtcagtctgtcaatacaaccgatagtgctgttaggataactcatattccaaccggaacagtggttgcaatccaagatgagagatcacagcacatgaacaaggccaaagctctgaaagttctccgagcgcgactgtatgagttggagaggcgtagactacacatggacaggtcaaagcttcgatcagaacagattggaagcggtgacaggtctgagcgaatcagaacatacaacttcccacagggccgtgtcaccgaccatcgcgttggagtcacacaccactccatagcagatgtcatggagggggagagcctggacatgttcgttgatgcgctcctgcttcaagaagagatggacgccattgcttcatttggcgcatagctagattaaaccttgcaacattgattcacgtcatggacaaaatagagatcagcgaaaaacaataccgagcagtccactagtgaattgcctgtgcattgtgtcctgttttggcgtgtgctagttttacataatgctgaatttttaatgtaggcatgtgttataattgttgccgataaacgtgtcgctcatccaattctttccaaactacagttttgctggcaatgttttgttgttcgttctttccaaactacagttgtgctggcatggttttgttattcataaacttggtgcgcctgaattgtctatggacaaacatgtttataagtgatccttatttaagcttcagt

SEQ ID NO: 16606 - DNA, 1592 bp, Zea Mays
gccgaactgggcctcaaccggaacttgttttaccccatctcatcccactgactccacccacccgcccgctgcctccgccggatctcgtcggactcggatccgcccgaccaccccgcgccgccgccgcgcagcagcagcagagatgagccagcagctccctgcgaacctagtggagatcatggagcagagaatgaagttgatcgagcagaggagcgcgtacctccaagagcaaatcaaccagccagccgcctcgccggaagagtactcgagggctaacaaggagttccgcaagctggagagcaccatggagttgatcaaagacctgagatcgaaacaggaggaaatcgagggtctcaaatctttggtagcaaatgatcatgaagagaaagacatgcgtgagatggcagaagaggagcttcttgtggctgtcgaggaggagaaacgattgcagcatgaactgtttagatcgctgcttccaaaggatgaagcagatgaaaaggattgcatattggaggtgcgggcaggaactggaggagaagaggcttctttgtttgcaatggatatatttagaatgtacgagaaatatgcccagaagaatgggtggaaatttgatgtcattgacataatggagtctgctgtgaaaggatacaagctagtggaactatatcaggtcctggggcgttcggcaaactaaagtttgagagtggcatccatagagttcagcgagtgccagcgactgagaaatctggacgaatgcacactagtgctgtatcagttgctgttcttccgcaagctgatgaggttgatgtccagctgcgaaatgaggacctgagaattgatacctacagatcaggtggctctggaggtcagtctgtcaatacaaccgatagtgctgttaggataactcatattccaaccggaacagtggttgcaatccaagatgagagatcacagcacatgaacaaggccaaagctctgaaagttctccgagcgcgactgtatgagttggagaggcgtagactacacatggacaggtcaaagcttcgatcagaacagattggaagcggtgacaggtctgagcgaatcagaacatacaacttcccacagggccgtgtcaccgaccatcgcgttggagtcacacaccactccatagcagatgtcatggagggggagagcctggacatgttcgttgatgcgctcctgcttcaagaagagatggacgccattgcttcatttggcgcatagctagattaaaccttgcaacattgattcacgtcatggacaaaatagagatcagcgaaaaacaataccgagcagtccactagtgaattgcctgtgcattgtgtcctgttttggcgtgtgctagttttacataatgctgaatttttaatgtaggcatgtgttataattgttgccgataaacgtgtcgctcatccaattctttccaaactacagttttgctggcaatgttttgttgttcgttctttccaaactacagttgtgctggcatggttttgttattcataaacttggtgcgcctgaattgtctatggacaaacatgtttataagtgatccttatttaagcttcagt

SEQ ID NO: 16607 - DNA, 1793 bp, Zea Mays
gccgaactgggcctcaaccggaacttgttttaccccatctcatcccactgactccacccacccgcccgctgcctccgccggatctcgtcggactcggatccgcccgaccaccccgcgccgccgccgcgcagcagcagcaggccgaacccgaaggcaacgaggactagtagattcatacttccgccgccccgccgccgcgatgcagtatcacctacgccgatgcggcggaggcgccctcgccgctctctggcggctccgccacaacgcttcctctgccgtagcgtcgcctcctgtggcctggaggcgaccctgccttcctccacggttctactccaccgccgagatgagccagcagctccctgcgaacctagtggagatcatggagcagagaatgaagttgatcgagcagaggagcgcgtacctccaagagcaaatcaaccagccagccgcctcgccggaagagtactcgagggctaacaaggagttccgcaagctggagagcaccatggagttgatcaaagacctgagatcgaaacaggaggaaatcgagggtctcaaatctttggtagcaaatgatcatgaagagaaagacatgcgtgagatggcagaagaggagcttcttgtggctgtcgaggaggagaaacgattgcagcatgaactgtttagatcgctgcttccaaaggatgaagcagatgaaaaggattgcatattggaggtgcgggcaggaactggaggagaagaggcttctttgtttgcaatggatatatttagaatgtacgagaaatatgcccagaagaatgggtggaaatttgatgtcattgacataatggagtctgctgtgaaaggatacaagctagtggaactatatcaggtcctggggcgttcggcaaactaaagtttgagagtggcatccatagagttcagcgagtgccagcgactgagaaatctggacgaatgcacactagtgctgtatcagttgctgttcttccgcaagctgatgaggttgatgtccagctgcgaaatgaggacctgagaattgatacctacagatcaggtggctctggaggtcagtctgtcaatacaaccgatagtgctgttaggataactcatattccaaccggaacagtggttgcaatccaagatgagagatcacagcacatgaacaaggccaaagctctgaaagttctccgagcgcgactgtatgagttggagaggcgtagactacacatggacaggtcaaagcttcgatcagaacagattggaagcggtgacaggtctgagcgaatcagaacatacaacttcccacagggccgtgtcaccgaccatcgcgttggagtcacacaccactccatagcagatgtcatggagggggagagcctggacatgttcgttgatgcgctcctgcttcaagaagagatggacgccattgcttcatttggcgcatagctagattaaaccttgcaacattgattcacgtcatggacaaaatagagatcagcgaaaaacaataccgagcagtccactagtgaattgcctgtgcattgtgtcctgttttggcgtgtgctagttttacataatgctgaatttttaatgtaggcatgtgttataattgttgccgataaacgtgtcgctcatccaattctttccaaactacagttttgctggcaatgttttgttgttcgttctttccaaactacagttgtgctggcatggttttgttattcataaacttggtgcgcctgaattgtctatggacaaacatgtttataagtgatccttatttaagcttcagt

SEQ ID NO: 16608 - DNA, 1084 bp, Zea Mays
gccgaactgggcctcaaccggaacttgttttaccccatctcatcccactgactccacccacccgcccgctgcctccgccggatctcgtcggactcggatccgcccgaccaccccgcgccgccgccgcgcagcagcagcaggaagctagtggaactatatcaggtcctggggcgttcggcaaactaaagtttgagagtggcatccatagagttcagcgagtgccagcgactgagaaatctggacgaatgcacactagtgctgtatcagttgctgttcttccgcaagctgatgaggttgatgtccagctgcgaaatgaggacctgagaattgatacctacagatcaggtggctctggaggtcagtctgtcaatacaaccgatagtgctgttaggataactcatattccaaccggaacagtggttgcaatccaagatgagagatcacagcacatgaacaaggccaaagctctgaaagttctccgagcgcgactgtatgagttggagaggcgtagactacacatggacaggtcaaagcttcgatcagaacagattggaagcggtgacaggtctgagcgaatcagaacatacaacttcccacagggccgtgtcaccgaccatcgcgttggagtcacacaccactccatagcagatgtcatggagggggagagcctggacatgttcgttgatgcgctcctgcttcaagaagagatggacgccattgcttcatttggcgcatagctagattaaaccttgcaacattgattcacgtcatggacaaaatagagatcagcgaaaaacaataccgagcagtccactagtgaattgcctgtgcattgtgtcctgttttggcgtgtgctagttttacataatgctgaatttttaatgtaggcatgtgttataattgttgccgataaacgtgtcgctcatccaattctttccaaactacagttttgctggcaatgttttgttgttcgttctttccaaactacagttgtgctggcatggttttgttattcataaacttggtgcgcctgaattgtctatggacaaacatgtttataagtgatccttatttaagcttcagt

SEQ ID NO: 16609 - DNA, 942 bp, Zea Mays
agctagtggaactatatcaggtcctggggcgttcggcaaactaaagtttgagagtggcatccatagagttcagcgagtgccagcgactgagaaatctggacgaatgcacactagtgctgtatcagttgctgttcttccgcaagctgatgaggttgatgtccagctgcgaaatgaggacctgagaattgatacctacagatcaggtggctctggaggtcagtctgtcaatacaaccgatagtgctgttaggataactcatattccaaccggaacagtggttgcaatccaagatgagagatcacagcacatgaacaaggccaaagctctgaaagttctccgagcgcgactgtatgagttggagaggcgtagactacacatggacaggtcaaagcttcgatcagaacagattggaagcggtgacaggtctgagcgaatcagaacatacaacttcccacagggccgtgtcaccgaccatcgcgttggagtcacacaccactccatagcagatgtcatggagggggagagcctggacatgttcgttgatgcgctcctgcttcaagaagagatggacgccattgcttcatttggcgcatagctagattaaaccttgcaacattgattcacgtcatggacaaaatagagatcagcgaaaaacaataccgagcagtccactagtgaattgcctgtgcattgtgtcctgttttggcgtgtgctagttttacataatgctgaatttttaatgtaggcatgtgttataattgttgccgataaacgtgtcgctcatccaattctttccaaactacagttttgctggcaatgttttgttgttcgttctttccaaactacagttgtgctggcatggttttgttattcataaacttggtgcgcctgaattgtctatggacaaacatgtttataagtgatccttatttaagcttcagt

SEQ ID NO: 16610 - DNA, 529 bp, Zea Mays
catggcatcagcacgaccgaccgagtagcagcatcatgagcggaaattcttttgacatgtaagctagcgaaagacagacaggcagacctgcatcatgagcggcatgtccagcgggttgacgtccggcgagggctccggcagcagctgctccttggggatgagcatggggtggtcgaggtggcgggcctcctcgagcgagcacgcggcgttggcctccacgaaccaggcgccctcgccggtgcacgccacccgcgtctccccgccgccctccgcgtccaccaccacgaaccgccccgcgaacgggtagtagtccaccagcgccttccccagcgcctcccgcagcgccttggccggcgtcgccgtcgcctgctgccgcttcttgtcgccgcccgcggcgaacacgtgcagcgaccgcaccaggtggcgcagccccgccacgcggtcgatcaccgacagccgcagcgtctcccgcggcgtcgccgacgcaggcggcaccagcgacctgctcgtcctcttcaccgcgaacccg

SEQ ID NO: 16611 - DNA, 2028 bp, Zea Mays
tttccgtttcacgtttccggccgcttcttcattcggtttttcttctttctgcagtactagtagtagcttgcatagttggacatctctctctctctctctctctctctctctagctagtacggcaccggtcgtcacaagctgtatatagccgtgtcttcctcgccattacccggcttgatttgatacctcctcgctccagcctacccatccatggacttggtgccgaaacaccagcagcagcagcagcagcgagggatcaaggaggaagaggagatgacggtctttgcggagcacggggaccagcaggcgacttccggggccggccacggcggcggcggcgggcgcaggagcgagatcaaggaggtggacttcttctcggccgccgccggcggtgccgtgtctcgccgcatcaccgacgaggacgacggcggggaagatggcggtcgagagcccgcaggagcagtagctcgtggctgccgtaacaccacggtcaacactgcactggacctgctgaccaggccggcagcgggcgacggcggcgaggggacggcggccagtggtcgtgacgacgatacagagatggacgtggcggcggtggagggggagctgcggcaggccggcgaggagaaccggcagctgcggcggatgctggaggagctgacccggagctacggcgcgctctaccaccagctcatccaagcccaggcggcccagcaccaccaccaccaggccagcggcgcagcgaagccgatgctaccgacgtcgggagtgcagttcatggaccccgccggccgcgtccctccgcctccggctccggcgatggcagcaggagcggcgttcagcggtgaacgggggggcgactcagaaggtggaagcggaagcggcggcgaagcgggcccgaacgatgggacggggacgcctgagcgcggcgagaacgccgataaccgggcgccggcgccggcggaggcgcctctgcggagggcaagggtgtccgtgcgcgcacggtccgaggccccaatgatcagcgatggatgccagtggaggaagtatgggcagaagatggccaagggtaacccatgccccagagcttactatcgctgcacaatggccacaggatgcccagtcagaaaacaggtgcaacggtgcgcggaggacaaggcggtgctgatcaccacgtacgagggcacccacagccaccagctgccgccgcaggccgccgcgatggccaagaccacctcagccgcggccgccatgctcctctccggcccggccgtcagccgcgacgcgggcgcgctcttcgccggccaccacgtcgcggcgccgctcttcgcccagtaccacccctacgcgtcggccgccacgctctccgcctccgcgccgttcccgacgatcaccctcgacctcacgcactcgccgccgccgccggccgcgggcctgctccagcaccgtctgcccacgccgcccgtcccggccatgccgttcccgatgccgtacggcttccctggtgctggtgggcacaggctggcggcggcgccggtgccagccccacacccaccggccggcgcgacgctgctgggtttggacggaaggaaccggtcggcactggacaccatgacggccgcgatcgccagcgaccccaactttaccacggcgctggcggccgcgctctcgacgatcatggccggagccggaggcgctgagccacaagctcctcacctaagcggcgccgctgacgcctccggagatggtggtaacggtagcgccggcactgggcccgccacggctgcggctgccggagcacgtgagactgcattgcatgcgcttttgcaaaggcttaatgacagcaggcaatgacattggaaccaaagctctcatgcaccgccatctgtgcataaatccgtatacacacatcggctttaatttgtacgcttaatgtataccatagagccctcttatatacttactacgttgtagagagttgtaaatggattataattgagcttttataaaggcaatttgaattttcac

SEQ ID NO: 16612 - DNA, 1291 bp, Zea Mays
atttccaattgttccccattcttgcatccttcgtcgaaccccagcaatttcgatagaactgctcgagccctcctccctgttgccgccagacgcggcgctccgcgcgtgcatacagtcgccagccaccccgcgccgtgtgtccttgcggcatccgtcgggctctgcgtccttgcgttcttctggcccccacccgcgtcctcctgcatcctccgagcggcgggcgctgcccaggtcgacgaccacccatgccggcgtccccgtgtatccgtcgggcactgtggcgatgtgctcctccaacccggctctttgtccctgcgttcttccagcccccgctcgcgtcctcctacatcctccgagcggcgggcgctgcctaggtcgacgacagccccgcgccggtgtcccgtgcatctgtcgggcactgcggcgatgtgctcctctggcccagcgctgcgtccctacgttcttccaaccgcgtcctctgcatcctccgagcggcgggcgctgcccatgtcgacgactgcccctcactggcgtcctcgtgcatctattgtgcactgcggtgatgtggtcctctggatcagacgacatcctctaaatcctctaggcggtgggcgtcgcacccatcgatttcgcttgctctaggtggactcgtcgataggcaaccgaggatgacactatcggcgacctcaagaagctggtggtagcgctgacggaaacagggccaaaaagatccccatccaggagctcccctgcatcggcacacctcctattgtctgctgagctacggcctccctcgacctccctgaatttctctgtgatgaactatggttgcaagcattaaatttgtagatgtatgatcgaccgaatagatgtattctctattatatgccttgtgatgttgatctagatgaatggcaacttgtgtattcatttgtaggtgtatgatggacgaaagttgtcttggccttgtgatgttgtagtacaaagcagtgttcttggcatgggcaattgtaatagtttttttgatataaaaagatcatgaggttatacaaaagtgtggatataggtgcttcacaaatggacacatctctcactaagtccccgtaactttcaactataacatcaatgtttgagctatctttcttacatttccttattttttggctcaaaagtgtacaattagtcaccatactgttacaaactcacttcatgtgaagatgccccttatttgtatcatttactaatttatatggtttaaatgcctttccaagccagaaaaacaaaataaata

SEQ ID NO: 16613 - DNA, 744 bp, Zea Mays
ccgccgtccgcgcagcgtgaaagaaagaattggatgctgctgcttagcagcgaaggaagcgggcaggaaggccgtgtggggtccacacctccccggacacccgcgcagccgccgcccacgcttggtccgtcgaccgccggccgatcgattgatggatgcatgcatccaccgtccacgtacgcggcgacgagacgtgttgcgtttgcgtgccaccggactagctagtagatcgctcgactgccagggaagaggcaaagcgaaaggagagaaggaatccgatccatccaagccaagccaaggcagagaagaagaagaggaggaagaagaagcatcggcagcatgtcggaggggactgccaactgcgtggacatcctgatcgccatcatcctgcctcctcctcaccttcctcggctacatccccggcatcatctacgccatctacgccatcaccaagaacacctagctagtcatccttgccgacgacgatccatgtctctgtatctgtgtctgttcatatgcctgatgccgacttgtgctgtatgtagttgcttgaattcagtcgtgttcctgttttgctaccgtacccaccccatgcatcatctgtcaccgcgacgcaataatcatagtaataacaagttcagataatcgaattcattcgctgctaaaaaaacactaaaacgtcttacgattttaaaacagttttgttgtaataataatttgtataaatttcagtttcgtctttca

SEQ ID NO: 16614 - DNA, 2468 bp, Zea Mays
acacatagccggaagcaaaaccaagggaagggctaaacctcccttggcacaagccctcaaccacctccaccaccacctttaaaagaaggtgctaaagggctgtcctgcagagaaaaagagaggagtgccccccacaaacctttccttgcattccactgaaatcttcctatctgcaaccatgcagttgctcaattctggcctcagctgaagcccaaccatccattgttatataagtcgctgcagcctttgcaatttcccactccttcagccaccatcggtcattgaaggagcttcgtgccaccagagaaggtgttcgccgtgcataatcacagactatatacattccacagacctgtaaagctctgtgaatttggagctcccacaggttctgcattggcgttgagatggggaggcattcttgctgctacaagcaaaagttgagaaaggggctctggtcccccgaggaggatgagaaactcatgaaccacataacaaagcatggccatggctgctggagttctattcccaaactcgctgggctccaaaggtgcggaaagagttgtaggctgaggtggataaactatctgaggccagacctcaagagaggggcattctcccaagacgaagaagacctcatcattgagctgcacgctgtccttggaaacaggtggtctcaaattgcagctcagctgccagggaggactgataatgagatcaagaatctatggaactcgtgcatcaagaagaagctcaggcagaaaggcattgatcccaacacccacaagccccttactgaggctgatcgcagcggagcagctcccaccatcagcaccgagagaacctcagggtccagcgaaatcaacccatcaagcgctggtgctctgggaaacttgagccacctcctcagcgagacggctcaatcatcaatgctgatgcccgtgtatgacaagaatcgcgctgaaactccaaacttggcacgccctaaggtgccaccaaaggagttgttcctggagcagcttactgctggacacgagagtccatcaacctgccgctcatcaggccaaactctctatttccctttccaacagcctttaggctacaacagtgagagtggcagtggcgatggggcgaatatgaattcactctggttcaaccagagtgacttcaactgcagcacaatttctacagtgatgccgccagcttcaccatcggccctctctacatcaatggggctgaatcttccacctgataattctcgacatggaggaactggcattggaagtactgcagtagattcattctactgggatggtactaatcctagcagcagtagcagtactgggagcagaggaagcaacagtatgggatttgaaccacagagcacgagctcaattctggagaacagtgtcttccaatggacagacatcggacaagaaaaagatacaagagctcacctggtagaggaacttaagtggcctgacttgctccatggaacctttgccgagacgaccacagccatgcagaaccagagccagacgctctatgatgacgtgatcaaggcagagagccaattcagcatggaagggatatgtgcttcttggttccagaatcagcagccacagcaacagcttcaggcaacaccagacatgtatgacaaggacttgcaaagaatgcaactgtcttttgagaatatctaggcattatgttccacatggaacagagcagatcagcagaagcagaaatttgtaattttcagagattcgtgggcagaactatgctgaattgcttacatagatacattaagttgatacagaaatcatcctccacagctgctcctcagttgaagacctggcaatatcaaggaaaggacagccctggcattagaagtggcagcagaatgcatacaaaagaatggaaaacgattggttgatttgatagggtacaaaggagcaatcattctcaagaagaagtaaacacattcaggaaagaaaaaaggaagaaactattcatgaatatctacctaccatgtagattgggtaatctatgaagcctcaatgtggcaagaaaattggtggagctcggaagtctcaaaatcaaaaagatggcgtgtgagatctacaacaagactcgtggttggaggccagttgacagacgaatccgatgaaatgaaacatgttttgttatctggttattttggttcaataactgtgcggtcgttctacttcttctcccttgtagcgcctagctacaggaaaaactatgagatagaaatgctgcttgctgctttggtgtgatctgtgtgaactttgatgttggtcagctctgtgttactttttgtgttgctactagtagtttggtttggtcagggtttggtcctttttagctgatagttgtgtgttttgtcagctttaaaattctgggtgctcatgtggtattgtaagaacttatgtctctttctatttcgtaat

SEQ ID NO: 16615 - DNA, 2878 bp, Zea Mays
acacatagccggaagcaaaaccaagggaagggctaaacctcccttggcacaagccctcaaccacctccaccaccacctttaaaagaaggtgctaaagggctgtcctgcagagaaaaagagaggagtgccccccacaaacctttccttgcattccactgaaatcttcctatctgcaaccatgcagttgctcaattctggcctcagctgaagcccaaccatccattgttatataagtcgctgcagcctttgcaatttcccactccttcagccaccatcggtcattgaaggagcttcgtgccaccagagaaggtgttcgccgtgcataatcacagactatatacattccacagacctgtaaagctctgtgaatttggagctcccacaggttctgcattggcgttgagatggggaggcattcttgctgctacaagcaaaagttgagaaaggggctctggtcccccgaggaggatgagaaactcatgaaccacataacaaagcatggccatggctgctggagttctattcccaaactcgctgggctccaaaggtgcggaaagagttgtaggctgaggtggataaactatctgaggccagacctcaagagaggggcattctcccaagacgaagaagacctcatcattgagctgcacgctgtccttggaaacaggtggtctcaaattgcagctcagctgccagggaggactgataatgagatcaagaatctatggaactcgtgcatcaagaagaagctcaggcagaaaggcattgatcccaacacccacaagccccttactgaggctgatcgcagcggagcagctcccaccatcagcaccgagagaacctcagggtccagcgaaatcaacccatcaagcgctggtgctctgggaaacttgagccacctcctcagcgagacggctcaatcatcaatgctgatgcccgtgtatgacaagaatcgcgctgaaactccaaacttggcacgccctaaggtgccaccaaaggagttgttcctggagcagcttactgctggacacgagagtccatcaacctgccgctcatcaggccaaactctctatttccctttccaacagcctttaggctacaacagtgagagtggcagtggcgatggggcgaatatgaattcactctggttcaaccagagtgacttcaactgcagcacaatttctacagtgatgccgccagcttcaccatcggccctctctacatcaatggggctgaatcttccacctgataattctcgacatggaggaactggcattggaagtactgcagtagattcattctactgggatggtactaatcctagcagcagtagcagtactgggagcagaggaagcaacagtatgggatttgaaccacagagcacgagctcaattctggagaacagtgtcttccaatggacagacatcggacaagaaaaagatacaagagctcacctggtagaggaacttaagtggcctgacttgctccatggaacctttgccgagacgaccacagccatgcagaaccagagccagacgctctatgatgacgtgatcaaggcagagagccaattcagcatggaagggatatgtgcttcttggttccagaatcagcagccacagcaacagcttcaggcaacaccagacatgtatgacaaggacttgcaaagaatgcaactgtcttttgagaatatctaggcattatgttccacatggaacagagcagatcagcagaagcagaaatttgtaattttcagagattcgtgggcagaactatgctgaattgcttacatagatacattaagttgatacagaaatcatcctccacagctgctcctcagttgaagacctggcaatatcaaggaaaggacagccctggcattagaagtggcagcagaatgcatacaaaagtacgttctagagtctctttttctttatcttgaaaaatgatgtttccttctgtacacaacgactcaacttttgcatatttgagtttttgttcactctctggtggaaattaaataaatataggcagccatgggcaaaactgcatgtgttggtagctctcaccatgcaagtagacccaaacatttcaactgctgccatgcacgtccatgcaaattaattattgcatgttgtattttctttttcttttttttgataagttgccgacaaacgacagttgtatatttgtaagaagaaatttggaatgttgacctgagagctattttcttccccctttcactttcccgtttctgtcgtaaacttttctgtgtggagaacccaagctacttgagcgctttctacttgaatacaggaatggaaaacgattggttgatttgatagggtacaaaggagcaatcattctcaagaagaagtaaacacattcaggaaagaaaaaaggaagaaactattcatgaatatctacctaccatgtagattgggtaatctatgaagcctcaatgtgaaggcaagaaaattggtggagctcggaagtctcaaaatcaaaaagatggcgtgtgagatctacaacaagactcgtggttggaggccagttgacagacgaatccgatgaaatgaaacatgttttgttatctggttattttggttcaataactgtgcggtcgttctacttcttctcccttgtagcgcctagctacaggaaaaactatgagatagaaatgctgcttgctgctttggtgtgatctgtgtgaactttgatgttggtcagctctgtgttactttttgtgttgctactagtagtttggtttggtcagggtttggtcctttttagctgatagttgtgtgttttgtcagctttaaaattctgggtgctcatgtggtattgtaagaacttatgtctctttctatttcgtaat

SEQ ID NO: 16616 - DNA, 2321 bp, Zea Mays
acacatagccggaagcaaaaccaagggaagggctaaacctcccttggcacaagccctcaaccacctccaccaccacctttaaaagaaggtgctaaagggctgtcctgcagagaaaaagagaggagtgccccccacaaacctttccttgcattccactgaaatcttcctatctgcaaccatgcagttgctcaattctggcctcagctgaagcccaaccatccattgttatataagtcgctgcagcctttgcaatttcccactccttcagccaccatcggtcattgaaggagcttcgtgccaccagagaaggtgttcgccgtgcataatcacagactatatacattccacagacctgtaaagctctgtgaatttggagctcccacaggttctgcattggcgttgagatggggaggcattcttgctgctacaagcaaaagttgagaaaggggctctggtcccccgaggaggatgagaaactcatgaaccacataacaaagcatggccatggctgctggagttctattcccaaactcgctgggctccaaaggtgcggaaagagttgtaggctgaggtggataaactatctgaggccagacctcaagagaggggcattctcccaagacgaagaagacctcatcattgagctgcacgctgtccttggaaacaggtggtctcaaattgcagctcagctgccagggaggactgataatgagatcaagaatctatggaactcgtgcatcaagaagaagctcaggcagaaaggcattgatcccaacacccacaagccccttactgaggctgatcgcagcggagcagctcccaccatcagcaccgagagaacctcagggtccagcgaaatcaacccatcaagcgctggtgctctgggaaacttgagccacctcctcagcgagacggctcaatcatcaatgctgatgcccgtgtatgacaagaatcgcgctgaaactccaaacttggcacgccctaaggtgccaccaaaggagttgttcctggagcagcttactgctggacacgagagtccatcaacctgccgctcatcaggccaaactctctatttccctttccaacagcctttaggctacaacagtgagagtggcagtggcgatggggcgaatatgaattcactctggttcaaccagagtgacttcaactgcagcacaatttctacagtgatgccgccagcttcaccatcggccctctctacatcaatggggctgaatcttccacctgataattctcgacatggaggaactggcattggaagtactgcagtagattcattctactgggatggtactaatcctagcagcagtagcagtactgggagcagaggaagcaacagtatgggatttgaaccacagagcacgagctcaattctggagaacagtgtcttccaatggacagacatcggacaagaaaaagatacaagagctcacctggtagaggaacttaagtggcctgacttgctccatggaacctttgccgagacgaccacagccatgcagaaccagagccagacgctctatgatgacgtgatcaaggcagagagccaattcagcatggaagggatatgtgcttcttggttccagaatcagcagccacagcaacagcttcaggcaacaccagacatgtatgacaaggacttgcaaagaatgcaactgtcttttgagaatatctaggcattatgttccacatggaacagagcagatcagcagaagcagaaatttgtaattttcagagattcgtgggcagaactatgctgaattgcttacatagatacattaagttgatacagaaatcatcctccacagctgctcctcagttgaagacctggcaatatcaaggaaaggacagccctggcattagaagtggcagcagaatgcatacaaaaaaggcaagaaaattggtggagctcggaagtctcaaaatcaaaaagatggcgtgtgagatctacaacaagactcgtggttggaggccagttgacagacgaatccgatgaaatgaaacatgttttgttatctggttattttggttcaataactgtgcggtcgttctacttcttctcccttgtagcgcctagctacaggaaaaactatgagatagaaatgctgcttgctgctttggtgtgatctgtgtgaactttgatgttggtcagctctgtgttactttttgtgttgctactagtagtttggtttggtcagggtttggtcctttttagctgatagttgtgtgttttgtcagctttaaaattctgggtgctcatgtggtattgtaagaacttatgtctctttctatttcgtaat

SEQ ID NO: 16617 - DNA, 2390 bp, Zea Mays
acacatagccggaagcaaaaccaagggaagggctaaacctcccttggcacaagccctcaaccacctccaccaccacctttaaaagaaggtgctaaagggctgtcctgcagagaaaaagagaggagtgccccccacaaacctttccttgcattccactgaaatcttcctatctgcaaccatgcagttgctcaattctggcctcagctgaagcccaaccatccattgttatataagtcgctgcagcctttgcaatttcccactccttcagccaccatcggtcattgaaggagcttcgtgccaccagagaaggttctgcattggcgttgagatggggaggcattcttgctgctacaagcaaaagttgagaaaggggctctggtcccccgaggaggatgagaaactcatgaaccacataacaaagcatggccatggctgctggagttctattcccaaactcgctgggctccaaaggtgcggaaagagttgtaggctgaggtggataaactatctgaggccagacctcaagagaggggcattctcccaagacgaagaagacctcatcattgagctgcacgctgtccttggaaacaggtggtctcaaattgcagctcagctgccagggaggactgataatgagatcaagaatctatggaactcgtgcatcaagaagaagctcaggcagaaaggcattgatcccaacacccacaagccccttactgaggctgatcgcagcggagcagctcccaccatcagcaccgagagaacctcagggtccagcgaaatcaacccatcaagcgctggtgctctgggaaacttgagccacctcctcagcgagacggctcaatcatcaatgctgatgcccgtgtatgacaagaatcgcgctgaaactccaaacttggcacgccctaaggtgccaccaaaggagttgttcctggagcagcttactgctggacacgagagtccatcaacctgccgctcatcaggccaaactctctatttccctttccaacagcctttaggctacaacagtgagagtggcagtggcgatggggcgaatatgaattcactctggttcaaccagagtgacttcaactgcagcacaatttctacagtgatgccgccagcttcaccatcggccctctctacatcaatggggctgaatcttccacctgataattctcgacatggaggaactggcattggaagtactgcagtagattcattctactgggatggtactaatcctagcagcagtagcagtactgggagcagaggaagcaacagtatgggatttgaaccacagagcacgagctcaattctggagaacagtgtcttccaatggacagacatcggacaagaaaaagatacaagagctcacctggtagaggaacttaagtggcctgacttgctccatggaacctttgccgagacgaccacagccatgcagaaccagagccagacgctctatgatgacgtgatcaaggcagagagccaattcagcatggaagggatatgtgcttcttggttccagaatcagcagccacagcaacagcttcaggcaacaccagacatgtatgacaaggacttgcaaagaatgcaactgtcttttgagaatatctaggcattatgttccacatggaacagagcagatcagcagaagcagaaatttgtaattttcagagattcgtgggcagaactatgctgaattgcttacatagatacattaagttgatacagaaatcatcctccacagctgctcctcagttgaagacctggcaatatcaaggaaaggacagccctggcattagaagtggcagcagaatgcatacaaaagaatggaaaacgattggttgatttgatagggtacaaaggagcaatcattctcaagaagaagtaaacacattcaggaaagaaaaaaggaagaaactattcatgaatatctacctaccatgtagattgggtaatctatgaagcctcaatgtggtgagactcaatatatgatccattgagtttgtgcatcattatttatgtaacatagccatgatgtgttctgtaaatttagtcagtgaaatctcttaaagctttgcactttggctgagttaatattcagctgtcatgggggctgaagctagcatgcttcctgggtggctgggtctattcctcattgtttgtgcaatagtctagggcgagttttgtttacataaaatggtgtatcacccccctcaagctagctatgactgaaaaaacccaaatgagttaaagaacatggtttttcaacatcttcattaaaaggtacattgcctggattttgagaagccttactcgtacacatccctgccttttattttcttatagactttggcaattagtacactaggggatattaaata

SEQ ID NO: 16618 - DNA, 2799 bp, Zea Mays
acacatagccggaagcaaaaccaagggaagggctaaacctcccttggcacaagccctcaaccacctccaccaccacctttaaaagaaggtgctaaagggctgtcctgcagagaaaaagagaggagtgccccccacaaacctttccttgcattccactgaaatcttcctatctgcaaccatgcagttgctcaattctggcctcagctgaagcccaaccatccattgttatataagtcgctgcagcctttgcaatttcccactccttcagccaccatcggtcattgaaggagcttcgtgccaccagagaaggtgttctgcattggcgttgagatggggaggcattcttgctgctacaagcaaaagttgagaaaggggctctggtcccccgaggaggatgagaaactcatgaaccacataacaaagcatggccatggctgctggagttctattcccaaactcgctgggctccaaaggtgcggaaagagttgtaggctgaggtggataaactatctgaggccagacctcaagagaggggcattctcccaagacgaagaagacctcatcattgagctgcacgctgtccttggaaacaggtggtctcaaattgcagctcagctgccagggaggactgataatgagatcaagaatctatggaactcgtgcatcaagaagaagctcaggcagaaaggcattgatcccaacacccacaagccccttactgaggctgatcgcagcggagcagctcccaccatcagcaccgagagaacctcagggtccagcgaaatcaacccatcaagcgctggtgctctgggaaacttgagccacctcctcagcgagacggctcaatcatcaatgctgatgcccgtgtatgacaagaatcgcgctgaaactccaaacttggcacgccctaaggtgccaccaaaggagttgttcctggagcagcttactgctggacacgagagtccatcaacctgccgctcatcaggccaaactctctatttccctttccaacagcctttaggctacaacagtgagagtggcagtggcgatggggcgaatatgaattcactctggttcaaccagagtgacttcaactgcagcacaatttctacagtgatgccgccagcttcaccatcggccctctctacatcaatggggctgaatcttccacctgataattctcgacatggaggaactggcattggaagtactgcagtagattcattctactgggatggtactaatcctagcagcagtagcagtactgggagcagaggaagcaacagtatgggatttgaaccacagagcacgagctcaattctggagaacagtgtcttccaatggacagacatcggacaagaaaaagatacaagagctcacctggtagaggaacttaagtggcctgacttgctccatggaacctttgccgagacgaccacagccatgcagaaccagagccagacgctctatgatgacgtgatcaaggcagagagccaattcagcatggaagggatatgtgcttcttggttccagaatcagcagccacagcaacagcttcaggcaacaccagacatgtatgacaaggacttgcaaagaatgcaactgtcttttgagaatatctaggcattatgttccacatggaacagagcagatcagcagaagcagaaatttgtaattttcagagattcgtgggcagaactatgctgaattgcttacatagatacattaagttgatacagaaatcatcctccacagctgctcctcagttgaagacctggcaatatcaaggaaaggacagccctggcattagaagtggcagcagaatgcatacaaaagtacgttctagagtctctttttctttatcttgaaaaatgatgtttccttctgtacacaacgactcaacttttgcatatttgagtttttgttcactctctggtggaaattaaataaatataggcagccatgggcaaaactgcatgtgttggtagctctcaccatgcaagtagacccaaacatttcaactgctgccatgcacgtccatgcaaattaattattgcatgttgtattttctttttcttttttttgataagttgccgacaaacgacagttgtatatttgtaagaagaaatttggaatgttgacctgagagctattttcttccccctttcactttcccgtttctgtcgtaaacttttctgtgtggagaacccaagctacttgagcgctttctacttgaatacaggaatggaaaacgattggttgatttgatagggtacaaaggagcaatcattctcaagaagaagtaaacacattcaggaaagaaaaaaggaagaaactattcatgaatatctacctaccatgtagattgggtaatctatgaagcctcaatgtggtgagactcaatatatgatccattgagtttgtgcatcattatttatgtaacatagccatgatgtgttctgtaaatttagtcagtgaaatctcttaaagctttgcactttggctgagttaatattcagctgtcatgggggctgaagctagcatgcttcctgggtggctgggtctattcctcattgtttgtgcaatagtctagggcgagttttgtttacataaaatggtgtatcacccccctcaagctagctatgactgaaaaaacccaaatgagttaaagaacatggtttttcaacatcttcattaaaaggtacattgcctggattttgagaagccttactcgtacacatccctgccttttattttcttatagactttggcaattagtacactaggggatattaaata

SEQ ID NO: 16619 - DNA, 1410 bp, Zea Mays
agagaagaatgggaatccaaaatcctataagaccctcctcccttcatgcacagctctgccgcttgcctccgccggcgagggaagggacgaggcgccgagccggcaaccgttttcggggttgctggcggcgattggctgcggttccgcatcaaggctggtcgaacgctgcccctcctgatacataatatgcgtgtcaggcttggatacctggagtgttacttggaatacattgattatccaggagaaaaaaaggaatgggttaggctctttcgaaagaactctgcaaggtccaaccaaaattcaagtgatagtattcacaccatgataaggccttcatttccaaaatggtattttgtgcatgaagttcctgagcagttcccaaatagtgatgtcacagcaattgttgatgaaacctggcaaattggtgatcgagttgattggttgaaggaaggttgttattggtctgggacaattactaagataatcaatgaagatctggtcgagatagagctgccggcacctcccataggtgaaggaaaatgttataaagctaaatgtagtgatctgaggcctactctcgagtggtctctagcaagaggttggatggtccctctttcacagaatcagatgatgataatgacgacaacgatagctgggatgcccggcaaacggtgtgcagagcttcaaacacgcctgaggaagctccaggccccatggtccctgcacctccgtcagccacaaacaacgctcccagccacatgtatcagaaggatgctgctgtcacatccacagaggacctgctgaagcccagctcaacatccaagtcgccagaccccaggcacgacgcccaagctagcactcaacctgcaggtacgggggtctccatgaagccggaaccggttattggagtctcaacaatcaagaaagaggactcctccttgacagaaggtgaggttgatggcggcacggaagagtgcctggagaagctgggcgcgatcaaagccaggctcaaatacctcatgcagggcacgcggctggaacatgagcgcagcgccaccttccgtgggtagtcaggcagatgaagctgcatcaaaggtgcaacttcacgcaggggtttagggtttagggccatctaacgcctgttgtggttgctgaattttgtgtcctgtggttacaggtattattgtcctgaataatgacgttgtgaataagtggtttgtttttttgagtgcggcaatttgtaggagctaagaggaatgtgttgctgagttaagttatgaattagaccgtgtccagcagttcactcatatggtcatcctaaacaccgtgcagtagagtttgaatattagtatgaggatggataaactggtgcagatagccttatgttgtgaatgaatatgttgctgagta

SEQ ID NO: 16620 - DNA, 1431 bp, Zea Mays
agagaagaatgggaatccaaaatcctataagaccctcctcccttcatgcacagctctgccgcttgcctccgccggcgagggaagggacgaggcgccgagccggcaaccgttttcggggttgctggcggcgattggctgcggttccgcatcaaggctggtcgaacgctgcccctcctgattggtaggtagctcgagatggatctgattcttccatataaggttggggacctcgcggagtccaaatccttggtgagcggttacagaggtgcatggtttcgctgtaagatacataatatgcgtgtcaggcttggatacctggagtgttacttggaatacattgattatccaggagaaatgatgtcacagcaattgttgatgaaacctggcaaattggtgatcgagttgattggttgaaggaaggttgttattggtctgggacaattactaagataatcaatgaagatctggtcgagatagagctgccggcacctcccataggtgaaggaaaatgttataaagctaaatgtagtgatctgaggcctactctcgagtggtctctagcaagaggttggatggtccctctttcacaggcaaatggaaaaggttggcatgctgctcgtctacttcagcattataaatctgaatcagatgatgataatgacgacaacgatagctgggatgcccggcaaacggtgtgcagagcttcaaacacgcctgaggaagctccaggccccatggtccctgcacctccgtcagccacaaacaacgctcccagccacatgtatcagaaggatgctgctgtcacatccacagaggacctgctgaagcccagctcaacatccaagtcgccagaccccaggcacgacgcccaagctagcactcaacctgcaggtacgggggtctccatgaagccggaaccggttattggagtctcaacaatcaagaaagaggactcctccttgacagaaggtgaggttgatggcggcacggaagagtgcctggagaagctgggcgcgatcaaagccaggctcaaatacctcatgcagggcacgcggctggaacatgagcgcagcgccaccttccgtgggtagtcaggcagatgaagctgcatcaaaggtgcaacttcacgcaggggtttagggtttagggccatctaacgcctgttgtggttgctgaattttgtgtcctgtggttacaggtattattgtcctgaataatgacgttgtgaataagtggtttgtttttttgagtgcggcaatttgtaggagctaagaggaatgtgttgctgagttaagttatgaattagaccgtgtccagcagttcactcatatggtcatcctaaacaccgtgcagtagagtttgaatattagtatgaggatggataaactggtgcagatagccttatgttgtgaatgaatatgttgctgagta

SEQ ID NO: 16621 - DNA, 1308 bp, Zea Mays
agagaagaatgggaatccaaaatcctataagaccctcctcccttcatgcacagctctgccgcttgcctccgccggcgagggaagggacgaggcgccgagccggcaaccgttttcggggttgctggcggcgattggctgcggttccgcatcaaggctggtcgaacgctgcccctcctgattggtaggtagctcgagatggatctgattcttccatataaggttggggacctcgcggagtccaaatccttggtgagcggttacagaggtgcatggtttcgctatacataatatgcgtgtcaggcttggatacctggagtgttacttggaatacattgattatccaggagaaaatagagctgccggcacctcccataggtgaaggaaaatgttataaagctaaatgtagtgatctgaggcctactctcgagtggtctctagcaagaggttggatggtccctctttcacaggcaaatggaaaaggttggcatgctgctcgtctacttcagcattataaatctgaatcagatgatgataatgacgacaacgatagctgggatgcccggcaaacggtgtgcagagcttcaaacacgcctgaggaagctccaggccccatggtccctgcacctccgtcagccacaaacaacgctcccagccacatgtatcagaaggatgctgctgtcacatccacagaggacctgctgaagcccagctcaacatccaagtcgccagaccccaggcacgacgcccaagctagcactcaacctgcaggtacgggggtctccatgaagccggaaccggttattggagtctcaacaatcaagaaagaggactcctccttgacagaaggtgaggttgatggcggcacggaagagtgcctggagaagctgggcgcgatcaaagccaggctcaaatacctcatgcagggcacgcggctggaacatgagcgcagcgccaccttccgtgggtagtcaggcagatgaagctgcatcaaaggtgcaacttcacgcaggggtttagggtttagggccatctaacgcctgttgtggttgctgaattttgtgtcctgtggttacaggtattattgtcctgaataatgacgttgtgaataagtggtttgtttttttgagtgcggcaatttgtaggagctaagaggaatgtgttgctgagttaagttatgaattagaccgtgtccagcagttcactcatatggtcatcctaaacaccgtgcagtagagtttgaatattagtatgaggatggataaactggtgcagatagccttatgttgtgaatgaatatgttgctgagta

SEQ ID NO: 16622 - DNA, 1298 bp, Zea Mays
agagaagaatgggaatccaaaatcctataagaccctcctcccttcatgcacagctctgccgcttgcctccgccggcgagggaagggacgaggcgccgagccggcaaccgttttcggggttgctggcggcgattggctgcggttccgcatcaaggctggtcgaacgctgcccctcctgattggtaggtagctcgagatggatctgattcttccatataaggttggggacctcgcggagtccaaatccttggtgagcggttacagaggtgcatggtttcgctatacataatatgcgtgtcaggcttggatacctggagtgttacttggaatacattgattatccaggagaaacaattgttgatgaaacctggcaaattggtgatcgagttgattggttgaaggaaggttgttattggtctgggacaattactaagataatcaatgaagatctggtcgaggcaaatggaaaaggttggcatgctgctcgtctacttcagcattataaatctgaatcagatgatgataatgacgacaacgatagctgggatgcccggcaaacggtgtgcagagcttcaaacacgcctgaggaagctccaggccccatggtccctgcacctccgtcagccacaaacaacgctcccagccacatgtatcagaaggatgctgctgtcacatccacagaggacctgctgaagcccagctcaacatccaagtcgccagaccccaggcacgacgcccaagctagcactcaacctgcaggtacgggggtctccatgaagccggaaccggttattggagtctcaacaatcaagaaagaggactcctccttgacagaaggtgaggttgatggcggcacggaagagtgcctggagaagctgggcgcgatcaaagccaggctcaaatacctcatgcagggcacgcggctggaacatgagcgcagcgccaccttccgtgggtagtcaggcagatgaagctgcatcaaaggtgcaacttcacgcaggggtttagggtttagggccatctaacgcctgttgtggttgctgaattttgtgtcctgtggttacaggtattattgtcctgaataatgacgttgtgaataagtggtttgtttttttgagtgcggcaatttgtaggagctaagaggaatgtgttgctgagttaagttatgaattagaccgtgtccagcagttcactcatatggtcatcctaaacaccgtgcagtagagtttgaatattagtatgaggatggataaactggtgcagatagccttatgttgtgaatgaatatgttgctgagta

SEQ ID NO: 16623 - DNA, 1448 bp, Zea Mays
agagaagaatgggaatccaaaatcctataagaccctcctcccttcatgcacagctctgccgcttgcctccgccggcgagggaagggacgaggcgccgagccggcaaccgttttcggggttgctggcggcgattggctgcggttccgcatcaaggctggtcgaacgctgcccctcctgattggtaggtagctcgagatggatctgattcttccatataaggttggggacctcgcggagtccaaatccttggtgagcggttacagaggtgcatggtttcgctatacataatatgcgtgtcaggcttggatacctggagtgttacttggaatacattgattatccaggagaaaaaaaggaatgggttaggctctttcgaaagaactctgcaaggtccaaccaaaattcaagtgatagtattcacaccatgataaggccttcatttccaaaatggtattttgtgcatgaagttcctgagcagttcccaaatagtgatgtcacagcaattgttgatgaaacctggcaaattggtgatcgagttgattggttgaaggaaggttgttattggtctgggacaattactaagataatcaatgaagatctggtcgaggcaaatggaaaaggttggcatgctgctcgtctacttcagcattataaatctgaatcagatgatgataatgacgacaacgatagctgggatgcccggcaaacggtgtgcagagcttcaaacacgcctgaggaagctccaggccccatggtccctgcacctccgtcagccacaaacaacgctcccagccacatgtatcagaaggatgctgctgtcacatccacagaggacctgctgaagcccagctcaacatccaagtcgccagaccccaggcacgacgcccaagctagcactcaacctgcaggtacgggggtctccatgaagccggaaccggttattggagtctcaacaatcaagaaagaggactcctccttgacagaaggtgaggttgatggcggcacggaagagtgcctggagaagctgggcgcgatcaaagccaggctcaaatacctcatgcagggcacgcggctggaacatgagcgcagcgccaccttccgtgggtagtcaggcagatgaagctgcatcaaaggtgcaacttcacgcaggggtttagggtttagggccatctaacgcctgttgtggttgctgaattttgtgtcctgtggttacaggtattattgtcctgaataatgacgttgtgaataagtggtttgtttttttgagtgcggcaatttgtaggagctaagaggaatgtgttgctgagttaagttatgaattagaccgtgtccagcagttcactcatatggtcatcctaaacaccgtgcagtagagtttgaatattagtatgaggatggataaactggtgcagatagccttatgttgtgaatgaatatgttgctgagta

SEQ ID NO: 16624 - DNA, 1401 bp, Zea Mays
agagaagaatgggaatccaaaatcctataagaccctcctcccttcatgcacagctctgccgcttgcctccgccggcgagggaagggacgaggcgccgagccggcaaccgttttcggggttgctggcggcgattggctgcggttccgcatcaaggctggtcgaacgctgcccctcctgattggtaggtagctcgagatggatctgattcttccatataaggttggggacctcgcggagtccaaatccttggtgagcggttacagaggtgcatggtttcgctgtaagatacataatatgcgtgtcaggcttggatacctggagtgttacttggaatacattgattatccaggagaaaaaaaggaatgggttaggctctttcgaaagaactctgcaaggtccaaccaaaattcaagtgatagtattcacaccatgataaggccttcatttccaaaatggtattttgtgcatgaagttcctgagcagttcccaaatagtgatgtcacagcaattgttgatgaaacctggcaaattggtgatcgagttgattggttgaaggaaggttgttattggtctgggacaattactaagataatcaatgaagatctggtcgagaatcagatgatgataatgacgacaacgatagctgggatgcccggcaaacggtgtgcagagcttcaaacacgcctgaggaagctccaggccccatggtccctgcacctccgtcagccacaaacaacgctcccagccacatgtatcagaaggatgctgctgtcacatccacagaggacctgctgaagcccagctcaacatccaagtcgccagaccccaggcacgacgcccaagctagcactcaacctgcaggtacgggggtctccatgaagccggaaccggttattggagtctcaacaatcaagaaagaggactcctccttgacagaaggtgaggttgatggcggcacggaagagtgcctggagaagctgggcgcgatcaaagccaggctcaaatacctcatgcagggcacgcggctggaacatgagcgcagcgccaccttccgtgggtagtcaggcagatgaagctgcatcaaaggtgcaacttcacgcaggggtttagggtttagggccatctaacgcctgttgtggttgctgaattttgtgtcctgtggttacaggtattattgtcctgaataatgacgttgtgaataagtggtttgtttttttgagtgcggcaatttgtaggagctaagaggaatgtgttgctgagttaagttatgaattagaccgtgtccagcagttcactcatatggtcatcctaaacaccgtgcagtagagtttgaatattagtatgaggatggataaactggtgcagatagccttatgttgtgaatgaatatgttgctgagta

SEQ ID NO: 16625 - DNA, 1368 bp, Zea Mays
agagaagaatgggaatccaaaatcctataagaccctcctcccttcatgcacagctctgccgcttgcctccgccggcgagggaagggacgaggcgccgagccggcaaccgttttcggggttgctggcggcgattggctgcggttccgcatcaaggctggtcgaacgctgcccctcctgattggtaggtagctcgagatggatctgattcttccatataaggttggggacctcgcggagtccaaatccttggtgagcggttacagaggtgcatggtttcgctgtaagatacataatatgcgtgtcaggcttggatacctggagtgttacttggaatacattgattatccaggagaaacaattgttgatgaaacctggcaaattggtgatcgagttgattggttgaaggaaggttgttattggtctgggacaattactaagataatcaatgaagatctggtcgagatagagctgccggcacctcccataggtgaaggaaaatgttataaagctaaatgtagtgatctgaggcctactctcgagtggtctctagcaagaggttggatggtccctctttcacagaatcagatgatgataatgacgacaacgatagctgggatgcccggcaaacggtgtgcagagcttcaaacacgcctgaggaagctccaggccccatggtccctgcacctccgtcagccacaaacaacgctcccagccacatgtatcagaaggatgctgctgtcacatccacagaggacctgctgaagcccagctcaacatccaagtcgccagaccccaggcacgacgcccaagctagcactcaacctgcaggtacgggggtctccatgaagccggaaccggttattggagtctcaacaatcaagaaagaggactcctccttgacagaaggtgaggttgatggcggcacggaagagtgcctggagaagctgggcgcgatcaaagccaggctcaaatacctcatgcagggcacgcggctggaacatgagcgcagcgccaccttccgtgggtagtcaggcagatgaagctgcatcaaaggtgcaacttcacgcaggggtttagggtttagggccatctaacgcctgttgtggttgctgaattttgtgtcctgtggttacaggtattattgtcctgaataatgacgttgtgaataagtggtttgtttttttgagtgcggcaatttgtaggagctaagaggaatgtgttgctgagttaagttatgaattagaccgtgtccagcagttcactcatatggtcatcctaaacaccgtgcagtagagtttgaatattagtatgaggatggataaactggtgcagatagccttatgttgtgaatgaatatgttgctgagta

SEQ ID NO: 16626 - DNA, 1206 bp, Zea Mays
agagaagaatgggaatccaaaatcctataagaccctcctcccttcatgcacagctctgccgcttgcctccgccggcgagggaagggacgaggcgccgagccggcaaccgttttcggggttgctggcggcgattggctgcggttccgcatcaaggctggtcgaacgctgcccctcctgatacataatatgcgtgtcaggcttggatacctggagtgttacttggaatacattgattatccaggagaaatgatgtcacagcaattgttgatgaaacctggcaaattggtgatcgagttgattggttgaaggaaggttgttattggtctgggacaattactaagataatcaatgaagatctggtcgaggcaaatggaaaaggttggcatgctgctcgtctacttcagcattataaatctgaatcagatgatgataatgacgacaacgatagctgggatgcccggcaaacggtgtgcagagcttcaaacacgcctgaggaagctccaggccccatggtccctgcacctccgtcagccacaaacaacgctcccagccacatgtatcagaaggatgctgctgtcacatccacagaggacctgctgaagcccagctcaacatccaagtcgccagaccccaggcacgacgcccaagctagcactcaacctgcaggtacgggggtctccatgaagccggaaccggttattggagtctcaacaatcaagaaagaggactcctccttgacagaaggtgaggttgatggcggcacggaagagtgcctggagaagctgggcgcgatcaaagccaggctcaaatacctcatgcagggcacgcggctggaacatgagcgcagcgccaccttccgtgggtagtcaggcagatgaagctgcatcaaaggtgcaacttcacgcaggggtttagggtttagggccatctaacgcctgttgtggttgctgaattttgtgtcctgtggttacaggtattattgtcctgaataatgacgttgtgaataagtggtttgtttttttgagtgcggcaatttgtaggagctaagaggaatgtgttgctgagttaagttatgaattagaccgtgtccagcagttcactcatatggtcatcctaaacaccgtgcagtagagtttgaatattagtatgaggatggataaactggtgcagatagccttatgttgtgaatgaatatgttgctgagta

SEQ ID NO: 16627 - DNA, 1285 bp, Zea Mays
cagctttttagattgatcatcgtcgaattccacaacagccaaagctatttctcagtcggcaaaattaactatttgtcaataggaggtgaaatggcatacaaaatgcaatgccagctactttgtcagtgacggattttcgctagtgagagtgattcccgcagatcagagagaaccccgcctcggcgcctcccaacgacctcgccaccagggattcagagcgatacctcgcgaaccgcattgctgtgctcaaccagtcttctttgtcagtgtcctgacgtgacacatctggtcactgacacagacgcggcggcggcggcggtgtagagccgagagcgtcgcggtggtccgcaacgtggggacgctgaggcggcgttcggcgtcgtggaggtggttgtcgtcgacgtcggccgccgcgacgtcagcgcctccggcagccacggcaccacctcgcgcctccgccacttcgcctccctacccctagcccgcgcctacctcaaggcaagctatcccgccattgctcaccagacccctaaaccctagtcccctgccctccatttgtttgtgcaggacgggagagggtgtgacatctgcggcatggagatcatcgacgatgcgtagccggtttccgacaatgagtctgggctgacacaaacatgcagtacaacagcacttagtcagaatgtcttccgtggaaagtgaagttgaacccatgcataaggggaaaacaactggagatgaaaatgagatgacgtgaaatttgtatatatcttggaagttatttttggacagcttataataattgagcattcaggaaccacgaagattgcacatgcataataaaagcttacgaacaagtaggtaaacctgacaatgctctattcttattccattgatgtggtgatacagatatttgcacaaagcccatctgaatgccaggataacattcaaaagggccacctcaatggtaatgatgttgttagaagtgctctgcattggaaaaataaataaaggacatcaagttatacccatttaaaccctaaggccttgttcgttttgtgccaatccatagggattgagggggattaaatcccctacaagtcaaaatcctccccaatccctttcaatccccctcaatccttatggttttgggatcaaacgaacatggcctaagggatttcttcaatgtactccttgattctgtgtagctgagcagcagcatgttccatgttcattctttctgacgggttgtcctttgaacatgagacaccaactcgtatcacagaag

SEQ ID NO: 16628 - DNA, 1578 bp, Zea Mays
cccggccaaaaattccccaatcgctcgttttccaccgccgcggcggggctaaatcgcccggttttccccaagccaccgtcgctccacgccaccccagcgtcgccgcctccacacgttcgtccccggtaacacccgtttttatccgtcctaccaccccgcacgcccgctcgcctcctcctatcgtcgcatctctccacggccgcgagcagcaatcgatggtgggggacctgtccctcctcgccgtcgcctccgcctcccccgtcgtcctcccgccttccaagattctcaccctgactcggttcaacttagccttgggattgcggagcaatgtgcaaggcaagagaaactcctcaagtttctggtgtcaggatctgatgtaaaggaacttgatgaatccttgttagctgaattcacggggcaacagactctagcaataaacatgggaactcatccatatatgccggatgataagctatcaattcctgaattcatgttgaatgagccccaacactatctgccagagaaagaacttgtcatcccagatcctcttctgcacttcatccagtcccatggtgctgctcttactattgatcaaagtggtcgggtcctcttagctggcaatggtgatgagatgagagacttgctctcaattttcctggcgttcaacatgtcgagacgagaaacaggtggctgcaaggctgcatttcttgttccatactttgagaggaaaagacgttctagggctaacagccaagtatccaatttaaaattagcaggcacaactgctgatgtttcaaaaagaaacataaagtgaaaaacatcaaagaacgtgactcgtatcagagaaactacatacatgctagcgaggttattttatccatcctgctggacaaggacaggagcagctcgacaatcctctcgctgaaaaaggctggtcctgagatcactgaacttttaacgcaatgctctatcggcattgctggaactggactggctattctcctgtcagttatgtgcaagatgtctaatggcatgaggactccttttgcttctgcccgactgcttagcaccagcgtcggattcggactcttctggctatcctgggcagtcaatggattgcgtgacaccatcgccagcattttcagaagccgaagtggcatgaatatcgaggatgacgaggtcgcagtgaaaatagaaaaaagtgtgaacgagatcctcttcagggcattaactctcctggcaatcactgcactgaagtttgcatgagcagtcatcacgattttataggtttgtcgatgcagttgtgatatactcacctatgtctatgtggttcaggagtgtagacgtgtagtactgctttctgtaggaccaagttccacctgcccaaaccatggttatagcttcccagttctcattgatctcgtagaaaatgagccaagttgtaaattgtacagaaattttgcaggaaactcggtgtatattgtggatgatggattttaactctgtgaacattggataatctgatgcccagagcttatttatatttttatctacttaatagctgctgcattgtttctt

SEQ ID NO: 16629 - DNA, 1848 bp, Zea Mays
agaaaagaaaagaaacgccctcgacttccggtccgtccgcacgccccggccaaaaattccccaatcgctcgttttccaccgccgcggcggggctaaatcgcccggttttccccaagccaccgtcgctccacgccaccccagcgtcgccgcctccacacgttcgtccccggtaacacccgtttttatccgtcctaccaccccgcacgcccgctcgcctcctcctatcgtcgcatctctccacggccgcgagcagcaatcgatggtgggggacctgtccctcctcgccgtcgcctccgcctcccccgtcgtcctcccgccttccaaggagctccatggcgtgcttcctctccagggtaagagaccgcaggacgccggcgtgcagctctgcgcgccgttgcagcagcatccgccccaccatctagaggcggtgccttaccaccagggccagcccgtgcagatggtcgtgcccggcaaccatcagggacaggccctcccggcggcctaccaggccatcacgatgcccgacacggccgtgctcatcgacgtgcaagattctcaccctgactcggttcaacttagccttgggattgcggagcaatgtgcaaggcaagagaaactcctcaagtttctggtgtcaggatctgatgtaaaggaacttgatgaatccttgttagctgaattcacggggcaacagactctagcaataaacatgggaactcatccatatatgccggatgataagctatcaattcctgaattcatgttgaatgagccccaacactatctgccagagaaagaacttgtcatcccagatcctcttctgcacttcatccagtcccatggtgctgctcttactattgatcaaagtggtcgggtcctcttagctggcaatggtgatgagatgagagacttgctctcaattttcctggcgttcaacatgtcgagacgagaaacaggtggctgcaaggctgcatttcttgttccatactttgagaggaaaagacgttctagggctaacagccaagtatccaatttaaaattagcaggcacaactgctgatgtttcaaaaagaaacataaagtgaaaaacatcaaagaacgtgactcgtatcagagaaactacatacatgctagcgaggttattttatccatcctgctggacaaggacaggagcagctcgacaatcctctcgctgaaaaaggctggtcctgagatcactgaacttttaacgcaatgctctatcggcattgctggaactggactggctattctcctgtcagttatgtgcaagatgtctaatggcatgaggactccttttgcttctgcccgactgcttagcaccagcgtcggattcggactcttctggctatcctgggcagtcaatggattgcgtgacaccatcgccagcattttcagaagccgaagtggcatgaatatcgaggatgacgaggtcgcagtgaaaatagaaaaaagtgtgaacgagatcctcttcagggcattaactctcctggcaatcactgcactgaagtttgcatgagcagtcatcacgattttataggtttgtcgatgcagttgtgatatactcacctatgtctatgtggttcaggagtgtagacgtgtagtactgctttctgtaggaccaagttccacctgcccaaaccatggttatagcttcccagttctcattgatctcgtagaaaatgagccaagttgtaaattgtacagaaattttgcaggaaactcggtgtatattgtggatgatggattttaactctgtgaacattggataatctgatgcccagagcttatttatatttttatctacttaatagctgctgcattgtttctt

SEQ ID NO: 16630 - DNA, 2125 bp, Zea Mays
atgctactacgggtctacgccgagggggagggagggaaagcgcgctttgcagtctcctactgcatatcccgtttccctgagtctatttctcctccgtctgattactgatgggtctggtgcaggcgcggggcatggtcgacaggttccggatgcgcgccaagggcggcgacggcggcaatggctgcgtcagcctccggcgctctaggtccaaccgccacggcatgcctgacggtggtaatggagggaagggtggtgatgtaattcttgagtgctcacggtctatctgggatttcagtggcttgcagcatcacatgagaggaggccgaggtggcaatggagtttctaagaatcagataggaacaagagattgcacaagtacctgtaggcacagtgattcatcttgtcgaaggggagcaaccttctctcacagtaaataaaccgaccagagctctagatccctgggacatacctagtgctgaagaacactcttcagatttgtaccagattgctaatatagtgacagaaggttttgatggtggcttgccccatcagcatattgcccctaagcataacactgatggaaatgacactgtaaagggaagcaacagtaactcggataatccaaaatactttcatacatgctccaaggctcagttctcaaacacaaatcgtgatgtaagaatctattcatgtcaagagggcacagatgaaaaagatcagactgaaagtggggatgaagaattttgggaggatgaagacgagtttgacatggatgaggaggaagaagaggatgagagggaagaacaagatgtgcaatattgtattgctgagatgacaaaacctgggcagcagttaatcatagcacgaggaggcaaaggtggactggggaatgcttttatcatgaaggagatgcggccatccaaagcaaacagacaagagaagatagcccatttgagtactgggcagccaggaactcagagcttgcttatcctggaactgaagagcattgcagatgttggtctggttgggttgcccaatgctgggaagagcacattgctcagtgctctctctagggcgcacccagagatcgccgactatgagttcaccacgctgaggcccaacattggtagcctgatctacgaggactacttctcggttaaagtggctgatatacctggactgatcaaaggagcacatgagaaccgtggcctgggtcatgctttcctaaggcacatagagcgcaccaaagttatcgcctatgtgcttgaccttgcagccacacttaatggcaggaaaggtgtcccaccttgggagcagctgcacgatttggtcgcagagctggagcattaccaagaaggaatgactcggcggccatcactgattgtcgcaaacaagatagacgaagagggagctgaagagatgtgccaggagctgaagaggagagtgcagggagttccaatatttccagtttgcgccatcttgcaagagggggtgccagatctgagagtgggtctaaggaaccttatggatgactcagatccacagggcaaaaattttgagaaaaatgactgttgaatgagattctattttttttctttctcatgacactaacacatatgagtgtgcggggattagatctgcaaatattgatgactctggctattcctttcttgttgtgttgatgacaataattgaacatttgtaatcttatcattcttgtgaaagagcagaaatactatagggtttgtttcagggcagcagcagctgaaacattgggcttggtcagtaaataaacagaactgcatctgtacttggtaaaatcaacaagtcaaagaattagagcctgtttttctctattctgggagctagttctcaatgtcactgtaatctgcacgtctctgacttcctaacttctaagcatgctactactgtatccctttgtaatttaatcagctgtaccatccaatactctgtttacatttgtagtaacactttgcaaagaaactattatgttggagtttctttgcttttataaatgttatgtttttgtttaatcagctgtaccattcaatactctgtttacatcctagcttgtggaggagtcaatctccttgccgtcatattc

SEQ ID NO: 16631 - DNA, 2117 bp, Zea Mays
atgctactacgggtctacgccgagggggagggagggaaagcgcgctttgcagtctcctactgcatatcccgtttccctgagtctatttctcctccgtctgattactgatgggtctggtgcaggcgcggggcatggtcgacaggttccggatgcgcgccaagggcggcgacggcggcaatggctgcgtcagcctccggcgctctaggtccaaccgccacggcatgcctgacggtggtaatggagggaagggtggtgatgtaattcttgagtgctcacggtctatctgggatttcagtggcttgcagcatcacatgagaggaggccgaggtggcaatggagtttctaagaatcagataggaacaagaggttctgacaaggcacagtgattcatcttgtcgaaggggagcaaccttctctcacagtaaataaaccgaccagagctctagatccctgggacatacctagtgctgaagaacactcttcagatttgtaccagattgctaatatagtgacagaaggttttgatggtggcttgccccatcagcatattgcccctaagcataacactgatggaaatgacactgtaaagggaagcaacagtaactcggataatccaaaatactttcatacatgctccaaggctcagttctcaaacacaaatcgtgatgtaagaatctattcatgtcaagagggcacagatgaaaaagatcagactgaaagtggggatgaagaattttgggaggatgaagacgagtttgacatggatgaggaggaagaagaggatgagagggaagaacaagatgtgcaatattgtattgctgagatgacaaaacctgggcagcagttaatcatagcacgaggaggcaaaggtggactggggaatgcttttatcatgaaggagatgcggccatccaaagcaaacagacaagagaagatagcccatttgagtactgggcagccaggaactcagagcttgcttatcctggaactgaagagcattgcagatgttggtctggttgggttgcccaatgctgggaagagcacattgctcagtgctctctctagggcgcacccagagatcgccgactatgagttcaccacgctgaggcccaacattggtagcctgatctacgaggactacttctcggttaaagtggctgatatacctggactgatcaaaggagcacatgagaaccgtggcctgggtcatgctttcctaaggcacatagagcgcaccaaagttatcgcctatgtgcttgaccttgcagccacacttaatggcaggaaaggtgtcccaccttgggagcagctgcacgatttggtcgcagagctggagcattaccaagaaggaatgactcggcggccatcactgattgtcgcaaacaagatagacgaagagggagctgaagagatgtgccaggagctgaagaggagagtgcagggagttccaatatttccagtttgcgccatcttgcaagagggggtgccagatctgagagtgggtctaaggaaccttatggatgactcagatccacagggcaaaaattttgagaaaaatgactgttgaatgagattctattttttttctttctcatgacactaacacatatgagtgtgcggggattagatctgcaaatattgatgactctggctattcctttcttgttgtgttgatgacaataattgaacatttgtaatcttatcattcttgtgaaagagcagaaatactatagggtttgtttcagggcagcagcagctgaaacattgggcttggtcagtaaataaacagaactgcatctgtacttggtaaaatcaacaagtcaaagaattagagcctgtttttctctattctgggagctagttctcaatgtcactgtaatctgcacgtctctgacttcctaacttctaagcatgctactactgtatccctttgtaatttaatcagctgtaccatccaatactctgtttacatttgtagtaacactttgcaaagaaactattatgttggagtttctttgcttttataaatgttatgtttttgtttaatcagctgtaccattcaatactctgtttacatcctagcttgtggaggagtcaatctccttgccgtcatattc

SEQ ID NO: 16632 - DNA, 3323 bp, Zea Mays
caaagatcaagcattttttaggggagctccttgattgaagagcttgaagatgcaatatataagaataaaaaaacaccaatatcctactcagagttagcagctctgaaagaagggcgattcaatgcatccattcagcatcggctagctgaacttgaaggattaccttctactaggggtgaagacttgcaaatgaagtgtttgcttgaaatgtatgggcttaagctgttagatttgcagaagaaagtgcgatctgatatcagtgcagaatattggctacagaagaaatgtgcatatccggagaggcaactttttgattgggggctgatgcggatacggtatcctttatccatgtatggaataggagatatcctttcaatggatgctgatgatgttcaccgcaaaaagagatttacagagaggatgtcaagactcgaagaggaagaaaaaaatcaggcagatattaggaagaggaagttctttgcagaaattctaaatgcttctagggaacaccaggtgcaattaggcactacattcaagcaaagaaagcagcggaatgatggagtccaggcatggcatgttcgggcacgtcaacgtatctcacggcaagagaaaaataggttgaatcttctgaaaattggtgatcaagtagcatatatgaagatggttgaggagagcaagaacgaacgtctgaaaatgctccttgacaaaacaaatgagcttcttgaaggaattggaaaagctgtacagcgacaaaaagatgctgagcatgttagtcagcatgaagggagtgaagtgccaaaagggtcagagtctgaggattgctctcaaatctcaggcgtcaagagtgaatcacctggggaatctccttcagatgacgatgcagactttgctggctctgcagatgaaagtaaattcaatgcaggtcgtagacttgattttactgtccattccattgaagaaaaggtgacagaacaaccatcagctctcgaaggtggggaattgaggccatatcaactggagggtctccaatggatgctttctttgtttaacaacaatttgaatggcattctggctgatgaaatgggtctgggtaaaacaattcagaccatagctttgatagcttatctgttggaaaataaggaggttgcaggaccacacttaataattgctccaaaagcagtattaccaaattggtctaacgaattcaaaacctgggctcccagtattgggacaattctgtatgatggtcgtccagaagagaggaagcttttaagggaaaagaattttgatggattgcaatttaatgttttgctcacgcattatgacttgatactgaaagataagaagttcctaaagaaagttcactggcattatttgattgttgatgaaggacatcgtctgaaaaatcatgaatgtgctcttgctcgcacactagtttcaggatatcagatccgccgcagactacttttaactggcactccaatccaaaatagcctacaagaactgtggtctttgcttaactttattctgcccaatatttttaattcatctcagaattttgaggaatggtttaatgcaccatttgcatgtgatgttagtcttaatgatgaggaacagctattaatcatacatcgtctgcatcaagttttgcgtccatttttgctgaggaggaaaaaagatgaagtggaaaaatatctccctgtcaaaacacaagtaattctcaagtgtgatatgtctgcttggcaaaaagcatactatgaacaagtcacaagcagggaaaaggttgcactaggatttgggctcagatcaaaggctctgcagaatctgtcaatgcaacttaggaaatgttgcaaccacccctatctatttgtagagcactacaacatgtaccagcgggaggaaattgttagagcatcagggaagtttgaattgcttgatcgtctacttccaaaactgcagagagctggtcacagggttctgcttttctctcagatgacgaaactgcttgatgttttagaaatatatttgcaaatgtacaatttcaagtacatgaggcttgatggatccacgaagactgaagaacgagggaggttactggcagattttaataagaaggattcggaatatttcatgtttctcctcagcacacgtgctggaggacttgggttgaacttgcagacggcggacactgtcattatatttgatagtgactggaaccctcaaatggaccaacaagctgaagaccgtgcccatcgtatagggcagaagaatgaagtgcgtgtgtttgttcttgttagtgtcggctccattgaagaagagatcctggaccgtgcaaaacaaaagatgggtatcgatgcaaaagttatccaggctgggttgtttaacacaacttccacagcacaggacagacgagcattgctgcaggagatccttaggagggggacaagctcgctgggaacagatatccccagtgagcgcgagataaatcgtttggctgcacgaactgatgaagaattctggttgtttgagaagatggatgaagaaaggaggcttagagaaaactacaaatctagacttatggatgggaatgaggttccagattgggtattcgccaacaatgatttacccaagagaaccgtggcagatgagttccagaatataatggtcggtgcgaagcgacgtagaaaggaggttgtctattcagactctttcggtgatcagtggatgaaatccgatgagggatttgaagacattccaaaggcgactcagaggtcgaagaagactgcttactcatctgacatccaagttgagtttagtgaaaggaggaaaagacctaggtctgtagaaaacagcgcagacggtgtgagcaacccgacgtggacgcctgacaaaggaagggctggagtttcatcatacagcaaggacgagactgaagatgatggcgaagacgaagtcattactagcggcttacaaaagggaaacagtttcacatggaataccctaggaagaagaaggtcaagccacttcagttcgtcatcggactcgagagggcgcccaacattctaatggcaacatacatgaatgttatggcctcgacctgttggttgatggaatacccttgtagagcagggctgcgactatgactgagtaccttcaagcttatgaactttattaggattactagtatactgtatggacttgttggcatgaatttgtaactcctttaaatattaattgtttaaacaactggtggtgtttgctatcataccgcgcctacatgtttttatttttttgctaatcaaagtttttgtggccaggtttta

SEQ ID NO: 16633 - DNA, 3490 bp, Zea Mays
tcatctctcgtttacgtggcctgagcgtttcatctcgtgcgccgccatggagctaaatcatctccgtcagatcggagacgccggacaaggcaccaccaccaccaccacgctgggcacagccgccccccgttccatcgagctggcttgaggcgcagggcataactgatgcttcagcaacctattgggttgggagctccttgattgaagagcttgaagatgcaatatataagaataaaaaaacaccaatatcctactcagagttagcagctctgaaagaagggcgattcaatgcatccattcagcatcggctagctgaacttgaaggattaccttctactaggggtgaagacttgcaaatgaagtgtttgcttgaaatgtatgggcttaagctgttagatttgcagaagaaagtgcgatctgatatcagtgcagaatattggctacagaagaaatgtgcatatccggagaggcaactttttgattgggggctgatgcggatacggtatcctttatccatgtatggaataggagatatcctttcaatggatgctgatgatgttcaccgcaaaaagagatttacagagaggatgtcaagactcgaagaggaagaaaaaaatcaggcagatattaggaagaggaagttctttgcagaaattctaaatgcttctagggaacaccaggtgcaattaggcactacattcaagcaaagaaagcagcggaatgatggagtccaggcatggcatgttcgggcacgtcaacgtatctcacggcaagagaaaaataggttgaatcttctgaaaattggtgatcaagtagcatatatgaagatggttgaggagagcaagaacgaacgtctgaaaatgctccttgacaaaacaaatgagcttcttgaaggaattggaaaagctgtacagcgacaaaaagatgctgagcatgttagtcagcatgaagggagtgaagtgccaaaagggtcagagtctgaggattgctctcaaatctcaggcgtcaagagtgaatcacctggggaatctccttcagatgacgatgcagactttgctggctctgcagatgaaagtaaattcaatgcaggtcgtagacttgattttactgtccattccattgaagaaaaggtgacagaacaaccatcagctctcgaaggtggggaattgaggccatatcaactggagggtctccaatggatgctttctttgtttaacaacaatttgaatggcattctggctgatgaaatgggtctgggtaaaacaattcagaccatagctttgatagcttatctgttggaaaataaggaggttgcaggaccacacttaataattgctccaaaagcagtattaccaaattggtctaacgaattcaaaacctgggctcccagtattgggacaattctgtatgatggtcgtccagaagagaggaagcttttaagggaaaagaattttgatggattgcaatttaatgttttgctcacgcattatgacttgatactgaaagataagaagttcctaaagaaagttcactggcattatttgattgttgatgaaggacatcgtctgaaaaatcatgaatgtgctcttgctcgcacactagtttcaggatatcagatccgccgcagactacttttaactggcactccaatccaaaatagcctacaagaactgtggtctttgcttaactttattctgcccaatatttttaattcatctcagaattttgaggaatggtttaatgcaccatttgcatgtgatgttagtcttaatgatgaggaacagctattaatcatacatcgtctgcatcaagttttgcgtccatttttgctgaggaggaaaaaagatgaagtggaaaaatatctccctgtcaaaacacaagtaattctcaagtgtgatatgtctgcttggcaaaaagcatactatgaacaagtcacaagcagggaaaaggttgcactaggatttgggctcagatcaaaggctctgcagaatctgtcaatgcaacttaggaaatgttgcaaccacccctatctatttgtagagcactacaacatgtaccagcgggaggaaattgttagagcatcagggaagtttgaattgcttgatcgtctacttccaaaactgcagagagctggtcacagggttctgcttttctctcagatgacgaaactgcttgatgttttagaaatatatttgcaaatgtacaatttcaagtacatgaggcttgatggatccacgaagactgaagaacgagggaggttactggcagattttaataagaaggattcggaatatttcatgtttctcctcagcacacgtgctggaggacttgggttgaacttgcagacggcggacactgtcattatatttgatagtgactggaaccctcaaatggaccaacaagctgaagaccgtgcccatcgtatagggcagaagaatgaagtgcgtgtgtttgttcttgttagtgtcggctccattgaagaagagatcctggaccgtgcaaaacaaaagatgggtatcgatgcaaaagttatccaggctgggttgtttaacacaacttccacagcacaggacagacgagcattgctgcaggagatccttaggagggggacaagctcgctgggaacagatatccccagtgagcgcgagataaatcgtttggctgcacgaactgatgaagaattctggttgtttgagaagatggatgaagaaaggaggcttagagaaaactacaaatctagacttatggatgggaatgaggttccagattgggtattcgccaacaatgatttacccaagagaaccgtggcagatgagttccagaatataatggtcggtgcgaagcgacgtagaaaggaggttgtctattcagactctttcggtgatcagtggatgaaatccgatgagggatttgaagacattccaaaggcgactcagaggtcgaagaagactgcttactcatctgacatccaagttgagtttagtgaaaggaggaaaagacctaggtctgtagaaaacagcgcagacggtgtgagcaacccgacgtggacgcctgacaaaggaagggctggagtttcatcatacagcaaggacgagactgaagatgatggcgaagacgaagtcattactagcggcttacaaaagggaaacagtttcacatggaataccctaggaagaagaaggtcaagccacttcagttcgtcatcggactcgagagggcgcccaacattctaatggcaacatacatgaatgttatggcctcgacctgttggttgatggaatacccttgtagagcagggctgcgactatgactgagtaccttcaagcttatgaactttattaggattactagtatactgtatggacttgttggcatgaatttgtaactcctttaaatattaattgtttaaacaactggtggtgtttgctatcataccgcgcctacatgtttttatttttttgctaatcaaagtttttgtggccaggtttta

SEQ ID NO: 16634 - DNA, 3598 bp, Zea Mays
aaatttccccacccagtccgctgcgcaggccagacatccgcggcgtccgcctccccggccccgatcgatcggaagcttcggcttcccctgacacaaggccggcgcgaaaacgcccccacaaacaaacggcggaccattgccgcgcgtcgattcgaacccgccggggaaagcgccgacgccgtctcaccccgcggaggcgaaaccctagcgatggcggcgtccgtggacgctgcggcggccctggcggtgacgccccccgctgtggaggaggcgggcggcgctgttgagcaggccaggacgctcatcggcgcgctcaacctgctttcccgcaacctgccgctgccccccgacgtcctgcgcgcggtctcgtccatctaccacgatgggggtgcgggtgacgatgaggaggaggaggggggagagcgggaagcggagaaggaagggaatatggagatgacggccgcggaggagggttaccccgttgacgttgcgaccaaggggagctccttgattgaagagcttgaagatgcaatatataagaataaaaaaacaccaatatcctactcagagttagcagctctgaaagaagggcgattcaatgcatccattcagcatcggctagctgaacttgaaggattaccttctactaggggtgaagacttgcaaatgaagtgtttgcttgaaatgtatgggcttaagctgttagatttgcagaagaaagtgcgatctgatatcagtgcagaatattggctacagaagaaatgtgcatatccggagaggcaactttttgattgggggctgatgcggatacggtatcctttatccatgtatggaataggagatatcctttcaatggatgctgatgatgttcaccgcaaaaagagatttacagagaggatgtcaagactcgaagaggaagaaaaaaatcaggcagatattaggaagaggaagttctttgcagaaattctaaatgcttctagggaacaccaggtgcaattaggcactacattcaagcaaagaaagcagcggaatgatggagtccaggcatggcatgttcgggcacgtcaacgtatctcacggcaagagaaaaataggttgaatcttctgaaaattggtgatcaagtagcatatatgaagatggttgaggagagcaagaacgaacgtctgaaaatgctccttgacaaaacaaatgagcttcttgaaggaattggaaaagctgtacagcgacaaaaagatgctgagcatgttagtcagcatgaagggagtgaagtgccaaaagggtcagagtctgaggattgctctcaaatctcaggcgtcaagagtgaatcacctggggaatctccttcagatgacgatgcagactttgctggctctgcagatgaaagtaaattcaatgcaggtcgtagacttgattttactgtccattccattgaagaaaaggtgacagaacaaccatcagctctcgaaggtggggaattgaggccatatcaactggagggtctccaatggatgctttctttgtttaacaacaatttgaatggcattctggctgatgaaatgggtctgggtaaaacaattcagaccatagctttgatagcttatctgttggaaaataaggaggttgcaggaccacacttaataattgctccaaaagcagtattaccaaattggtctaacgaattcaaaacctgggctcccagtattgggacaattctgtatgatggtcgtccagaagagaggaagcttttaagggaaaagaattttgatggattgcaatttaatgttttgctcacgcattatgacttgatactgaaagataagaagttcctaaagaaagttcactggcattatttgattgttgatgaaggacatcgtctgaaaaatcatgaatgtgctcttgctcgcacactagtttcagggttttgcgtccatttttgctgaggaggaaaaaagatgaagtggaaaaatatctccctgtcaaaacacaagtaattctcaagtgtgatatgtctgcttggcaaaaagcatactatgaacaagtcacaagcagggaaaaggttgcactaggatttgggctcagatcaaaggctctgcagaatctgtcaatgcaacttaggaaatgttgcaaccacccctatctatttgtagagcactacaacatgtaccagcgggaggaaattgttagagcatcagggaagtttgaattgcttgatcgtctacttccaaaactgcagagagctggtcacagggttctgcttttctctcagatgacgaaactgcttgatgttttagaaatatatttgcaaatgtacaatttcaagtacatgaggcttgatggatccacgaagactgaagaacgagggaggttactggcagattttaataagaaggattcggaatatttcatgtttctcctcagcacacgtgctggaggacttgggttgaacttgcagacggcggacactgtcattatatttgatagtgactggaaccctcaaatggaccaacaagctgaagaccgtgcccatcgtatagggcagaagaatgaagtgcgtgtgtttgttcttgttagtgtcggctccattgaagaagagatcctggaccgtgcaaaacaaaagatgggtatcgatgcaaaagttatccaggctgggttgtttaacacaacttccacagcacaggacagacgagcattgctgcaggagatccttaggagggggacaagctcgctgggaacagatatccccagtgagcgcgagataaatcgtttggctgcacgaactgatgaagaattctggttgtttgagaagatggatgaagaaaggaggcttagagaaaactacaaatctagacttatggatgggaatgaggttccagattgggtattcgccaacaatgatttacccaagagaaccgtggcagatgagttccagaatataatggtcggtgcgaagcgacgtagaaaggaggttgtctattcagactctttcggtgatcagtggatgaaatccgatgagggatttgaagacattccaaaggcgactcagaggtcgaagaagactgcttactcatctgacatccaagttgagtttagtgaaaggaggaaaagacctaggtctgtagaaaacagcgcagacggtgtgagcaacccgacgtggacgcctgacaaaggaagggctggagtttcatcatacagcaaggacgagactgaagatgatggcgaagacgaagtcattactagcggcttacaaaagggaaacagtttcacatggaataccctaggaagaagaaggtcaagccacttcagttcgtcatcggactcgagagggcgcccaacattctaatggcaacatacatgaatgttatggcctcgacctgttggttgatggaatacccttgtagagcagggctgcgactatgactgagtaccttcaagcttatgaactttattaggattactagtatactgtatggacttgttggcatgaatttgtaactcctttaaatattaattgtttaaacaactggtggtgtttgctatcataccgcgcctacatgtttttatttttttgctaatcaaagtttttgtggccaggtttta

SEQ ID NO: 16635 - DNA, 3826 bp, Zea Mays
tgtagtaataataaaaggaaatcactaaatttccccacccagtccgctgcgcaggccagacatccgcggcgtccgcctccccggccccgatcgatcggaagcttcggcttcccctgacacaaggccggcgcgaaaacgcccccacaaacaaacggcggaccattgccgcgcgtcgattcgaacccgccggggaaagcgccgacgccgtctcaccccgcggaggcgaaaccctagcgatggcggcgtccgtggacgctgcggcggccctggcggtgacgccccccgctgtggaggaggcgggcggcgctgttgagcaggccaggacgctcatcggcgcgctcaacctgctttcccgcaacctgccgctgccccccgacgtcctgcgcgcggtctcgtccatctaccacgatgggggtgcgggtgacgatgaggaggaggaggggggagagcgggaagcggagaaggaagggaatatggagatgacggccgcggaggagggttaccccgttgacgttgcgaccaaggggagctccttgattgaagagcttgaagatgcaatatataagaataaaaaaacaccaatatcctactcagagttagcagctctgaaagaagggcgattcaatgcatccattcagcatcggctagctgaacttgaaggattaccttctactaggggtgaagacttgcaaatgaagtgtttgcttgaaatgtatgggcttaagctgttagatttgcagaagaaagtgcgatctgatatcagtgcagaatattggctacagaagaaatgtgcatatccggagaggcaactttttgattgggggctgatgcggatacggtatcctttatccatgtatggaataggagatatcctttcaatggatgctgatgatgttcaccgcaaaaagagatttacagagaggatgtcaagactcgaagaggaagaaaaaaatcaggcagatattaggaagaggaagttctttgcagaaattctaaatgcttctagggaacaccaggtgcaattaggcactacattcaagcaaagaaagcagcggaatgatggagtccaggcatggcatgttcgggcacgtcaacgtatctcacggcaagagaaaaataggttgaatcttctgaaaattggtgatcaagtagcatatatgaagatggttgaggagagcaagaacgaacgtctgaaaatgctccttgacaaaacaaatgagcttcttgaaggaattggaaaagctgtacagcgacaaaaagatgctgagcatgttagtcagcatgaagggagtgaagtgccaaaagggtcagagtctgaggattgctctcaaatctcaggcgtcaagagtgaatcacctggggaatctccttcagatgacgatgcagactttgctggctctgcagatgaaagtaaattcaatgcaggtcgtagacttgattttactgtccattccattgaagaaaaggtgacagaacaaccatcagctctcgaaggtggggaattgaggccatatcaactggagggtctccaatggatgctttctttgtttaacaacaatttgaatggcattctggctgatgaaatgggtctgggtaaaacaattcagaccatagctttgatagcttatctgttggaaaataaggaggttgcaggaccacacttaataattgctccaaaagcagtattaccaaattggtctaacgaattcaaaacctgggctcccagtattgggacaattctgtatgatggtcgtccagaagagaggaagcttttaagggaaaagaattttgatggattgcaatttaatgttttgctcacgcattatgacttgatactgaaagataagaagttcctaaagaaagttcactggcattatttgattgttgatgaaggacatcgtctgaaaaatcatgaatgtgctcttgctcgcacactagtttcaggatatcagatccgccgcagactacttttaactggcactccaatccaaaatagcctacaagaactgtggtctttgcttaactttattctgcccaatatttttaattcatctcagaattttgaggaatggtttaatgcaccatttgcatgtgatgttagtcttaatgatgaggaacagctattaatcatacatcgtctgcatcaagttttgcgtccatttttgctgaggaggaaaaaagatgaagtggaaaaatatctccctgtcaaaacacaagtaattctcaagtgtgatatgtctgcttggcaaaaagcatactatgaacaagtcacaagcagggaaaaggttgcactaggatttgggctcagatcaaaggctctgcagaatctgtcaatgcaacttaggaaatgttgcaaccacccctatctatttgtagagcactacaacatgtaccagcgggaggaaattgttagagcatcagggaagtttgaattgcttgatcgtctacttccaaaactgcagagagctggtcacagggttctgcttttctctcagatgacgaaactgcttgatgttttagaaatatatttgcaaatgtacaatttcaagtacatgaggcttgatggatccacgaagactgaagaacgagggaggttactggcagattttaataagaaggattcggaatatttcatgtttctcctcagcacacgtgctggaggacttgggttgaacttgcagacggcggacactgtcattatatttgatagtgactggaaccctcaaatggaccaacaagctgaagaccgtgcccatcgtatagggcagaagaatgaagtgcgtgtgtttgttcttgttagtgtcggctccattgaagaagagatcctggaccgtgcaaaacaaaagatgggtatcgatgcaaaagttatccaggctgggttgtttaacacaacttccacagcacaggacagacgagcattgctgcaggagatccttaggagggggacaagctcgctgggaacagatatccccagtgagcgcgagataaatcgtttggctgcacgaactgatgaagaattctggttgtttgagaagatggatgaagaaaggaggcttagagaaaactacaaatctagacttatggatgggaatgaggttccagattgggtattcgccaacaatgatttacccaagagaaccgtggcagatgagttccagaatataatggtcggtgcgaagcgacgtagaaaggaggttgtctattcagactctttcggtgatcagtggatgaaatccgatgagggatttgaagacattccaaaggcgactcagaggtcgaagaagactgcttactcatctgacatccaagttgagtttagtgaaaggaggaaaagacctaggtctgtagaaaacagcgcagacggtgtgagcaacccgacgtggacgcctgacaaaggaagggctggagtttcatcatacagcaaggacgagactgaagatgatggcgaagacgaagtcattactagcggcttacaaaagggaaacagtttcacatggaataccctaggaagaagaaggtcaagccacttcagttcgtcatcggactcgagagggcgcccaacattctaatggcaacatacatgaatgttatggcctcgacctgttggttgatggaatacccttgtagagcagggctgcgactatgactgagtaccttcaagcttatgaactttattaggattactagtatactgtatggacttgttggcatgaatttgtaactcctttaaatattaattgtttaaacaactggtggtgtttgctatcataccgcgcctacatgtttttatttttttgctaatcaaagtttttgtggccaggtttta

SEQ ID NO: 16636 - DNA, 606 bp, Zea Mays
ggcaactctgttgaccaaagatcaagcattttttaggggagctccttgattgaagagcttgaagatgcaatatataagaataaaaaaacaccaatatcctactcagagttagcagctctgaaagaagggcgattcaatgcatccattcagcatcggctagctgaacttgaaggattaccttctactaggggtgaagacttgcaaatgaagtgtttgcttgaaatgtatgggcttaagctgttagatttgcagaagaaagtgcgatctgatatcagtgcagaatattggctacagaagaaatgtgcatatccggagaggcaactttttgattgggggctgatgcggatacggtatcctttatccatgtatggaataggagatatcctttcaatggatgctgatgatgttcaccgcaaaaagagatttacagagaggatgtcaagactcgaagaggaagaaaaaaatcaggcagatattaggaagaggaagttctttgcagaaattctaaatgcttctagggaacaccaggtgcaattaggcactacattcaagcaaagaaagcagcggaatgatggagtccaggaatgttttgtcaccatatactga

SEQ ID NO: 16637 - DNA, 1685 bp, Zea Mays
gatttctggaatactagggctattagagggaactgtccattttaaagaattgcatgagattattgaagatgcaaaagcaaaattggaaagtgaggttgggccacttgatggaatgtcggcaaagaatgcacatggtatcgtaagcaggttctcagctggtatcgctgtgcagaaactatgctctacagcaattcaaagagctgacgagtggttgagttctcctgacctgcatcttcgagattcattacctgttgcctgtagatttaaatttgtagacataacatcttcttccctcattgtcatcttgaaagaaacctcgtcttctgacactatcaaaggttataagctatggtactggaagagcagagagcaaccaagtatggaaaagcctgttattgtgtccaaagatgaaagaaaaatacttctttatgaccttaccccatgcacagaatattctttcagagttatatcattcacagatgatggggtacttggccattcagaatctagatgccgtactgaaagtagggagatatttgtcatgcgtgcaccaaagaatgcagtgggaggaggggctacacatgcgcaaaaaaaagacaggaaccagtcttgtaagtcaactgggttcaagatccgagatatttggaagaactttcaggaagctttagatgcagaaggctgttttgaaggattttctgaagatgtacatgaaggttcctgcagcagaagtgttacagagacagagttatctggagcttgtcgcaaacttcatttcaactcatcttctgtccccgacctaaacgccgaggttcctgtacccgtggactacactgagaaccattattattctaagaagggacttgtgaggtcaaatgacagtggtgactctgagacctgcgccgttggccagactgcagagccgcctgcagttgaatctcggcaagtaagcaaggtgaatagcgtaccagttaataaatgcgagcagaatggtgcttctgctatttgccatgaaaagatgctctccggatcgacgaggcaactggatggggattatgagcactgcgtaaaggtagtaaggcagttggaatgcgatgggcacatcgaaaatggtttcaggatgaagttcttgacatggtatagtctaagatccacagaccaggagcgcaaggccgtgagcacatttgtcagaacgttaagcaacgaaccaagcagcctggccgagcagctcgtcgattctttcggagaaatattaaacagcaagaaggccaaaaccggtttctgcagcaagctatggcattaggacaaaaaggactagatctcaagatactgctaactcactgattatccatatttttcactgaccggtgcagtgaaattctagtttattccatcaaatttgacagcgatgaaaagggggcatctgtgagaataggagattattttgggcagcaagtagcctgctctgaaataattcttttccatcaggaagtagtggaaacttgattttcattggattacctgggtcaatccagaaattattgtagaaggttgtctttttttcccctttgttgttgtggttcgctgagaaattctttggagatagcagtccgttggttattctgggttattatataaatcatggtaaatggaatgtgatggtacaaagtctctggtttacttgtgct

SEQ ID NO: 16638 - DNA, 2497 bp, Zea Mays
ctggccaggggagcctcctctcctctcgtctcgtctcgtcgcacgcgagcccatccccccgcccgccgcctgcgcttgacttgacccgcgctcctcctcggcgtcggggagaccgggctcggtccgcgttgtctcggcggacggaggaggaccgtagcgcgaccgcccgtccgccgccagagccctcgtcatcgtgccggctgctcctgccgctcgtcccgccgcgttgagcattggggatctcgcgggcccttcgtctgtacccgccgactcttcaaaccctagcctctgtggcccgccgacgccgacgggaggagctggagctggggctggggctggagggcgcggaagctggtggctgttgtttcgctgattgaaagtactccatggcttaatgatgaactggtaataaagaggtcaatcattgtcagctagctgtctgaggagggtttttggagttcttactaagaagagagttactcatgctagccagtgaaggacggacacagatcttgcttgctttactgaactgaagacatgcccaaaacacctcctgtcaatgcaagcaagaacactgaaccgcagaaacaatctgcacccaacttaacaataacaaatgggcacacaagtacaaaggtagtggttaaaaaagagcaccctatcaatgatgtgaaacacattagcacttgggtttgcaaaaatttggcctgtaaagctgttagaccagcagaagattccttctgcaagagatattggaaaaggcaattagtaatcgggaaagatgcccgccgagttgataatctatgccaacgcatttatttgagttacaggctattagagggaactgtccattttaaagaattgcatgagattattgaagatgcaaaagcaaaattggaaagtgaggttgggccacttgatggaatgtcggcaaagaatgcacatggtatcgtaagcaggttctcagctggtatcgctgtgcagaaactatgctctacagcaattcaaagagctgacgagtggttgagttctcctgacctgcatcttcgagattcattacctgttgcctgtagatttaaatttgtagacataacatcttcttccctcattgtcatcttgaaagaaacctcgtcttctgacactatcaaaggttataagctatggtactggaagagcagagagcaaccaagtatggaaaagcctgttattgtgtccaaagatgaaagaaaaatacttctttatgaccttaccccatgcacagaatattctttcagagttatatcattcacagatgatggggtacttggccattcagaatctagatgccgtactgaaagtagggagatatttgtcatgcgtgcaccaaagaatgcagtgggaggaggggctacacatgcgcaaaaaaaagacaggaaccagtcttgtaagtcaactgggttcaagatccgagatatttggaagaactttcaggaagctttagatgcagaaggctgttttgaaggattttctgaagatgtacatgaaggttcctgcagcagaagtgttacagagacagagttatctggagcttgtcgcaaacttcatttcaactcatcttctgtccccgacctaaacgccgaggttcctgtacccgtggactacactgagaaccattattattctaagaagggacttgtgaggtcaaatgacagtggtgactctgagacctgcgccgttggccagactgcagagccgcctgcagttgaatctcggcaagtaagcaaggtgaatagcgtaccagttaataaatgcgagcagaatggtgcttctgctatttgccatgaaaagatgctctccggatcgacgaggcaactggatggggattatgagcactgcgtaaaggtagtaaggcagttggaatgcgatgggcacatcgaaaatggtttcaggatgaagttcttgacatggtatagtctaagatccacagaccaggagcgcaaggccgtgagcacatttgtcagaacgttaagcaacgaaccaagcagcctggccgagcagctcgtcgattctttcggagaaatattaaacagcaagaaggccaaaaccggtttctgcagcaagctatggcattaggacaaaaaggactagatctcaagatactgctaactcactgattatccatatttttcactgaccggtgcagtgaaattctagtttattccatcaaatttgacagcgatgaaaagggggcatctgtgagaataggagattattttgggcagcaagtagcctgctctgaaataattcttttccatcaggaagtagtggaaacttgattttcattggattacctgggtcaatccagaaattattgtagaaggttgtctttttttcccctttgttgttgtggttcgctgagaaattctttggagatagcagtccgttggttattctgggttattatataaatcatggtaaatggaatgtgatggtacaaagtctctggtttacttgtgct

SEQ ID NO: 16639 - DNA, 2719 bp, Zea Mays
ctggccaggggagcctcctctcctctcgtctcgtctcgtcgcacgcgagcccatccccccgcccgccgcctgcgcttgacttgacccgcgctcctcctcggcgtcggggagaccgggctcggtccgcgttgtctcggcggacggaggaggaccgtagcgcgaccgcccgtccgccgccagagccctcgtcatcgtgccggctgctcctgccgctcgtcccgccgcgttgagcattggggatctcgcgggcccttcgtctgtacccgccgactcttcaaaccctagcctctgtggcccgccgacgccgacgggaggagctggagctggggctggggctggagggcgcggaagctggtggctgttgtttcgctgattgaaagtactccatggcttaatgatgaactggtaataaagaggtcaatcattgtcagctagctgtctgaggagggtttttggagttcttactaagaagagagttactcatgctagccagtgaaggacggacacagatcttgcttgctttactgaactgaagacatgcccaaaacacctcctgtcaatgcaagcaagaacactgaaccgcagaaacaatctgcacccaacttaacaataacaaatgggcacacaagtacaaaggtagtggttaaaaaagagcaccctatcaatgatgtgaaacacattagcacttgggtttgcaaaaatttggcctgtaaagctgttagaccagcagaagattccttctgcaagaggtgctcgtgttgtatttgccacaagtttgatgacaataaggatcctagtcaatggttagtttgttcatctgacaatgatagcaagaattgttgtggttcttcttgtcatattgaatgtgcattccgagagaagagggcaggatgctttgatctagagcaaattatacatcttgatgggagttattcctgtgcctcgtgtgggaagatttctggaatactaggatattggaaaaggcaattagtaatcgggaaagatgcccgccgagttgataatctatgccaacgcatttatttgagttacaggctattagagggaactgtccattttaaagaattgcatgagattattgaagatgcaaaagcaaaattggaaagtgaggttgggccacttgatggaatgtcggcaaagaatgcacatggtatcgtaagcaggttctcagctggtatcgctgtgcagaaactatgctctacagcaattcaaagagctgacgagtggttgagttctcctgacctgcatcttcgagattcattacctgttgcctgtagatttaaatttgtagacataacatcttcttccctcattgtcatcttgaaagaaacctcgtcttctgacactatcaaaggttataagctatggtactggaagagcagagagcaaccaagtatggaaaagcctgttattgtgtccaaagatgaaagaaaaatacttctttatgaccttaccccatgcacagaatattctttcagagttatatcattcacagatgatggggtacttggccattcagaatctagatgccgtactgaaagtagggagatatttgtcatgcgtgcaccaaagaatgcagtgggaggaggggctacacatgcgcaaaaaaaagacaggaaccagtcttgtaagtcaactgggttcaagatccgagatatttggaagaactttcaggaagctttagatgcagaaggctgttttgaaggattttctgaagatgtacatgaaggttcctgcagcagaagtgttacagagacagagttatctggagcttgtcgcaaacttcatttcaactcatcttctgtccccgacctaaacgccgaggttcctgtacccgtggactacactgagaaccattattattctaagaagggacttgtgaggtcaaatgacagtggtgactctgagacctgcgccgttggccagactgcagagccgcctgcagttgaatctcggcaagtaagcaaggtgaatagcgtaccagttaataaatgcgagcagaatggtgcttctgctatttgccatgaaaagatgctctccggatcgacgaggcaactggatggggattatgagcactgcgtaaaggtagtaaggcagttggaatgcgatgggcacatcgaaaatggtttcaggatgaagttcttgacatggtatagtctaagatccacagaccaggagcgcaaggccgtgagcacatttgtcagaacgttaagcaacgaaccaagcagcctggccgagcagctcgtcgattctttcggagaaatattaaacagcaagaaggccaaaaccggtttctgcagcaagctatggcattaggacaaaaaggactagatctcaagatactgctaactcactgattatccatatttttcactgaccggtgcagtgaaattctagtttattccatcaaatttgacagcgatgaaaagggggcatctgtgagaataggagattattttgggcagcaagtagcctgctctgaaataattcttttccatcaggaagtagtggaaacttgattttcattggattacctgggtcaatccagaaattattgtagaaggttgtctttttttcccctttgttgttgtggttcgctgagaaattctttggagatagcagtccgttggttattctgggttattatataaatcatggtaaatggaatgtgatggtacaaagtctctggtttacttgtgct

SEQ ID NO: 16640 - DNA, 2461 bp, Zea Mays
ctggccaggggagcctcctctcctctcgtctcgtctcgtcgcacgcgagcccatccccccgcccgccgcctgcgcttgacttgacccgcgctcctcctcggcgtcggggagaccgggctcggtccgcgttgtctcggcggacggaggaggaccgtagcgcgaccgcccgtccgccgccagagccctcgtcatcgtgccggctgctcctgccgctcgtcccgccgcgttgagcattggggatctcgcgggcccttcgtctgtacccgccgactcttcaaaccctagcctctgtggcccgccgacgccgacgggaggagctggagctggggctggggctggagggcgcggaagctggtggctgttgtttcgctgattgaaagtactccatggcttaatgatgaactggtaataaagaggtcaatcattgtcagctagctgtctgaggagggtttttggagttcttactaagaagagagttactcatgctagccagtgaaggacggacacagatcttgcttgctttactgaactgaagacatgcccaaaacacctcctgtcaatgcaagcaagaacactgaaccgcagaaacaatctgcacccaacttaacaataacaaatgggcacacaagtacaaaggtagtggttaaaaaagagcaccctatcaatgatgtgaaacacattagcacttgggtttgcaaaaatttggcctgtaaagctgttagaccagcagaagattccttctgcaagagatattggaaaaggcaattagtaatcgggaaagatgcccgccgagttgataatctatgccaacgcatttatttgagttacaggctattagagggaactgtccattttaaagaattgcatgagattattgaagatgcaaaagcaaaattggaaagtgaggttgggccacttgatggaatgtcggcaaagaatgcacatggtatcgtaagcaggttctcagctggtatcgctgtgcagaaactatgctctacagcaattcaaagagctgacgagtggttgagttctcctgacctgcatcttcgagacataacatcttcttccctcattgtcatcttgaaagaaacctcgtcttctgacactatcaaaggttataagctatggtactggaagagcagagagcaaccaagtatggaaaagcctgttattgtgtccaaagatgaaagaaaaatacttctttatgaccttaccccatgcacagaatattctttcagagttatatcattcacagatgatggggtacttggccattcagaatctagatgccgtactgaaagtagggagatatttgtcatgcgtgcaccaaagaatgcagtgggaggaggggctacacatgcgcaaaaaaaagacaggaaccagtcttgtaagtcaactgggttcaagatccgagatatttggaagaactttcaggaagctttagatgcagaaggctgttttgaaggattttctgaagatgtacatgaaggttcctgcagcagaagtgttacagagacagagttatctggagcttgtcgcaaacttcatttcaactcatcttctgtccccgacctaaacgccgaggttcctgtacccgtggactacactgagaaccattattattctaagaagggacttgtgaggtcaaatgacagtggtgactctgagacctgcgccgttggccagactgcagagccgcctgcagttgaatctcggcaagtaagcaaggtgaatagcgtaccagttaataaatgcgagcagaatggtgcttctgctatttgccatgaaaagatgctctccggatcgacgaggcaactggatggggattatgagcactgcgtaaaggtagtaaggcagttggaatgcgatgggcacatcgaaaatggtttcaggatgaagttcttgacatggtatagtctaagatccacagaccaggagcgcaaggccgtgagcacatttgtcagaacgttaagcaacgaaccaagcagcctggccgagcagctcgtcgattctttcggagaaatattaaacagcaagaaggccaaaaccggtttctgcagcaagctatggcattaggacaaaaaggactagatctcaagatactgctaactcactgattatccatatttttcactgaccggtgcagtgaaattctagtttattccatcaaatttgacagcgatgaaaagggggcatctgtgagaataggagattattttgggcagcaagtagcctgctctgaaataattcttttccatcaggaagtagtggaaacttgattttcattggattacctgggtcaatccagaaattattgtagaaggttgtctttttttcccctttgttgttgtggttcgctgagaaattctttggagatagcagtccgttggttattctgggttattatataaatcatggtaaatggaatgtgatggtacaaagtctctggtttacttgtgct

SEQ ID NO: 16641 - DNA, 3853 bp, Zea Mays
atgcgcggcgaggccggcaatgactgtggtggcggggatacccaagtcctggacggcgggacacctccgttaggttctcctccgagtgatggcgatgagacacaacgcgaggcggatgattgggccctgtacgacgaaacacagcctctggatgatgctgagacccagttaatagacgaggtggaggagggtgtggctggcgattggacggagacacagttgatggatagtggcaacgaggatggtggctgtggcgatgaggatcatggcaatgacggtgacccagtgaagacgaagcaggtggaagatgaagaaggaggcgacgttggtggtggcgtggatgataatgccaacaaatggaccaagacccagttggatgaaaaatgtgaggtggatggagtgaacaacattgttggagacatggttgagacccagttggttgaggaacctgaggaggatgccgacaaggatggattaaatggtcatggtgaacatgatcttggtgagtgggggaagacccagttggttgaagactctgacgaagatataggtgactatgagttgagtgatggcaccgttgtcctaagtgacaatgagagcctctcaggggatgagagggttgtgaagtcaggaatggataaaagggatgtgaagttcggaatggaaggaagaatcgaggggttaactggagagataaggaagcatgatgataataatttggtggattctgatgcatcgacggacgaggagggtgacacagattcagcaagggaaacaaatggcctctgatgcaatacaccccatgccgaaagttgtagatcaatctactaaatgtagcacatcctttggtgaggttgataatgactctcatggttatgtacagaaccatgataaaggtggagctaaaagcagagacaagtgctcaacggcaaaaaagctttttgctgacacaacagctgaggatggagaaaagaacagcagatgtcttgctggattaagctacgctggatcacaagagcctggtgatctgtcacaagcaaatgcttttgatgttgtggacaggttgatttcaataaattgtggattatcatctcaagaaaccatcccaaataaattggaaatagcaaagccacatgcttcaagtaagaggggtactttaatgttggctgagaaggttgaccttggtagaagttcaaatgggaaggccgaaatatttgaatttgtggataaccttgaagatgagggaggaggtgactttttcagtaaaaacagagacatcttgttgccaaaaccaattggtagaggtgaaccaaagagtcattataccagagcaaagaaaccttccacaaaaaaatcatgtggagaaaataaaataggggaagccatgaacaaaagaaattccaaactacctgggaggttggaaactattcctttatcacattcaagactattcaaaagtgacgtaaagagtaagcaggcttatggaagcaggactaagaaaaaccttttgaaggacttagataacctatcaaatgccaaatcgttggaagaacaggaaagggctgatgtagctttgaatgatgttggtccagatactcaaatggctgttgaagctatggaggccctggtacaatgttcacctgctaaaagtttatctgctgaagatcaacctctgctcaatagagatacgatggctgagaagtctggaatagctaaaagtcatttgaagaatggttctcagagaactagcaacatccaggaaggtgtcacaacacgttctaagagaagaaaagtacctgacttcagtaccaagcctcagaaagaaagactaagaggatcaaaggtgcaagaaagttctgagcctatagtaaaagtgaagcataagcaaacaaagtctgtacctgagaaaagcaaagtttcaaaggaatttattgatgaaaataagtaccacgggacacctattgctcaccgaactaggcattgtggtaggaatgacccttctgcatttatcgagttctctaataaacacttgaggagaggcaagaaattgaccggtgacagctccactattcagcaagtgcaaaataaccgaattgcaattgaatctggtttgagttattttgaaaaagaaagcacagagcagatttgtacaaataatgatcaagatcttcagcaatctaaggatggaagcactcaacggaccagtgtaaataatgctcaaaaccttgaaacacacagagttgaaccaacaactgatgttacctgcagagatatcccattgcatcccaaacggcgaagaacgcctacaaaattgatactgtcaacttctgcagcagctgcaaatcatgaaataccatcagaagtggcaagaccatacaagaaaaggcggatttttgtaagaagtgtttctgacctgctaaagtatgcaaagagggaaccttcccatgggagatcagcttctatgctgtccagcatattagagaagtcattagctgcttctcctgtacttaatttttctgtatgtggtgacagcaaaacttcttctgatgtcattagctctgcacagagaccgaaggaatcctcccatgacgaggatacaagtaaatcaccagaaaacaatcctcaagttccaaatcgttccatgaaaacaccgtcaaaagtggttaatgaattgtcacccacttttagtcctgcgaatccatcaaaaggctcaagtagaaacttgtcaaaagcttctgttgcgagagaattgctgaagctagatcctgaaaatgtactaccaaatcagcagagaaaagattctagaagaaggaaggatatggcccatgtcagtattctattaagccatcatttggatgatgatgttgtcaagcgtcagaagaagatcttggcacgcttacgaggttctgaagcattttcaatggccgatgcaacacactttgttgcagatagattctgccgcacaaagaacatgctagaagcaataactattggcaagccaatagttacatcgatgtggcttgaaaattgtggagaagcaggttgttttattgatgagaggaagtatattctgagggatgaaaagaaggaaaaagagataggtttcagcatgcctatatcactggcctcagcttgcaatcatcctcttctgctgggaaaacgagtttttgtaacatcaaatgtgaaaccaagtcaagcagtggtgactagcttggtcaaagcatcatcggggcagccactggagagggtaggacggtccataatgaatgagaaggaagtagctccggacctactggttatctcatgtgaagaagactaccaaacctgtgcaccgctgctcgagaaagcgtggagtttctgctaaacggtatcgtcattcagaagctggagtacgagaggcaccgccttttcttggaccgagtcaaacagacccgctcgtcgcggtggttgaaggacaccgtgcaggaccggtttgtccctgtacccaagcgtcgccgtagataggcgaacaggttcggtgcatagtttttctaactaaatcatgcttctgtttcccgagccttagcagctcaagaccactgtatatgtatgtaagccatatgctaaagtattcctgtgctgccatgtgctgggtgattgagtaatgcgggcctaaccttttgttttcctcgtctgtaaattttgtagtgtaggtgttcatatgtgttgtagcctgttttcgcccccttctcagctgaacctgggtggtaagtaattagccagagactgttgagtgtttgatgaaatgttatgtattctgttgttttggagatgtcagatggctagagctggattgtgtgaacttgaggtgccg

SEQ ID NO: 16642 - DNA, 4295 bp, Zea Mays
gcgcacctctcgtcgagaggcgtcgctctcttcctcctctacttcgtcgccctttactgtttcggagccggggcgggttgtcctaggagtcggtttcgttccaagatttcccttctccttccgttcaattcgttttgggtttgtgccgtgcgctgcgcccaatctctacgggccaaggcatccgtggtccgattgggtcagtcttcgtctttctccgagtatctatgggggttcggtcgaatccccgtccgcaacactaagccctgtcctacccgtgatgcgatgcgcggcgaggccggcaatgactgtggtggcggggatacccaagtcctggacggcgggacacctccgttaggtgagcgcaccttgtttattggttgtggttctgtgggcgattggtgtgaaggcgctattttttttgtggatgtgcattgcgtcatcaggttctcctccgagtgatggcgatgagacacaacgcgaggcggatgattgggccctgtacgacgaaacacagcctctggatgatgctgagacccagttaatagacgaggtggaggagggtgtggctggcgattggacggagacacagttgatggatagtggcaacgaggatggtggctgtggcgatgaggatcatggcaatgacggtgacccagtgaagacgaagcaggtggaagatgaagaaggaggcgacgttggtggtggcgtggatgataatgccaacaaatggaccaagacccagttggatgaaaaatgtgaggtggatggagtgaacaacattgttggagacatggttgagacccagttggttgaggaacctgaggaggatgccgacaaggatggattaaatggtcatggtgaacatgatcttggtgagtgggggaagacccagttggttgaagactctgacgaagatataggtgactatgagttgagtgatggcaccgttgtcctaagtgacaatgagagcctctcaggggatgagagggttgtgaagtcaggaatggataaaagggatgtgaagttcggaatggaaggaagaatcgaggggttaactggagagataaggaagcatgatgataataatttggtggattctgatgcatcgacggacgaggagggtgacacagattcagtactgacatgtggaatttctgaacctcgggacactatgtctgtgaactgtatgaagcaagggaaacaaatggcctctgatgcaatacaccccatgccgaaagttgtagatcaatctactaaatgtagcacatcctttggtgaggttgataatgactctcatggttatgtacagaaccatgataaaggtggagctaaaagcagagacaagtgctcaacggcaaaaaagctttttgctgacacaacagctgaggatggagaaaagaacagcagatgtcttgctggattaagctacgctggatcacaagagcctggtgatctgtcacaagcaaatgcttttgatgttgtggacaggttgatttcaataaattgtggattatcatctcaagaaaccatcccaaataaattggaaatagcaaagccacatgcttcaagtaagaggggtactttaatgttggctgagaaggttgaccttggtagaagttcaaatgggaaggccgaaatatttgaatttgtggataaccttgaagatgagggaggaggtgactttttcagtaaaaacagagacatcttgttgccaaaaccaattggtagaggtgaaccaaagagtcattataccagagcaaagaaaccttccacaaaaaaatcatgtggagaaaataaaataggggaagccatgaacaaaagaaattccaaactacctgggaggttggaaactattcctttatcacattcaagactattcaaaagtgacgtaaagagtaagcaggcttatggaagcaggactaagaaaaaccttttgaaggacttagataacctatcaaatgccaaatcgttggaagaacaggaaagggctgatgtagctttgaatgatgttggtccagatactcaaatggctgttgaagctatggaggccctggtacaatgttcacctgctaaaagtttatctgctgaagatcaacctctgctcaatagagatacgatggctgagaagtctggaatagctaaaagtcatttgaagaatggttctcagagaactagcaacatccaggaaggtgtcacaacacgttctaagagaagaaaagtacctgacttcagtaccaagcctcagaaagaaagactaagaggatcaaaggtgcaagaaagttctgagcctatagtaaaagtgaagcataagcaaacaaagtctgtacctgagaaaagcaaagtttcaaaggaatttattgatgaaaataagtaccacgggacacctattgctcaccgaactaggcattgtggtaggaatgacccttctgcatttatcgagttctctaataaacacttgaggagaggcaagaaattgaccggtgacagctccactattcagcaagtgcaaaataaccgaattgcaattgaatctggtttgagttattttgaaaaagaaagcacagagcagatttgtacaaataatgatcaagatcttcagcaatctaaggatggaagcactcaacggaccagtgtaaataatgctcaaaaccttgaaacacacagagttgaaccaacaactgatgttacctgcagagatatcccattgcatcccaaacggcgaagaacgcctacaaaattgatactgtcaacttctgcagcagctgcaaatcatgaaataccatcagaagtggcaagaccatacaagaaaaggcggatttttgtaagaagtgtttctgacctgctaaagtatgcaaagagggaaccttcccatgggagatcagcttctatgctgtccagcatattagagaagtcattagctgcttctcctgtacttaatttttctgtatgtggtgacagcaaaacttcttctgatgtcattagctctgcacagagaccgaaggaatcctcccatgacgaggatacaagtaaatcaccagaaaacaatcctcaagttccaaatcgttccatgaaaacaccgtcaaaagtggttaatgaattgtcacccacttttagtcctgcgaatccatcaaaaggctcaagtagaaacttgtcaaaagcttctgttgcgagagaattgctgaagctagatcctgaaaatgtactaccaaatcagcagagaaaagattctagaagaaggaaggatatggcccatgtcagtattctattaagccatcatttggatgatgatgttgtcaagcgtcagaagaagatcttggcacgcttacgaggttctgaagcattttcaatggccgatgcaacacactttgttgcagatagattctgccgcacaaagaacatgctagaagcaataactattggcaagccaatagttacatcgatgtggcttgaaaattgtggagaagcaggttgttttattgatgagaggaagtatattctgagggatgaaaagaaggaaaaagagataggtttcagcatgcctatatcactggcctcagcttgcaatcatcctcttctgctgggaaaacgagtttttgtaacatcaaatgtgaaaccaagtcaagcagtggtgactagcttggtcaaagcatcatcggggcagccactggagagggtaggacggtccataatgaatgagaaggaagtagctccggacctactggttatctcatgtgaagaagactaccaaacctgtgcaccgctgctcgagaaaggtgcgagtgttttcagcgtggagtttctgctaaacggtatcgtcattcagaagctggagtacgagaggcaccgccttttcttggaccgagtcaaacagacccgctcgtcgcggtggttgaaggacaccgtgcaggaccggtttgtccctgtacccaagcgtcgccgtagataggcgaacaggttcggtgcatagtttttctaactaaatcatgcttctgtttcccgagccttagcagctcaagaccactgtatatgtatgtaagccatatgctaaagtattcctgtgctgccatgtgctgggtgattgagtaatgcgggcctaaccttttgttttcctcgtctgtaaattttgtagtgtaggtgttcatatgtgttgtagcctgttttcgcccccttctcagctgaacctgggtggtaagtaattagccagagactgttgagtgtttgatgaaatgttatgtattctgttgttttggagatgtcagatggctagagctggattgtgtgaacttgaggtgccg

SEQ ID NO: 16643 - DNA, 4200 bp, Zea Mays
cgcacaacagaccagatattttcccggccgtgcgcacctctcgtcgagaggcgtcgctctcttcctcctctacttcgtcgccctttactgtttcggagccggggcgggttgtcctaggagtcggtttcgttccaagatttcccttctccttccgttcaattcgttttgggtttgtgccgtgcgctgcgcccaatctctacgggccaaggcatccgtggtccgattgggtcagtcttcgtctttctccgagtatctatgggggttcggtcgaatccccgtccgcaacactaagccctgtcctacccgtgatgcgatgcgcggcgaggccggcaatgactgtggtggcggggatacccaagtcctggacggcgggacacctccgttaggttctcctccgagtgatggcgatgagacacaacgcgaggcggatgattgggccctgtacgacgaaacacagcctctggatgatgctgagacccagttaatagacgaggtggaggagggtgtggctggcgattggacggagacacagttgatggatagtggcaacgaggatggtggctgtggcgatgaggatcatggcaatgacggtgacccagtgaagacgaagcaggtggaagatgaagaaggaggcgacgttggtggtggcgtggatgataatgccaacaaatggaccaagacccagttggatgaaaaatgtgaggtggatggagtgaacaacattgttggagacatggttgagacccagttggttgaggaacctgaggaggatgccgacaaggatggattaaatggtcatggtgaacatgatcttggtgagtgggggaagacccagttggttgaagactctgacgaagatataggtgactatgagttgagtgatggcaccgttgtcctaagtgacaatgagagcctctcaggggatgagagggttgtgaagtcaggaatggataaaagggatgtgaagttcggaatggaaggaagaatcgaggggttaactggagagataaggaagcatgatgataataatttggtggattctgatgcatcgacggacgaggagggtgacacagattcaggtcaccttcatatgaaagtaccttttgttcgtgttgcatcagtactgacatgtggaatttctgaacctcgggacactatgtctgtgaactgtatgaagcaagggaaacaaatggcctctgatgcaatacaccccatgccgaaagttgtagatcaatctactaaatgtagcacatcctttggtgaggttgataatgactctcatggttatgtacagaaccatgataaaggtggagctaaaagcagagacaagtgctcaacggcaaaaaagctttttgctgacacaacagctgaggatggagaaaagaacagcagatgtcttgctggattaagctacgctggatcacaagagcctggtgatctgtcacaagcaaatgcttttgatgttgtggacaggttgatttcaataaattgtggattatcatctcaagaaaccatcccaaataaattggaaatagcaaagccacatgcttcaagtaagaggggtactttaatgttggctgagaaggttgaccttggtagaagttcaaatgggaaggccgaaatatttgaatttgtggataaccttgaagatgagggaggaggtgactttttcagtaaaaacagagacatcttgttgccaaaaccaattggtagaggtgaaccaaagagtcattataccagagcaaagaaaccttccacaaaaaaatcatgtggagaaaataaaataggggaagccatgaacaaaagaaattccaaactacctgggaggttggaaactattcctttatcacattcaagactattcaaaagtgacgtaaagagtaagcaggcttatggaagcaggactaagaaaaaccttttgaaggacttagataacctatcaaatgccaaatcgttggaagaacaggaaagggctgatgtagctttgaatgatgttggtccagatactcaaatggctgttgaagctatggaggccctggtacaatgttcacctgctaaaagtttatctgctgaagatcaacctctgctcaatagagatacgatggctgagaagtctggaatagctaaaagtcatttgaagaatggttctcagagaactagcaacatccaggaaggtgtcacaacacgttctaagagaagaaaagtacctgacttcagtaccaagcctcagaaagaaagactaagaggatcaaaggtgcaagaaagttctgagcctatagtaaaagtgaagcataagcaaacaaagtctgtacctgagaaaagcaaagtttcaaaggaatttattgatgaaaataagtaccacgggacacctattgctcaccgaactaggcattgtggtaggaatgacccttctgcatttatcgagttctctaataaacacttgaggagaggcaagaaattgaccggtgacagctccactattcagcaagtgcaaaataaccgaattgcaattgaatctggtttgagttattttgaaaaagaaagcacagagcagatttgtacaaataatgatcaagatcttcagcaatctaaggatggaagcactcaacggaccagtgtaaataatgctcaaaaccttgaaacacacagagttgaaccaacaactgatgttacctgcagagatatcccattgcatcccaaacggcgaagaacgcctacaaaattgatactgtcaacttctgcagcagctgcaaatcatgaaataccatcagaagtggcaagaccatacaagaaaaggcggatttttgtaagaagtgtttctgacctgctaaagtatgcaaagagggaaccttcccatgggagatcagcttctatgctgtccagcatattagagaagtcattagctgcttctcctgtacttaatttttctgtatgtggtgacagcaaaacttcttctgatgtcattagctctgcacagagaccgaaggaatcctcccatgacgaggatacaagtaaatcaccagaaaacaatcctcaagttccaaatcgttccatgaaaacaccgtcaaaagtggttaatgaattgtcacccacttttagtcctgcgaatccatcaaaaggctcaagtagaaacttgtcaaaagcttctgttgcgagagaattgctgaagctagatcctgaaaatgtactaccaaatcagcagagaaaagattctagaagaaggaaggatatggcccatgtcagtattctattaagccatcatttggatgatgatgttgtcaagcgtcagaagaagatagattctgccgcacaaagaacatgctagaagcaataactattggcaagccaatagttacatcgatgtggcttgaaaattgtggagaagcaggttgttttattgatgagaggaagtatattctgagggatgaaaagaaggaaaaagagataggtttcagcatgcctatatcactggcctcagcttgcaatcatcctcttctgctgggaaaacgagtttttgtaacatcaaatgtgaaaccaagtcaagcagtggtgactagcttggtcaaagcatcatcggggcagccactggagagggtaggacggtccataatgaatgagaaggaagtagctccggacctactggttatctcatgtgaagaagactaccaaacctgtgcaccgctgctcgagaaagcgtggagtttctgctaaacggtatcgtcattcagaagctggagtacgagaggcaccgccttttcttggaccgagtcaaacagacccgctcgtcgcggtggttgaaggacaccgtgcaggaccggtttgtccctgtacccaagcgtcgccgtagataggcgaacaggttcggtgcatagtttttctaactaaatcatgcttctgtttcccgagccttagcagctcaagaccactgtatatgtatgtaagccatatgctaaagtattcctgtgctgccatgtgctgggtgattgagtaatgcgggcctaaccttttgttttcctcgtctgtaaattttgtagtgtaggtgttcatatgtgttgtagcctgttttcgcccccttctcagctgaacctgggtggtaagtaattagccagagactgttgagtgtttgatgaaatgttatgtattctgttgttttggagatgtcagatggctagagctggattgtgtgaacttgaggtgccg

SEQ ID NO: 16644 - DNA, 4187 bp, Zea Mays
gcgtactccccgctccgtgctccgcaactccctcttttcccgccgccacgactcgccgtgcgcgccgcatcgccgccgcggaactcgcgcacaacagaccagatattttcccggccgtgcgcacctctcgtcgagaggcgtcgctctcttcctcctctacttcgtcgccctttactgtttcggagccggggcgggttgtcctaggagtcggtttcgttccaagatttcccttctccttccgttcaattcgttttgggtttgtgccgtgcgctgcgcccaatctctacgggccaaggcatccgtggtccgattgggtcagtcttcgtctttctccgagtatctatgggggttcggtcgaatccccgtccgcaacactaagccctgtcctacccgtgatgcgatgcgcggcgaggccggcaatgactgtggtggcggggatacccaagtcctggacggcgggacacctccgttaggttctcctccgagtgatggcgatgagacacaacgcgaggcggatgattgggccctgtacgacgaaacacagcctctggatgatgctgagacccagttaatagacgaggtggaggagggtgtggctggcgattggacggagacacagttgatggatagtggcaacgaggatggtggctgtggcgatgaggatcatggcaatgacggtgacccagtgaagacgaagcaggtggaagatgaagaaggaggcgacgttggtggtggcgtggatgataatgccaacaaatggaccaagacccagttggatgaaaaatgtgaggtggatggagtgaacaacattgttggagacatggttgagacccagttggttgaggaacctgaggaggatgccgacaaggatggattaaatggtcatggtgaacatgatcttggtgagtgggggaagacccagttggttgaagactctgacgaagatataggtgactatgagttgagtgatggcaccgttgtcctaagtgacaatgagagcctctcaggggatgagagggttgtgaagtcaggaatggataaaagggatgtgaagttcggaatggaaggaagaatcgaggggttaactggagagataaggaagcatgatgataataatttggtggattctgatgcatcgacggacgaggagggtgacacagattcaggtcaccttcatatgaaagtaccttttgttcgtgttgcatcagtactgacatgtggaatttctgaacctcgggacactatgtctgtgaactgtatgaagcaagggaaacaaatggcctctgatgcaatacaccccatgccgaaagttgtagatcaatctactaaatgtagcacatcctttggtgaggttgataatgactctcatggttatgtacagaaccatgataaaggtggagctaaaagcagagacaagtgctcaacggcaaaaaagctttttgctgacacaacagctgaggatggagaaaagaacagcagatgtcttgctggattaagctacgctggatcacaagagcctggtgatctgtcacaagcaaatgcttttgatgttgtggacaggttgatttcaataaattgtggattatcatctcaagaaaccatcccaaataaattggaaatagcaaagccacatgcttcaagtaagaggggtactttaatgttggctgagaaggttgaccttggtagaagttcaaatgggaaggccgaaatatttgaatttgtggataaccttgaagatgagggaggaggtgactttttcagtaaaaacagagacatcttgttgccaaaaccaattggtagaggtgaaccaaagagtcattataccagagcaaagaaaccttccacaaaaaaatcatgtggagaaaataaaataggggaagccatgaacaaaagaaattccaaactacctgggaggttggaaactattcctttatcacattcaagactattcaaaagtgacgtaaagagtaagcaggcttatggaagcaggactaagaaaaaccttttgaaggacttagataacctatcaaatgccaaatcgttggaagaacaggaaagggctgatgtagctttgaatgatgttggtccagatactcaaatggctgttgaagctatggaggccctggtacaatgttcacctgctaaaagtttatctgctgaagatcaacctctgctcaatagagatacgatggctgagaagtctggaatagctaaaagtcatttgaagaatggttctcagagaactagcaacatccaggaaggtgtcacaacacgttctaagagaagaaaagtacctgacttcagtaccaagcctcagaaagaaagactaagaggatcaaaggtgcaagaaagttctgagcctatagtaaaagtgaagcataagcaaacaaagtctgtacctgagaaaagcaaagtttcaaaggaatttattgatgaaaataagtaccacgggacacctattgctcaccgaactaggcattgtggtaggaatgacccttctgcatttatcgagttctctaataaacacttgaggagaggcaagaaattgaccggtgacagctccactattcagcaagtgcaaaataaccgaattgcaattgaatctggtttgagttattttgaaaaagaaagcacagagcagatttgtacaaataatgatcaagatcttcagcaatctaaggatggaagcactcaacggaccagtgtaaataatgctcaaaaccttgaaacacacagagttgaaccaacaactgatgttacctgcagagatatcccattgcatcccaaacggcgaagaacgcctacaaaattgatactgtcaacttctgcagcagctgcaaatcatgaaataccatcagaagtggcaagaccatacaagaaaaggcggatttttgtaagaagtgtttctgacctgctaaagtatgcaaagagggaaccttcccatgggagatcagcttctatgctgtccagcatattagagaagtcattagctgcttctcctgtacttaatttttctgtatgtggtgacagcaaaacttcttctgatgtcattagctctgcacagagaccgaaggaatcctcccatgacgaggatacaagtaaatcaccagaaaacaatcctcaagttccaaatcgttccatgaaaacaccgtcaaaagtggttaatgaattgtcacccacttttagtcctgcgaatccatcaaaaggctcaagtagaaacttgtcaaaagcttctgttgcgagagaattgctgaagctagatcctgaaaatgtactaccaaatcagcagagaaaagattctagaagaaggaaggatatggcccatgtcagtattctattaagccatcatttggatgatgatgttgtcaagcgtcagaagaagatcttggcacgcttacgaggttctgaagcattttcaatggccgatgcaacacactttgttgcagatagattctgccgcacaaagaacatgctagaagcaataactattggcaagccaatagttacatcgatgtggcttgaaaattgtggagaagcaggttgttttattgatgagaggaagtatattctgagggatgaaaagaaggaaaaagagataggtttcagcatgcctatatcactggcctcagcttgcaatcatcctcttctgctgggaaaacgagtttttgtaacatcaaatgtgaaaccaagtcaagcagtggtgactagcttggtcaaagcatcatcggggcagccactggagagggtaggacggtccataatgaatgagaaggaagtagctccggacctactggttatctcatgtgaagaagactaccaaacctgtgcaccgctgctcgagaaaggtgcgagtgttttcagcgtggagtttctgctaaacggtatcgtcattcagaagctggagtacgagaggcaccgccttttcttggaccgagtcaaacagacccgctcgtcgcggtggttgaaggacaccgtgcaggaccggtttgtccctgtacccaagcgtcgccgtagataggcgaacaggtgttcatatgtgttgtagcctgttttcgcccccttctcagctgaacctgggtggtaagtaattagccagagactgttgagtgtttgatgaaatgttatgtattctgttgttttggagatgtcagatggctagagctggattgtgtgaacttgaggtgccg

SEQ ID NO: 16645 - DNA, 4182 bp, Zea Mays
cagggttttcccctgccctccggtccccgcgcgtactccccgctccgtgctccgcaactccctcttttcccgccgccacgactcgccgtgcgcgccgcatcgccgccgcggaactcgcgcacaacagaccagatattttcccggccgtgcgcacctctcgtcgagaggcgtcgctctcttcctcctctacttcgtcgccctttactgtttcggagccggggcgggttgtcctaggagtcggtttcgttccaagatttcccttctccttccgttcaattcgttttgggtttgtgccgtgcgctgcgcccaatctctacgggccaaggcatccgtggtccgattgggtcagtcttcgtctttctccgagtatctatgggggttcggtcgaatccccgtccgcaacactaagccctgtcctacccgtgatgcgatgcgcggcgaggccggcaatgactgtggtggcggggatacccaagtcctggacggcgggacacctccgttaggttctcctccgagtgatggcgatgagacacaacgcgaggcggatgattgggccctgtacgacgaaacacagcctctggatgatgctgagacccagttaatagacgaggtggaggagggtgtggctggcgattggacggagacacagttgatggatagtggcaacgaggatggtggctgtggcgatgaggatcatggcaatgacggtgacccagtgaagacgaagcaggtggaagatgaagaaggaggcgacgttggtggtggcgtggatgataatgccaacaaatggaccaagacccagttggatgaaaaatgtgaggtggatggagtgaacaacattgttggagacatggttgagacccagttggttgaggaacctgaggaggatgccgacaaggatggattaaatggtcatggtgaacatgatcttggtgagtgggggaagacccagttggttgaagactctgacgaagatataggtgactatgagttgagtgatggcaccgttgtcctaagtgacaatgagagcctctcaggggatgagagggttgtgaagtcaggaatggataaaagggatgtgaagttcggaatggaaggaagaatcgaggggttaactggagagataaggaagcatgatgataataatttggtggattctgatgcatcgacggacgaggagggtgacacagattcagaaccatgataaaggtggagctaaaagcagagacaagtgctcaacggcaaaaaagctttttgctgacacaacagctgaggatggagaaaagaacagcagatgtcttgctggattaagctacgctggatcacaagagcctggtgatctgtcacaagcaaatgcttttgatgttgtggacaggttgatttcaataaattgtggattatcatctcaagaaaccatcccaaataaattggaaatagcaaagccacatgcttcaagtaagaggggtactttaatgttggctgagaaggttgaccttggtagaagttcaaatgggaaggccgaaatatttgaatttgtggataaccttgaagatgagggaggaggtgactttttcagtaaaaacagagacatcttgttgccaaaaccaattggtagaggtgaaccaaagagtcattataccagagcaaagaaaccttccacaaaaaaatcatgtggagaaaataaaataggggaagccatgaacaaaagaaattccaaactacctgggaggttggaaactattcctttatcacattcaagactattcaaaagtgacgtaaagagtaagcaggcttatggaagcaggactaagaaaaaccttttgaaggacttagataacctatcaaatgccaaatcgttggaagaacaggaaagggctgatgtagctttgaatgatgttggtccagatactcaaatggctgttgaagctatggaggccctggtacaatgttcacctgctaaaagtttatctgctgaagatcaacctctgctcaatagagatacgatggctgagaagtctggaatagctaaaagtcatttgaagaatggttctcagagaactagcaacatccaggaaggtgtcacaacacgttctaagagaagaaaagtacctgacttcagtaccaagcctcagaaagaaagactaagaggatcaaaggtgcaagaaagttctgagcctatagtaaaagtgaagcataagcaaacaaagtctgtacctgagaaaagcaaagtttcaaaggaatttattgatgaaaataagtaccacgggacacctattgctcaccgaactaggcattgtggtaggaatgacccttctgcatttatcgagttctctaataaacacttgaggagaggcaagaaattgaccggtgacagctccactattcagcaagtgcaaaataaccgaattgcaattgaatctggtttgagttattttgaaaaagaaagcacagagcagatttgtacaaataatgatcaagatcttcagcaatctaaggatggaagcactcaacggaccagtgtaaataatgctcaaaaccttgaaacacacagagttgaaccaacaactgatgttacctgcagagatatcccattgcatcccaaacggcgaagaacgcctacaaaattgatactgtcaacttctgcagcagctgcaaatcatgaaataccatcagaagtggcaagaccatacaagaaaaggcggatttttgtaagaagtgtttctgacctgctaaagtatgcaaagagggaaccttcccatgggagatcagcttctatgctgtccagcatattagagaagtcattagctgcttctcctgtacttaatttttctgtatgtggtgacagcaaaacttcttctgatgtcattagctctgcacagagaccgaaggaatcctcccatgacgaggatacaagtaaatcaccagaaaacaatcctcaagttccaaatcgttccatgaaaacaccgtcaaaagtggttaatgaattgtcacccacttttagtcctgcgaatccatcaaaaggctcaagtagaaacttgtcaaaagcttctgttgcgagagaattgctgaagctagatcctgaaaatgtactaccaaatcagcagagaaaagattctagaagaaggaaggatatggcccatgtcagtattctattaagccatcatttggatgatgatgttgtcaagcgtcagaagaagatcttggcacgcttacgaggttctgaagcattttcaatggccgatgcaacacactttgttgcagatagattctgccgcacaaagaacatgctagaagcaataactattggcaagccaatagttacatcgatgtggcttgaaaattgtggagaagcaggttgttttattgatgagaggaagtatattctgagggatgaaaagaaggaaaaagagataggtttcagcatgcctatatcactggcctcagcttgcaatcatcctcttctgctgggaaaacgagtttttgtaacatcaaatgtgaaaccaagtcaagcagtggtgactagcttggtcaaagcatcatcggggcagccactggagagggtaggacggtccataatgaatgagaaggaagtagctccggacctactggttatctcatgtgaagaagactaccaaacctgtgcaccgctgctcgagaaaggtgcgagtgttttcagcgtggagtttctgctaaacggtatcgtcattcagaagctggagtacgagaggcaccgccttttcttggaccgagtcaaacagacccgctcgtcgcggtggttgaaggacaccgtgcaggaccggtttgtccctgtacccaagcgtcgccgtagataggcgaacaggttcggtgcatagtttttctaactaaatcatgcttctgtttcccgagccttagcagctcaagaccactgtatatgtatgtaagccatatgctaaagtattcctgtgctgccatgtgctgggtgattgagtaatgcgggcctaaccttttgttttcctcgtctgtaaattttgtagtgtaggtgttcatatgtgttgtagcctgttttcgcccccttctcagctgaacctgggtggtaagtaattagccagagactgttgagtgtttgatgaaatgttatgtattctgttgttttggagatgtcagatggctagagctggattgtgtgaacttgaggtgccg

SEQ ID NO: 16646 - DNA, 4295 bp, Zea Mays
cagggttttcccctgccctccggtccccgcgcgtactccccgctccgtgctccgcaactccctcttttcccgccgccacgactcgccgtgcgcgccgcatcgccgccgcggaactcgcgcacaacagaccagatattttcccggccgtgcgcacctctcgtcgagaggcgtcgctctcttcctcctctacttcgtcgccctttactgtttcggagccggggcgggttgtcctaggagtcggtttcgttccaagatttcccttctccttccgttcaattcgttttgggtttgtgccgtgcgctgcgcccaatctctacgggccaaggcatccgtggtccgattgggtcagtcttcgtctttctccgagtatctatgggggttcggtcgaatccccgtccgcaacactaagccctgtcctacccgtgatgcgatgcgcggcgaggccggcaatgactgtggtggcggggatacccaagtcctggacggcgggacacctccgttaggttctcctccgagtgatggcgatgagacacaacgcgaggcggatgattgggccctgtacgacgaaacacagcctctggatgatgctgagacccagttaatagacgaggtggaggagggtgtggctggcgattggacggagacacagttgatggatagtggcaacgaggatggtggctgtggcgatgaggatcatggcaatgacggtgacccagtgaagacgaagcaggtggaagatgaagaaggaggcgacgttggtggtggcgtggatgataatgccaacaaatggaccaagacccagttggatgaaaaatgtgaggtggatggagtgaacaacattgttggagacatggttgagacccagttggttgaggaacctgaggaggatgccgacaaggatggattaaatggtcatggtgaacatgatcttggtgagtgggggaagacccagttggttgaagactctgacgaagatataggtgactatgagttgagtgatggcaccgttgtcctaagtgacaatgagagcctctcaggggatgagagggttgtgaagtcaggaatggataaaagggatgtgaagttcggaatggaaggaagaatcgaggggttaactggagagataaggaagcatgatgataataatttggtggattctgatgcatcgacggacgaggagggtgacacagattcagggaaacaaatggcctctgatgcaatacaccccatgccgaaagttgtagatcaatctactaaatgtagcacatcctttggtgaggttgataatgactctcatggttatgtacagaaccatgataaaggtggagctaaaagcagagacaagtgctcaacggcaaaaaagctttttgctgacacaacagctgaggatggagaaaagaacagcagatgtcttgctggattaagctacgctggatcacaagagcctggtgatctgtcacaagcaaatgcttttgatgttgtggacaggttgatttcaataaattgtggattatcatctcaagaaaccatcccaaataaattggaaatagcaaagccacatgcttcaagtaagaggggtactttaatgttggctgagaaggttgaccttggtagaagttcaaatgggaaggccgaaatatttgaatttgtggataaccttgaagatgagggaggaggtgactttttcagtaaaaacagagacatcttgttgccaaaaccaattggtagaggtgaaccaaagagtcattataccagagcaaagaaaccttccacaaaaaaatcatgtggagaaaataaaataggggaagccatgaacaaaagaaattccaaactacctgggaggttggaaactattcctttatcacattcaagactattcaaaagtgacgtaaagagtaagcaggcttatggaagcaggactaagaaaaaccttttgaaggacttagataacctatcaaatgccaaatcgttggaagaacaggaaagggctgatgtagctttgaatgatgttggtccagatactcaaatggctgttgaagctatggaggccctggtacaatgttcacctgctaaaagtttatctgctgaagatcaacctctgctcaatagagatacgatggctgagaagtctggaatagctaaaagtcatttgaagaatggttctcagagaactagcaacatccaggaaggtgtcacaacacgttctaagagaagaaaagtacctgacttcagtaccaagcctcagaaagaaagactaagaggatcaaaggtgcaagaaagttctgagcctatagtaaaagtgaagcataagcaaacaaagtctgtacctgagaaaagcaaagtttcaaaggaatttattgatgaaaataagtaccacgggacacctattgctcaccgaactaggcattgtggtaggaatgacccttctgcatttatcgagttctctaataaacacttgaggagaggcaagaaattgaccggtgacagctccactattcagcaagtgcaaaataaccgaattgcaattgaatctggtttgagttattttgaaaaagaaagcacagagcagatttgtacaaataatgatcaagatcttcagcaatctaaggatggaagcactcaacggaccagtgtaaataatgctcaaaaccttgaaacacacagagttgaaccaacaactgatgttacctgcagagatatcccattgcatcccaaacggcgaagaacgcctacaaaattgatactgtcaacttctgcagcagctgcaaatcatgaaataccatcagaagtggcaagaccatacaagaaaaggcggatttttgtaagaagtgtttctgacctgctaaagtatgcaaagagggaaccttcccatgggagatcagcttctatgctgtccagcatattagagaagtcattagctgcttctcctgtacttaatttttctgtatgtggtgacagcaaaacttcttctgatgtcattagctctgcacagagaccgaaggaatcctcccatgacgaggatacaagtaaatcaccagaaaacaatcctcaagttccaaatcgttccatgaaaacaccgtcaaaagtggttaatgaattgtcacccacttttagtcctgcgaatccatcaaaaggctcaagtagaaacttgtcaaaagcttctgttgcgagagaattgctgaagctagatcctgaaaatgtactaccaaatcagcagagaaaagattctagaagaaggaaggatatggcccatgtcagtattctattaagccatcatttggatgatgatgttgtcaagcgtcagaagaagatcttggcacgcttacgaggttctgaagcattttcaatggccgatgcaacacactttgttgcagatagattctgccgcacaaagaacatgctagaagcaataactattggcaagccaatagttacatcgatgtggcttgaaaattgtggagaagcaggttgttttattgatgagaggaagtatattctgagggatgaaaagaaggaaaaagagataggtttcagcatgcctatatcactggcctcagcttgcaatcatcctcttctgctgggaaaacgagtttttgtaacatcaaatgtgaaaccaagtcaagcagtggtgactagcttggtcaaagcatcatcggggcagccactggagagggtaggacggtccataatgaatgagaaggaagtagctccggacctactggttatctcatgtgaagaagactaccaaacctgtgcaccgctgctcgagaaaggtgcgagtgttttcagcgtggagtttctgctaaacggtatcgtcattcagaagctggagtacgagaggcaccgccttttcttggaccgagtcaaacagacccgctcgtcgcggtggttgaaggacaccgtgcaggaccggtttgtccctgtacccaagcgtcgccgtagataggcgaacaggttcggtgcatagtttttctaactaaatcatgcttctgtttcccgagccttagcagctcaagaccactgtatatgtatgtaagccatatgctaaagtattcctgtgctgccatgtgctgggtgattgagtaatgcgggcctaaccttttgttttcctcgtctgtaaattttgtagtgtaggtgttcatatgtgttgtagcctgttttcgcccccttctcagctgaacctgggtggtaagtaattagccagagactgttgagtgtttgatgaaatgttatgtattctgttgttttggagatgtcagatggctagagctggattgtgtgaacttgaggtgccg

SEQ ID NO: 16647 - DNA, 4299 bp, Zea Mays
cagggttttcccctgccctccggtccccgcgcgtactccccgctccgtgctccgcaactccctcttttcccgccgccacgactcgccgtgcgcgccgcatcgccgccgcggaactcgcgcacaacagaccagatattttcccggccgtgcgcacctctcgtcgagaggcgtcgctctcttcctcctctacttcgtcgccctttactgtttcggagccggggcgggttgtcctaggagtcggtttcgttccaagatttcccttctccttccgttcaattcgttttgggtttgtgccgtgcgctgcgcccaatctctacgggccaaggcatccgtggtccgattgggtcagtcttcgtctttctccgagtatctatgggggttcggtcgaatccccgtccgcaacactaagccctgtcctacccgtgatgcgatgcgcggcgaggccggcaatgactgtggtggcggggatacccaagtcctggacggcgggacacctccgttaggttctcctccgagtgatggcgatgagacacaacgcgaggcggatgattgggccctgtacgacgaaacacagcctctggatgatgctgagacccagttaatagacgaggtggaggagggtgtggctggcgattggacggagacacagttgatggatagtggcaacgaggatggtggctgtggcgatgaggatcatggcaatgacggtgacccagtgaagacgaagcaggtggaagatgaagaaggaggcgacgttggtggtggcgtggatgataatgccaacaaatggaccaagacccagttggatgaaaaatgtgaggtggatggagtgaacaacattgttggagacatggttgagacccagttggttgaggaacctgaggaggatgccgacaaggatggattaaatggtcatggtgaacatgatcttggtgagtgggggaagacccagttggttgaagactctgacgaagatataggtgactatgagttgagtgatggcaccgttgtcctaagtgacaatgagagcctctcaggggatgagagggttgtgaagtcaggaatggataaaagggatgtgaagttcggaatggaaggaagaatcgaggggttaactggagagataaggaagcatgatgataataatttggtggattctgatgcatcgacggacgaggagggtgacacagattcagcaagggaaacaaatggcctctgatgcaatacaccccatgccgaaagttgtagatcaatctactaaatgtagcacatcctttggtgaggttgataatgactctcatggttatgtacagaaccatgataaaggtggagctaaaagcagagacaagtgctcaacggcaaaaaagctttttgctgacacaacagctgaggatggagaaaagaacagcagatgtcttgctggattaagctacgctggatcacaagagcctggtgatctgtcacaagcaaatgcttttgatgttgtggacaggttgatttcaataaattgtggattatcatctcaagaaaccatcccaaataaattggaaatagcaaagccacatgcttcaagtaagaggggtactttaatgttggctgagaaggttgaccttggtagaagttcaaatgggaaggccgaaatatttgaatttgtggataaccttgaagatgagggaggaggtgactttttcagtaaaaacagagacatcttgttgccaaaaccaattggtagaggtgaaccaaagagtcattataccagagcaaagaaaccttccacaaaaaaatcatgtggagaaaataaaataggggaagccatgaacaaaagaaattccaaactacctgggaggttggaaactattcctttatcacattcaagactattcaaaagtgacgtaaagagtaagcaggcttatggaagcaggactaagaaaaaccttttgaaggacttagataacctatcaaatgccaaatcgttggaagaacaggaaagggctgatgtagctttgaatgatgttggtccagatactcaaatggctgttgaagctatggaggccctggtacaatgttcacctgctaaaagtttatctgctgaagatcaacctctgctcaatagagatacgatggctgagaagtctggaatagctaaaagtcatttgaagaatggttctcagagaactagcaacatccaggaaggtgtcacaacacgttctaagagaagaaaagtacctgacttcagtaccaagcctcagaaagaaagactaagaggatcaaaggtgcaagaaagttctgagcctatagtaaaagtgaagcataagcaaacaaagtctgtacctgagaaaagcaaagtttcaaaggaatttattgatgaaaataagtaccacgggacacctattgctcaccgaactaggcattgtggtaggaatgacccttctgcatttatcgagttctctaataaacacttgaggagaggcaagaaattgaccggtgacagctccactattcagcaagtgcaaaataaccgaattgcaattgaatctggtttgagttattttgaaaaagaaagcacagagcagatttgtacaaataatgatcaagatcttcagcaatctaaggatggaagcactcaacggaccagtgtaaataatgctcaaaaccttgaaacacacagagttgaaccaacaactgatgttacctgcagagatatcccattgcatcccaaacggcgaagaacgcctacaaaattgatactgtcaacttctgcagcagctgcaaatcatgaaataccatcagaagtggcaagaccatacaagaaaaggcggatttttgtaagaagtgtttctgacctgctaaagtatgcaaagagggaaccttcccatgggagatcagcttctatgctgtccagcatattagagaagtcattagctgcttctcctgtacttaatttttctgtatgtggtgacagcaaaacttcttctgatgtcattagctctgcacagagaccgaaggaatcctcccatgacgaggatacaagtaaatcaccagaaaacaatcctcaagttccaaatcgttccatgaaaacaccgtcaaaagtggttaatgaattgtcacccacttttagtcctgcgaatccatcaaaaggctcaagtagaaacttgtcaaaagcttctgttgcgagagaattgctgaagctagatcctgaaaatgtactaccaaatcagcagagaaaagattctagaagaaggaaggatatggcccatgtcagtattctattaagccatcatttggatgatgatgttgtcaagcgtcagaagaagatcttggcacgcttacgaggttctgaagcattttcaatggccgatgcaacacactttgttgcagatagattctgccgcacaaagaacatgctagaagcaataactattggcaagccaatagttacatcgatgtggcttgaaaattgtggagaagcaggttgttttattgatgagaggaagtatattctgagggatgaaaagaaggaaaaagagataggtttcagcatgcctatatcactggcctcagcttgcaatcatcctcttctgctgggaaaacgagtttttgtaacatcaaatgtgaaaccaagtcaagcagtggtgactagcttggtcaaagcatcatcggggcagccactggagagggtaggacggtccataatgaatgagaaggaagtagctccggacctactggttatctcatgtgaagaagactaccaaacctgtgcaccgctgctcgagaaaggtgcgagtgttttcagcgtggagtttctgctaaacggtatcgtcattcagaagctggagtacgagaggcaccgccttttcttggaccgagtcaaacagacccgctcgtcgcggtggttgaaggacaccgtgcaggaccggtttgtccctgtacccaagcgtcgccgtagataggcgaacaggttcggtgcatagtttttctaactaaatcatgcttctgtttcccgagccttagcagctcaagaccactgtatatgtatgtaagccatatgctaaagtattcctgtgctgccatgtgctgggtgattgagtaatgcgggcctaaccttttgttttcctcgtctgtaaattttgtagtgtaggtgttcatatgtgttgtagcctgttttcgcccccttctcagctgaacctgggtggtaagtaattagccagagactgttgagtgtttgatgaaatgttatgtattctgttgttttggagatgtcagatggctagagctggattgtgtgaacttgaggtgccg

SEQ ID NO: 16648 - DNA, 3829 bp, Zea Mays
cttcttcttctcccactgcggcgactggggctggttctcctccgagtgatggcgatgagacacaacgcgaggcggatgattgggccctgtacgacgaaacacagcctctggatgatgctgagacccagttaatagacgaggtggaggagggtgtggctggcgattggacggagacacagttgatggatagtggcaacgaggatggtggctgtggcgatgaggatcatggcaatgacggtgacccagtgaagacgaagcaggtggaagatgaagaaggaggcgacgttggtggtggcgtggatgataatgccaacaaatggaccaagacccagttggatgaaaaatgtgaggtggatggagtgaacaacattgttggagacatggttgagacccagttggttgaggaacctgaggaggatgccgacaaggatggattaaatggtcatggtgaacatgatcttggtgagtgggggaagacccagttggttgaagactctgacgaagatataggtgactatgagttgagtgatggcaccgttgtcctaagtgacaatgagagcctctcaggggatgagagggttgtgaagtcaggaatggataaaagggatgtgaagttcggaatggaaggaagaatcgaggggttaactggagagataaggaagcatgatgataataatttggtggattctgatgcatcgacggacgaggagggtgacacagattcagcaagggaaacaaatggcctctgatgcaatacaccccatgccgaaagttgtagatcaatctactaaatgtagcacatcctttggtgaggttgataatgactctcatggttatgtacagaaccatgataaaggtggagctaaaagcagagacaagtgctcaacggcaaaaaagctttttgctgacacaacagctgaggatggagaaaagaacagcagatgtcttgctggattaagctacgctggatcacaagagcctggtgatctgtcacaagcaaatgcttttgatgttgtggacaggttgatttcaataaattgtggattatcatctcaagaaaccatcccaaataaattggaaatagcaaagccacatgcttcaagtaagaggggtactttaatgttggctgagaaggttgaccttggtagaagttcaaatgggaaggccgaaatatttgaatttgtggataaccttgaagatgagggaggaggtgactttttcagtaaaaacagagacatcttgttgccaaaaccaattggtagaggtgaaccaaagagtcattataccagagcaaagaaaccttccacaaaaaaatcatgtggagaaaataaaataggggaagccatgaacaaaagaaattccaaactacctgggaggttggaaactattcctttatcacattcaagactattcaaaagtgacgtaaagagtaagcaggcttatggaagcaggactaagaaaaaccttttgaaggacttagataacctatcaaatgccaaatcgttggaagaacaggaaagggctgatgtagctttgaatgatgttggtccagatactcaaatggctgttgaagctatggaggccctggtacaatgttcacctgctaaaagtttatctgctgaagatcaacctctgctcaatagagatacgatggctgagaagtctggaatagctaaaagtcatttgaagaatggttctcagagaactagcaacatccaggaaggtgtcacaacacgttctaagagaagaaaagtacctgacttcagtaccaagcctcagaaagaaagactaagaggatcaaaggtgcaagaaagttctgagcctatagtaaaagtgaagcataagcaaacaaagtctgtacctgagaaaagcaaagtttcaaaggaatttattgatgaaaataagtaccacgggacacctattgctcaccgaactaggcattgtggtaggaatgacccttctgcatttatcgagttctctaataaacacttgaggagaggcaagaaattgaccggtgacagctccactattcagcaagtgcaaaataaccgaattgcaattgaatctggtttgagttattttgaaaaagaaagcacagagcagatttgtacaaataatgatcaagatcttcagcaatctaaggatggaagcactcaacggaccagtgtaaataatgctcaaaaccttgaaacacacagagttgaaccaacaactgatgttacctgcagagatatcccattgcatcccaaacggcgaagaacgcctacaaaattgatactgtcaacttctgcagcagctgcaaatcatgaaataccatcagaagtggcaagaccatacaagaaaaggcggatttttgtaagaagtgtttctgacctgctaaagtatgcaaagagggaaccttcccatgggagatcagcttctatgctgtccagcatattagagaagtcattagctgcttctcctgtacttaatttttctgtatgtggtgacagcaaaacttcttctgatgtcattagctctgcacagagaccgaaggaatcctcccatgacgaggatacaagtaaatcaccagaaaacaatcctcaagttccaaatcgttccatgaaaacaccgtcaaaagtggttaatgaattgtcacccacttttagtcctgcgaatccatcaaaaggctcaagtagaaacttgtcaaaagcttctgttgcgagagaattgctgaagctagatcctgaaaatgtactaccaaatcagcagagaaaagattctagaagaaggaaggatatggcccatgtcagtattctattaagccatcatttggatgatgatgttgtcaagcgtcagaagaagatcttggcacgcttacgaggttctgaagcattttcaatggccgatgcaacacactttgttgcagatagattctgccgcacaaagaacatgctagaagcaataactattggcaagccaatagttacatcgatgtggcttgaaaattgtggagaagcaggttgttttattgatgagaggaagtatattctgagggatgaaaagaaggaaaaagagataggtttcagcatgcctatatcactggcctcagcttgcaatcatcctcttctgctgggaaaacgagtttttgtaacatcaaatgtgaaaccaagtcaagcagtggtgactagcttggtcaaagcatcatcggggcagccactggagagggtaggacggtccataatgaatgagaaggaagtagctccggacctactggttatctcatgtgaagaagactaccaaacctgtgcaccgctgctcgagaaaggtgcgagtgttttcagcgtggagtttctgctaaacggtatcgtcattcagaagctggagtacgagaggcaccgccttttcttggaccgagtcaaacagacccgctcgtcgcggtggttgaaggacaccgtgcaggaccggtttgtccctgtacccaagcgtcgccgtagataggcgaacaggttcggtgcatagtttttctaactaaatcatgcttctgtttcccgagccttagcagctcaagaccactgtatatgtatgtaagccatatgctaaagtattcctgtgctgccatgtgctgggtgattgagtaatgcgggcctaaccttttgttttcctcgtctgtaaattttgtagtgtaggtgttcatatgtgttgtagcctgttttcgcccccttctcagctgaacctgggtggtaagtaattagccagagactgttgagtgtttgatgaaatgttatgtattctgttgttttggagatgtcagatggctagagctggattgtgtgaacttgaggtgccg

SEQ ID NO: 16649 - DNA, 2917 bp, Zea Mays
atccgtcagtgcagtcaagtagtcaccggttcacgcaaaccctagtaccaggccgccagtcccgacctccccggctccagcccccgcgcacgaccagctctgacgaccccgctcctgcctcccacctcctccggtggcctcgcgcctgactccctcctccggcacccaggccagccgcgccccgcctctcgcacaggacggaaatgatgccttctcctttttgttagctgattctgatcaaactggagcacttagagcaaccatgggggggaaatcggagcagaagtctcgaaaagagaggcggaaagaggcgagatcagagaagcacaagctgcgatttctttcttgggttgggcatcagggtggcaaaaagaagaagccgtcaatgtcagtagtagagccaagttcggttgaggagaagccaaagaaagagcctgatggcatgatgaagaagaagagaaagagggaagcagagggtaagcggaagcccaggtccaacttccaggaatatcttgagatggagatgggtggacctgtgagcatggaggaggatctagagatggagaggaagcttgcaaaaaagctcaagttgaagaaaggaaagttgggaggtcctgatgatggtatggatgacctttttgcggaccttgggtttggtggtgactttggttcagatgatggtgaaacaaaagcatatgattggaatgtggtggaggacactaatttagacaagagaaaaggtaaaaagaaaaataaggagaaaaaggatgacacagtgatggaggaaccagatgacattgatgaagagaatggtcggaaaaagaagaaaaaaaagaagaaggatggtatggagaaggaggaactggttgatgtaggtgaagagaatggtcagaaaaggaaaaagaagaagaagatgaaggatgactcagagatggacgaaccagatgatgaaggtgttcacatggatgaagagaatgatggagcagtcctggaatctgaggatggagtgtctaatgtggttgaactgcccaaagaatcaaaagggaagtatgtacctccgagtctgcgtaatgcttccaattcagaatcagaagaaattgcccagatgcgtcgcagagacttctgaacagactttcagagtcaaatgtggagtccattactcaggaaattgccacactttttcgatctgttccacgaagtgatggctcccagataattggggatgaggttttggctagttgttcccgaggacctcgtggcaatgaacagtatgccgctgtctttgcagcctttgttgcaggtatggcatgtttggtcggtgttgacttcagtgccaagatccttgcatctattgctaagtcatttgaggatgagtattcaaaagaagatggtctatctttgagaaaccttaccttactcttctgctatttgtgcatatttggtgttacctcaagcgatcttgtgtatgatcttctgtcgattctgagcaagcgcttgacagagctagatgtctctacagtgttgaccatcctacagtgctgtggaatgaagctgcggggagatgatccatgtgctatgaaagattttgtccttagtattcagaactctgtgaatgatcttaaattgcactctggtgttggagcagacgggaagactgatatacgtagcagaagaatggaatttatgcttgaaaccatatgtgacattaagaacaataagaaaaggcctaaagaggatccttcacaccatactcgaataaaaaagtggcttcaaaagcttaaggcagaagatgtcctcttgcgtgggttaacatggagcaggcttttggaccctgataagaaagggcagtggtggttgtctggggatgttccatctacagtagctaagattgaagatgttgcagctgttataagcaaggatgttgcagagacaaaaaaacttcttcagcttgcagctgctcaacggatgaacactgacatacgaagagcaatcttttgtattataatgagtgctgaagactatgtagatgcttttgaaaagctcttgaggctgggcctttctgggaagcaggaccgagaaattataagggtcattgttgactgttgtctgcatgagaagatgttcaataagtattacacagtccttgcttccaagctatgcaaccatgagaaaaaccacaagttcagcttgcagtactgcatctgggaccattttaaggagctagataatatggagtcaagtagatccatgaaccttgcgaagctagttgcggagatgctgttgaacttcacgctctccctcgcaactttgaaggttgttaacctggccaacccggtggagatgactccggcaagggtctcgcatttccggatgctgtttgagaccttgctacagaaagacgatgcacgcgtgtggaatgtcttcactcgtgtcgctggccttccagagctcgaggtattgagggatggcattgtgatgttcatcaagcagcacgtgatcgccgaggactcagggaaggacttggctagcaaattcaagattgcgaagaaggcgctcgacaatactgccggagttctgatgtaactctgcccttgtcgaacattctgggcatctccaagtaaaacaaagttattagaacattctgctggagtcctctgttctcgttttgccttgttattagaatgcttctccaagagacctttcatgggttttgaatgcttacccaaaaaaaaggctttgatggtcatacattgtaccatttcttagaagtactctctgtttattgtttagctgcacatgaagatccttaggctatctgcactgccacatggtatctattgctccaaaagtgcgctgtaacaaatagagcaaaattgctccaggacgccaatcactacggcaccgtttgtttgggctt

SEQ ID NO: 16650 - DNA, 2904 bp, Zea Mays
cccagcccatccgtcagtgcagtcaagtagtcaccggttcacgcaaaccctagtaccaggccgccagtcccgacctccccggctccagcccccgcgcacgaccagctctgacgaccccgctcctgcctcccacctcctccggtggcctcgcgcctgactccctcctccggcacccaggccagccgcgccccgcctctcgcacaggacggaaatgatgccttctcctttttgttagctgattctgatcaaactggttagttcgatagagaatatcagtaatatcttgctgcccaaactgcagcttcaactgattccgcgtcaggagcacttagagcaaccatgggggggaaatcggagcagaagtctcgaaaagagaggcggaaagaggcgagatcagagaagcacaagctgcgatttctttcttgggttgggcatcagggtggcaaaaagaagaagccgtcaatgtcagtagtagagccaagttcggttgaggagaagccaaagaaagagcctgatggcatgatgaagaagaagagaaagagggaagcagagggtaagcggaagcccaggtccaacttccaggaatatcttgagatggagatgggtggacctgtgagcatggaggaggatctagagatggagaggaagcttgcaaaaaagctcaagttgaagaaaggaaagttgggaggtcctgatgatggtatggatgacctttttgcggaccttgggtttggtggtgactttggttcagatgatggtgaaacaaaagcatatgattggaatgtggtggaggacactaatttagacaagagaaaaggtaaaaagaaaaataaggagaaaaaggatgacacagtgatggaggaaccagatgacattgatgaagagaatggtcggaaaaagaagaaaaaaaagaagaaggatggtatggagaaggaggaactggttgatgtaggtgaagagaatggtcagaaaaggaaaaagaagaagaagatgaaggatgactcagagatggacgaaccagatgatgaaggtgttcacatggatgaagagaatgatggagcagtcctggaatctgaggatggagtgtctaatgtggttgaactgcccaaagaatcaaaagggaagtatgtacctccgagtctgcgtaatgcttccaattcagaatcagaagaaattgcccagatgcgtcgcagagtaagaggacttctgaacagactttcagagtcaaatgtggagtccattactcaggaaattgccacactttttcgatctgttccacgaagtgatggctcccagataattggggatgaggttttggctagttgttcccgaggacctcgtggcaatgaacagttaagggtctcccatcaaccatgtatgccgctgtctttgcagcctttgttgcaggtatggcatgtttggtcggtgttgacttcagtgccaagatccttgcatctattgctaagtcatttgaggatgagtattcaaaagaagatggtctatctttgagaaaccttaccttactcttctgctatttgtgcatatttggtgttacctcaagcgatcttgtgtatgatcttctgtcgattctgagcaagcgcttgacagagctagatgtctctacagtgttgaccatcctacagtgctgtggaatgaagctgcggggagatgatccatgtgctatgaaagattttgtccttagtattcagaactctgtgaatgatcttaaattgcactctggtgttggagcagacgggaagactgatatacgtagcagaagaatggaatttatgcttgaaaccatatgtgacattaagaacaataagaaaaggcctaaagaggatccttcacaccatactcgaataaaaaagtggcttcaaaagcttaaggcagaagatgtcctcttgcgtgggttaacatggagcaggcttttggaccctgataagaaagggcagtggtggttgtctggggatgttccatctacagtagctaagattgaagatgttgcagctgttataagcaaggatgttgcagagacaaaaaaacttcttcagcttgcagctgctcaacggatgaacactgacatacgaagagcaatcttttgtattataatgagtgctgaagactatgtagatgcttttgaaaagctcttgaggctgggcctttctgggaagcaggaccgagaaattataagggtcattgttgactgttgtctgcatgagaagatgttcaataagtattacacagtccttgcttccaagctatgcaaccatgagaaaaaccacaagttcagcttgcaggttgttaacctggccaacccggtggagatgactccggcaagggtctcgcatttccggatgctgtttgagaccttgctacagaaagacgatgcacgcgtgtggaatgtcttcactcgtgtcgctggccttccagagctcgaggtattgagggatggcattgtgatgttcatcaagcagcacgtgatcgccgaggactcagggaaggacttggctagcaaattcaagattgcgaagaaggcgctcgacaatactgccggagttctgatgtaactctgcccttgtcgaacattctgggcatctccaagtaaaacaaagttattagaacattctgctggagtcctctgttctcgttttgccttgttattagaatgcttctccaagagacctttcatgggttttgaatgcttacccaaaaaaaaggctttgatggtcatacattgtaccatttcttagaagtactctctgtttattgtttagctgcacatgaagatccttaggctatctgcactgccacatggtatctattgctccaaaagtgcgctgtaacaaatagagcaaaattgctccaggacgccaatcactacggcaccgtttgtttgggctt

SEQ ID NO: 16651 - DNA, 3024 bp, Zea Mays
cccagcccatccgtcagtgcagtcaagtagtcaccggttcacgcaaaccctagtaccaggccgccagtcccgacctccccggctccagcccccgcgcacgaccagctctgacgaccccgctcctgcctcccacctcctccggtggcctcgcgcctgactccctcctccggcacccaggccagccgcgccccgcctctcgcacaggacggaaatgatgccttctcctttttgttagctgattctgatcaaactggttagttcgatagagaatatcagtaatatcttgctgcccaaactgcagcttcaactgattccgcgtcaggagcacttagagcaaccatgggggggaaatcggagcagaagtctcgaaaagagaggcggaaagaggcgagatcagagaagcacaagctgcgatttctttcttgggttgggcatcagggtggcaaaaagaagaagccgtcaatgtcagtagtagagccaagttcggttgaggagaagccaaagaaagagcctgatggcatgatgaagaagaagagaaagagggaagcagagggtaagcggaagcccaggtccaacttccaggaatatcttgagatggagatgggtggacctgtgagcatggaggaggatctagagatggagaggaagcttgcaaaaaagctcaagttgaagaaaggaaagttgggaggtcctgatgatggtatggatgacctttttgcggaccttgggtttggtggtgactttggttcagatgatggtgaaacaaaagcatatgattggaatgtggtggaggacactaatttagacaagagaaaaggtaaaaagaaaaataaggagaaaaaggatgacacagtgatggaggaaccagatgacattgatgaagagaatggtcggaaaaagaagaaaaaaaagaagaaggatggtatggagaaggaggaactggttgatgtaggtgaagagaatggtcagaaaaggaaaaagaagaagaagatgaaggatgactcagagatggacgaaccagatgatgaaggtgttcacatggatgaagagaatgatggagcagtcctggaatctgaggatggagtgtctaatgtggttgaactgcccaaagaatcaaaagggaagtatgtacctccgagtctgcgtaatgcttccaattcagaatcagaagaaattgcccagatgcgtcgcagagtaagaggacttctgaacagactttcagagtcaaatgtggagtccattactcaggaaattgccacactttttcgatctgttccacgaagtgatggctcccagataattggggatgaggttttggctagttgttcccgaggacctcgtggcaatgaacagttaagggtctcccatcaaccatgtatgccgctgtctttgcagcctttgttgcaggtatggcatgtttggtcggtgttgacttcagtgccaagatccttgcatctattgctaagtcatttgaggatgagtattcaaaagaagatggtctatctttgagaaaccttaccttactcttctgctatttgtgcatatttggtgttacctcaagcgatcttgtgtatgatcttctgtcgattctgagcaagcgcttgacagagctagatgtctctacagtgttgaccatcctacagtgctgtggaatgaagctgcggggagatgatccatgtgctatgaaagattttgtccttagtattcagaactctgtgaatgatcttaaattgcactctggtgttggagcagacgggaagactgatatacgtagcagaagaatggaatttatgcttgaaaccatatgtgacattaagaacaataagaaaaggcctaaagaggatccttcacaccatactcgaataaaaaagtggcttcaaaagcttaaggcagaagatgtcctcttgcgtgggttaacatggagcaggcttttggaccctgataagaaagggcagtggtggttgtctggggatgttccatctacagtagctaagattgaagatgttgcagctgttataagcaaggatgttgcagagacaaaaaaacttcttcagcttgcagctgctcaacggatgaacactgacatacgaagagcaatcttttgtattataatgagtgctgaagactatgtagatgcttttgaaaagctcttgaggctgggcctttctgggaagcaggaccgagaaattataagggtcattgttgactgttgtctgcatgagaagatgttcaataagtattacacagtccttgcttccaagctatgcaaccatgagaaaaaccacaagttcagcttgcagtactgcatctgggaccattttaaggagctagataatatggagtcaagtagatccatgaaccttgcgaagctagttgcggagatgctgttgaacttcacgctctccctcgcaactttgaaggttgttaacctggccaacccggtggagatgactccggcaagggtctcgcatttccggatgctgtttgagaccttgctacagaaagacgatgcacgcgtgtggaatgtcttcactcgtgtcgctggccttccagagctcgaggtattgagggatggcattgtgatgttcatcaagcagcacgtgatcgccgaggactcagggaaggacttggctagcaaattcaagattgcgaagaaggcgctcgacaatactgccggagttctgatgtaactctgcccttgtcgaacattctgggcatctccaagtaaaacaaagttattagaacattctgctggagtcctctgttctcgttttgccttgttattagaatgcttctccaagagacctttcatgggttttgaatgcttacccaaaaaaaaggctttgatggtcatacattgtaccatttcttagaagtactctctgtttattgtttagctgcacatgaagatccttaggctatctgcactgccacatggtatctattgctccaaaagtgcgctgtaacaaatagagcaaaattgctccaggacgccaatcactacggcaccgtttgtttgggctt

SEQ ID NO: 16652 - DNA, 2268 bp, Zea Mays
atccgtcagtgcagtcaagtagtcaccggttcacgcaaaccctagtaccaggccgccagtcccgacctccccggctccagcccccgcgcacgaccagctctgacgaccccgctcctgcctcccacctcctccggtggcctcgcgcctgactccctcctccggcacccaggccagccgcgccccgcctctcgcacaggacggaaatgatgccttctcctttttgttagctgattctgatcaaactggttagttcgatagagaatatcagtaatatcttgctgcccaaactgcagcttcaactgattccgcgtcaggagcacttagagcaaccatgggggggaaatcggagcagaagtctcgaaaagagaggcggaaagaggcgagatcagagaagcacaagctgcgatttctttcttgggttgggcatcagggtggcaaaaagaagaagccgtcaatgtcagtagtagagccaagttcggttgaggagaagccaaagaaagagcctgatggcatgatgaagaagaagagaaagagggaagcagagggtaagcggaagcccaggtccaacttccaggaatatcttgagatggagatgggtggacctgtgagcatggaggaggatctagagatggagaggaagcttgcaaaaaagctcaagttgaagaaaggaaagttgggaggtcctgatgatggtatggatgacctttttgcggaccttgggtttggtggtgactttggttcagatgatggtgaaacaaaagcatatgattggaatgtggtggaggacactaatttagacaagagaaaaggtaaaaagaaaaataaggagaaaaaggatgacacagtgatggaggaaccagatgacattgatgaagagaatggtcggaaaaagaagaaaaaaaagaagaaggatggtatggagaaggaggaactggttgatgtaggtgaagagaatggtcagaaaaggaaaaagaagaagaagatgaaggatgactcagagatggacgaaccagatgatgaaggtgttcacatggatgaagagaatgatggagcagtcctggaatctgaggatggagtgtctaatgtggttgaactgcccaaagaatcaaaagggaagtatgtacctccgagtctgcgtaatgcttccaattcagaatcagaagaaattgcccagatgcgtcgcagagtaagaggacttctgaacagactttcagagtcaaatgtggagtccattactcaggaaattgccacactttttcgatctgttccacgaagtgatggctcccagataattggggatgaggttttggctagttgttcccgaggacctcgtggcaatgaacagtatgccgctgtctttgcagcctttgttgcaggtatggcatgtttggtcggtgttgacttcagtgccaagatccttgcatctattgctaagtcatttgaggatgagtattcaaaagaagatggtctatctttgagaaaccttaccttactcttctgctatttgtgcatatttggtgttacctcaagcgatcttgtgtatgatcttctgtcgattctgagcaagcgcttgacagagctagatgtctctacagtgttgaccatcctacagtgctgtggaatgaagctgcggggagatgatccatgtgctatgaaagattttgtccttagtattcagaactctgtgaatgatcttaaattgcactctggtgttggagcagacgggaagactgatatacgtagcagaagaatggaatttatgcttgaaaccatatgtgacattaagaacaataagaaaaggcctaaagaggatccttcacaccatactcgaataaaaaagtggcttcaaaagcttaaggcagaagatgtcctcttgcgtgggttaacatggagcaggcttttggaccctgataagaaagggcagtggtggttgtctggggatgttccatctacagtagctaagattgaagatgttgcagctgttataagcaaggatgttgcagagacaaaaaaacttcttcagcttgcagctgctcaacggatgaacactgacatacgaagagcaatcttttgtattataatgagtgctgaagactatgtagatgcttttgaaaagctcttgaggctgggcctttctgggaagcaggaccgagaaattataagggtcattgttgactgttgtctgcatgagaagatgttcaataagtattacacagtccttgcttccaagctatgcaaccatgagaaaaaccacaagttcagcttgca

SEQ ID NO: 16653 - DNA, 1035 bp, Zea Mays
gattgtgacaaaatgaaacaacgtggccactttctacatgctagaaatttggaaacaatgtcaattgagttgttcagatttgactctattctcattttctggctgcaaaataggattttatttgcactacgtattttgtaccgtgcagtgtaaaaggagtcttttttttaacgaccggcactagttgtgccaatttctattaatagagaagaaggttacgaagtcccatggaggaggcaaacaaaattacaaaaataatgctgacatggagagcagaagcaaaatgtctgatgtaaatgatatatctaccgatggcaatattgagaccatgctttcagttgagaaagggttgcgtgaattggcttcactcaaggtagaggatgcaatcatgcttactttggctgaaaatcggcatgtcaaacctctctcaggccaagcttctgagggtcggagcccttccgagtcattagagttaagtgcggaagagcgagaagatgtacgcttcaagcaggcatggttgacctatttctggaggcgggcgaaaaatcacaacatagaagaagatatagctgatgagaagctacagttttggatagaacaaatcaattacccagttactacgagcgaagtagtagaagtcgagagaggactccacgagctgaagaaactgggaatcgagtctcagctgtgggaggcgacgaggagagctctggatgatgatttgagcaaccacgggagtccaactggatctgaagcttagcagatgcataatgtggagcgaggctctattgccgattttgtgccgtcagaggccctagagccagccagccctcctagtcctttcctttcgcttgcttggtatcttcatgtaacatattgaacttttcctctttttttttcttcttcttttgggttatctatttttatgctagtttatccgtgaaagcaaaaggggtttaaatcgtggaggagtcgtgatgctctgctctctccatctacagcaacaaaaatattatgcattgcttgattttgcaa

SEQ ID NO: 16654 - DNA, 817 bp, Zea Mays
cccagattccccacaggtcatgacacaatttgacaaataatgctgacatggagagcagaagcaaaatgtctgatgtaaatgatatatctaccgatggcaatattgagaccatgctttcagttgagaaagggttgcgtgaattggcttcactcaaggtagaggatgcaatcatgcttactttggctgaaaatcggcatgtcaaacctctctcaggccaagcttctgagggtcggagcccttccgagtcattagagttaagtgcggaagagcgagaagatgtacgcttcaagcaggcatggttgacctatttctggaggcgggcgaaaaatcacaacatagaagaagatatagctgatgagaagctacagttttggatagaacaaatcaattacccagttactacgagcgaagtagtagaagtcgagagaggactccacgagctgaagaaactgggaatcgagtctcagctgtgggaggcgacgaggagagctctggatgatgatttgagcaaccacgggagtccaactggatctgaagcttagcagatgcataatgtggagcgaggctctattgccgattttgtgccgtcagaggccctagagccagccagccctcctagtcctttcctttcgcttgcttggtatcttcatgtaacatattgaacttttcctctttttttttcttcttcttttgggttatctatttttatgctagtttatccgtgaaagcaaaaggggtttaaatcgtggaggagtcgtgatgctctgctctctccatctacagcaacaaaaatattatgcattgcttgattttgcaa

SEQ ID NO: 16655 - DNA, 2142 bp, Zea Mays
gaagatccctgcccccctgaccacaaccatttcgagtatcgagagacgagaccgttacaccacccccgccttcggagcggacgaaccagcgaaccgcgcgcccccgcccatctctctctctctccctcctcctccccccaccgaatccgtccaccgaatcccctcacactcccatggatcgcttggcgcggccggcgagcccgggcggcggcgggctgggctacgcgtcgcggcggggcctctacgcgcaggcttcgtcgcatcacctggccggcggcagcgcgcagacgtcgcccggcggatccccgaaggagctgtccccagtccaccgccacgcgcgggcgggatccctcggcggcgctggggcggcctccaccgcaggccgccgcgcgggggtcggcgccggggccggcgctcgcgcgcagaacagcgccgctcgcgccgccgcgcagcgcctcgctcgggtcatgggcggcgcgggcggggacgccggaagcgggagcgacgacgacgacgactacgagctatctggtccacccatcgagctctccaacaccccgcgccgcacctccacccgatccccttccccctcggtaggccgtcaccttgcggatcagacgcaggtgggccggccgccgtcgctgaccaaccgttacacggctgggaagtcggtccccatgatcccgtcgatcaagcggccggccaccagtgggccgggggctggagctggttcagagtcgcccatgccgaaccgaagggagcagaggagatcagttgatcttggaagttcattgagagctcgtcgtacatcttcttcacttaatgatgagattaacacacttcaagtggaaaatgaaagcatcttgcagaagaaaggtttgatgatggagatgccaaatccatgcacatggagagagaggattctgatgctggcgatgcagcagaaacagagccaattttgattaacaggaaagatgcagcgctagaacaaagaaagattgctatgagaattgcttcgcgaaggtccagcagtgcaagctgtaatgagattgcaacccttaagtcagaagcaaaggttactactaatgtggttacatctctatctcggagagtgaaaagtgctagatcagaattgagatctcttcaggcaacagctaacagaatgatcctgtcacaggaagagctggaggaggttgtgctaaagagatgttggctggcccgctactggacattatgttctaaacttgggatacattctgatattgctgaagaaaaaaaagaatactggtcctcatttgcaccgcttgcgcttgaagcagtcctatcaattgggcaaaaggcaagagatggaactttatcagataatgctgacatggagagcagaagcaaaatgtctgatgtaaatgatatatctaccgatggcaatattgagaccatgctttcagttgagaaagggttgcgtgaattggcttcactcaaggtagaggatgcaatcatgcttactttggctgaaaatcggcatgtcaaacctctctcaggccaagcttctgagggtcggagcccttccgagtcattagagttaagtgcggaagagcgagaagatgtacgcttcaagcaggcatggttgacctatttctggaggcgggcgaaaaatcacaacatagaagaagatatagctgatgagaagctacagttttggatagaacaaatcaattacccagttactacgagcgaagtagtagaagtcgagagaggactccacgagctgaagaaactgggaatcgagtctcagctgtgggaggcgacgaggagagctctggatgatgatttgagcaaccacgggagtccaactggatctgaagcttagcagatgcataatgtggagcgaggctctattgccgattttgtgccgtcagaggccctagagccagccagccctcctagtcctttcctttcgcttgcttggtatcttcatgtaacatattgaacttttcctctttttttttcttcttcttttgggttatctatttttatgctagtttatccgtgaaagcaaaaggggtttaaatcgtggaggagtcgtgatgctctgctctctccatctacagcaacaaaaatattatgcattgcttgattttgcaa

SEQ ID NO: 16656 - DNA, 2382 bp, Zea Mays
gaagatccctgcccccctgaccacaaccatttcgagtatcgagagacgagaccgttacaccacccccgccttcggagcggacgaaccagcgaaccgcgcgcccccgcccatctctctctctctccctcctcctccccccaccgaatccgtccaccgaatcccctcacactcccatggatcgcttggcgcggccggcgagcccgggcggcggcgggctgggctacgcgtcgcggcggggcctctacgcgcaggcttcgtcgcatcacctggccggcggcagcgcgcagacgtcgcccggcggatccccgaaggagctgtccccagtccaccgccacgcgcgggcgggatccctcggcggcgctggggcggcctccaccgcaggccgccgcgcgggggtcggcgccggggccggcgctcgcgcgcagaacagcgccgctcgcgccgccgcgcagcgcctcgctcgggtcatgggcggcgcgggcggggacgccggaagcgggagcgacgacgacgacgactacgagctatctggtccacccatcgagctctccaacaccccgcgccgcacctccacccgatccccttccccctcggtaggccgtcaccttgcggatcagacgcaggtgggccggccgccgtcgctgaccaaccgttacacggctgggaagtcggtccccatgatcccgtcgatcaagcggccggccaccagtgggccgggggctggagctggttcagagtcgcccatgccgaaccgaagggagcagaggagatcagttgatcttggaagttcattgagagctcgtcgtacatcttcttcacttaatgatgagattaacacacttcaagtggaaaatgaaagcatgtatgacaaacttgcagaagaaaggtttgatgatggagatgccaaatccatgcacatggagagagaggattctgatgctggcgatgcagcagaaacagagccaattttgattaacaggaaagatgcagcgctagaacaaagaaagattgctatgagaattgcttcgcgaaggtccagcagtgcaagctgtaatgagattgcaacccttaagtcagaagcaaaggttactactaatgtggttacatctctatctcggagagtgaaaagtgctagatcagaattgagatctcttcaggcaacagctaacagaatgatcctgtcacaggaagagctggaggaggttgtgctaaagagatgttggctggcccgctactggacattatgttctaaacttggtatcaagatcacttttgcactgtttatactcctttactactagggagtattcccagtgcctaaataatgtctcaaatattccccttagggatacattctgatattgcaaccttaggatcatgggctaggatgcattctgatattgcaacctttctgtttcaatgttttaataatgtccagttacaaattacaataatgtctagtttggctaatggtgacttttccccttagggatacattctgatattgctgaagaaaaaaaagaatactggtcctcatttgcaccgcttgcgcttgaagcagtcctatcaattgggcaaaaggcaagagatggaactttatcagataatgctgacatggagagcagaagcaaaatgtctgatgtaaatgatatatctaccgatggcaatattgagaccatgctttcagttgagaaagggttgcgtgaattggcttcactcaaggtagaggatgcaatcatgcttactttggctgaaaatcggcatgtcaaacctctctcaggccaagcttctgagggtcggagcccttccgagtcattagttaagtgcggaagagcgagaagatgtacgcttcaagcaggcatggttgacctatttctggaggcgggcgaaaaatcacaacatagaagaagatatagctgatgagaagctacagttttggatagaacaaatcaattacccagttactacgagcgaagtagtagaagtcgagagaggactccacgagctgaagaaactgggaatcgagtctcagctgtgggaggcgacgaggagagctctggatgatgatttgagcaaccacgggagtccaactggatctgaagcttagcagatgcataatgtggagcgaggctctattgccgattttgtgccgtcagaggccctagagccagccagccctcctagtcctttcctttcgcttgcttggtatcttcatgtaacatattgaacttttcctctttttttttcttcttcttttgggttatctatttttatgctagtttatccgtgaaagcaaaaggggtttaaatcgtggaggagtcgtgatgctctgctctctccatctacagcaacaaaaatattatgcattgcttgattttgcaa

SEQ ID NO: 16657 - DNA, 2390 bp, Zea Mays
gaagatccctgcccccctgaccacaaccatttcgagtatcgagagacgagaccgttacaccacccccgccttcggagcggacgaaccagcgaaccgcgcgcccccgcccatctctctctctctccctcctcctccccccaccgaatccgtccaccgaatcccctcacactcccatggatcgcttggcgcggccggcgagcccgggcggcggcgggctgggctacgcgtcgcggcggggcctctacgcgcaggcttcgtcgcatcacctggccggcggcagcgcgcagacgtcgcccggcggatccccgaaggagctgtccccagtccaccgccacgcgcgggcgggatccctcggcggcgctggggcggcctccaccgcaggccgccgcgcgggggtcggcgccggggccggcgctcgcgcgcagaacagcgccgctcgcgccgccgcgcagcgcctcgctcgggtcatgggcggcgcgggcggggacgccggaagcgggagcgacgacgacgacgactacgagctatctggtccacccatcgagctctccaacaccccgcgccgcacctccacccgatccccttccccctcggtaggccgtcaccttgcggatcagacgcaggtgggccggccgccgtcgctgaccaaccgttacacggctgggaagtcggtccccatgatcccgtcgatcaagcggccggccaccagtgggccgggggctggagctggttcagagtcgcccatgccgaaccgaagggagcagaggagatcagttgatcttggaagttcattgagagctcgtcgtacatcttcttcacttaatgatgagattaacacacttcaagtggaaaatgaaagcatgtatgacaaacttcagcttgcagaagaaaggtttgatgatggagatgccaaatccatgcacatggagagagaggattctgatgctggcgatgcagcagaaacagagccaattttgattaacaggaaagatgcagcgctagaacaaagaaagattgctatgagaattgcttcgcgaaggtccagcagtgcaagctgtaatgagattgcaacccttaagtcagaagcaaaggttactactaatgtggttacatctctatctcggagagtgaaaagtgctagatcagaattgagatctcttcaggcaacagctaacagaatgatcctgtcacaggaagagctggaggaggttgtgctaaagagatgttggctggcccgctactggacattatgttctaaacttggtatcaagatcacttttgcactgtttatactcctttactactagggagtattcccagtgcctaaataatgtctcaaatattccccttagggatacattctgatattgcaaccttaggatcatgggctaggatgcattctgatattgcaacctttctgtttcaatgttttaataatgtccagttacaaattacaataatgtctagtttggctaatggtgacttttccccttagggatacattctgatattgctgaagaaaaaaaagaatactggtcctcatttgcaccgcttgcgcttgaagcagtcctatcaattgggcaaaaggcaagagatggaactttatcagataatgctgacatggagagcagaagcaaaatgtctgatgtaaatgatatatctaccgatggcaatattgagaccatgctttcagttgagaaagggttgcgtgaattggcttcactcaaggtagaggatgcaatcatgcttactttggctgaaaatcggcatgtcaaacctctctcaggccaagcttctgagggtcggagcccttccgagtcattagagttaagtgcggaagagcgagaagatgtacgcttcaagcaggcatggttgacctatttctggaggcgggcgaaaaatcacaacatagaagaagatatagctgatgagaagctacagttttggatagaacaaatcaattacccagttactacgagcgaagtagtagaagtcgagagaggactccacgagctgaagaaactgggaatcgagtctcagctgtgggaggcgacgaggagagctctggatgatgatttgagcaaccacgggagtccaactggatctgaagcttagcagatgcataatgtggagcgaggctctattgccgattttgtgccgtcagaggccctagagccagccagccctcctagtcctttcctttcgcttgcttggtatcttcatgtaacatattgaacttttcctctttttttttcttcttcttttgggttatctatttttatgctagtttatccgtgaaagcaaaaggggtttaaatcgtggaggagtcgtgatgctctgctctctccatctacagcaacaaaaatattatgcattgcttgattttgcaa

SEQ ID NO: 16658 - DNA, 2174 bp, Zea Mays
gaagatccctgcccccctgaccacaaccatttcgagtatcgagagacgagaccgttacaccacccccgccttcggagcggacgaaccagcgaaccgcgcgcccccgcccatctctctctctctccctcctcctccccccaccgaatccgtccaccgaatcccctcacactcccatggatcgcttggcgcggccggcgagcccgggcggcggcgggctgggctacgcgtcgcggcggggcctctacgcgcaggcttcgtcgcatcacctggccggcggcagcgcgcagacgtcgcccggcggatccccgaaggagctgtccccagtccaccgccacgcgcgggcgggatccctcggcggcgctggggcggcctccaccgcaggccgccgcgcgggggtcggcgccggggccggcgctcgcgcgcagaacagcgccgctcgcgccgccgcgcagcgcctcgctcgggtcatgggcggcgcgggcggggacgccggaagcgggagcgacgacgacgacgactacgagctatctggtccacccatcgagctctccaacaccccgcgccgcacctccacccgatccccttccccctcggtaggccgtcaccttgcggatcagacgcaggtgggccggccgccgtcgctgaccaaccgttacacggctgggaagtcggtccccatgatcccgtcgatcaagcggccggccaccagtgggccgggggctggagctggttcagagtcgcccatgccgaaccgaagggagcagaggagatcagttgatcttggaagttcattgagagctcgtcgtacatcttcttcacttaatgatgagattaacacacttcaagtggaaaatgaaagcatgtatgacaaacttcagcttgcagaagaaaggtttgatgatggagatgccaaatccatgcacatggagagagaggattctgatgctggcgatgcagcagaaacagagccaattttgattaacaggaaagatgcagcgctagaacaaagaaagattgctatgagaattgcttcgcgaaggtccagcagtgcaagctgtaatgagattgcaacccttaagtcagaagcaaaggttactactaatgtggttacatctctatctcggagagtgaaaagtgctagatcagaattgagatctcttcaggcaacagctaacagaatgatcctgtcacaggaagagctggaggaggttgtgctaaagagatgttggctggcccgctactggacattatgttctaaacttgggatacattctgatattgctgaagaaaaaaaagaatactggtcctcatttgcaccgcttgcgcttgaagcagtcctatcaattgggcaaaaggcaagagatggaactttatcagataatgctgacatggagagcagaagcaaaatgtctgatgtaaatgatatatctaccgatggcaatattgagaccatgctttcagttgagaaagggttgcgtgaattggcttcactcaaggtagaggatgcaatcatgcttactttggctgaaaatcggcatgtcaaacctctctcaggtggcttttccaaaatgccaagcttctgagggtcggagcccttccgagtcattagagttaagtgcggaagagcgagaagatgtacgcttcaagcaggcatggttgacctatttctggaggcgggcgaaaaatcacaacatagaagaagatatagctgatgagaagctacagttttggatagaacaaatcaattacccagttactacgagcgaagtagtagaagtcgagagaggactccacgagctgaagaaactgggaatcgagtctcagctgtgggaggcgacgaggagagctctggatgatgatttgagcaaccacgggagtccaactggatctgaagcttagcagatgcataatgtggagcgaggctctattgccgattttgtgccgtcagaggccctagagccagccagccctcctagtcctttcctttcgcttgcttggtatcttcatgtaacatattgaacttttcctctttttttttcttcttcttttgggttatctatttttatgctagtttatccgtgaaagcaaaaggggtttaaatcgtggaggagtcgtgatgctctgctctctccatctacagcaacaaaaatattatgcattgcttgattttgcaa

SEQ ID NO: 16659 - DNA, 2146 bp, Zea Mays
gaagatccctgcccccctgaccacaaccatttcgagtatcgagagacgagaccgttacaccacccccgccttcggagcggacgaaccagcgaaccgcgcgcccccgcccatctctctctctctccctcctcctccccccaccgaatccgtccaccgaatcccctcacactcccatggatcgcttggcgcggccggcgagcccgggcggcggcgggctgggctacgcgtcgcggcggggcctctacgcgcaggcttcgtcgcatcacctggccggcggcagcgcgcagacgtcgcccggcggatccccgaaggagctgtccccagtccaccgccacgcgcgggcgggatccctcggcggcgctggggcggcctccaccgcaggccgccgcgcgggggtcggcgccggggccggcgctcgcgcgcagaacagcgccgctcgcgccgccgcgcagcgcctcgctcgggtcatgggcggcgcgggcggggacgccggaagcgggagcgacgacgacgacgactacgagctatctggtccacccatcgagctctccaacaccccgcgccgcacctccacccgatccccttccccctcggccgtcaccttgcggatcagacgcaggtgggccggccgccgtcgctgaccaaccgttacacggctgggaagtcggtccccatgatcccgtcgatcaagcggccggccaccagtgggccgggggctggagctggttcagagtcgcccatgccgaaccgaagggagcagaggagatcagttgatcttggaagttcattgagagctcgtcgtacatcttcttcacttaatgatgagattaacacacttcaagtggaaaatgaaagcatgtatgacaaacttgcagaagaaaggtttgatgatggagatgccaaatccatgcacatggagagagaggattctgatgctggcgatgcagcagaaacagagccaattttgattaacaggaaagatgcagcgctagaacaaagaaagattgctatgagaattgcttcgcgaaggtccagcagtgcaagctgtaatgagattgcaacccttaagtcagaagcaaaggttactactaatgtggttacatctctatctcggagagtgaaaagtgctagatcagaattgagatctcttcaggcaacagctaacagaatgatcctgtcacaggaagagctggaggaggttgtgctaaagagatgttggctggcccgctactggacattatgttctaaacttgggatacattctgatattgctgaagaaaaaaaagaatactggtcctcatttgcaccgcttgcgcttgaagcagtcctatcaattgggcaaaaggcaagagatggaactttatcagataatgctgacatggagagcagaagcaaaatgtctgatgtaaatgatatatctaccgatggcaatattgagaccatgctttcagttgagaaagggttgcgtgaattggcttcactcaaggtagaggatgcaatcatgcttactttggctgaaaatcggcatgtcaaacctctctcaggccaagcttctgagggtcggagcccttccgagtcattagttaagtgcggaagagcgagaagatgtacgcttcaagcaggcatggttgacctatttctggaggcgggcgaaaaatcacaacatagaagaagatatagctgatgagaagctacagttttggatagaacaaatcaattacccagttactacgagcgaagtagtagaagtcgagagaggactccacgagctgaagaaactgggaatcgagtctcagctgtgggaggcgacgaggagagctctggatgatgatttgagcaaccacgggagtccaactggatctgaagcttagcagatgcataatgtggagcgaggctctattgccgattttgtgccgtcagaggccctagagccagccagccctcctagtcctttcctttcgcttgcttggtatcttcatgtaacatattgaacttttcctctttttttttcttcttcttttgggttatctatttttatgctagtttatccgtgaaagcaaaaggggtttaaatcgtggaggagtcgtgatgctctgctctctccatctacagcaacaaaaatattatgcattgcttgattttgcaa

SEQ ID NO: 16660 - DNA, 2152 bp, Zea Mays
gaagatccctgcccccctgaccacaaccatttcgagtatcgagagacgagaccgttacaccacccccgccttcggagcggacgaaccagcgaaccgcgcgcccccgcccatctctctctctctccctcctcctccccccaccgaatccgtccaccgaatcccctcacactcccatggatcgcttggcgcggccggcgagcccgggcggcggcgggctgggctacgcgtcgcggcggggcctctacgcgcaggcttcgtcgcatcacctggccggcggcagcgcgcagacgtcgcccggcggatccccgaaggagctgtccccagtccaccgccacgcgcgggcgggatccctcggcggcgctggggcggcctccaccgcaggccgccgcgcgggggtcggcgccggggccggcgctcgcgcgcagaacagcgccgctcgcgccgccgcgcagcgcctcgctcgggtcatgggcggcgcgggcggggacgccggaagcgggagcgacgacgacgacgactacgagctatctggtccacccatcgagctctccaacaccccgcgccgcacctccacccgatccccttccccctcggtaggccgtcaccttgcggatcagacgcaggtgggccggccgccgtcgctgaccaaccgttacacggctgggaagtcggtccccatgatcccgtcgatcaagcggccggccaccagtgggccgggggctggagctggttcagagtcgcccatgccgaaccgaagggagcagaggagatcagttgatcttggaagttcattgagagctcgtcgtacatcttcttcacttaatgatgagattaacacacttcaagtggaaaatgaaagcatgtatgacaaacttgcagaagaaaggtttgatgatggagatgccaaatccatgcacatggagagagaggattctgatgctggcgatgcagcagaaacagagccaattttgattaacaggaaagatgcagcgctagaacaaagaaagattgctatgagaattgcttcgcgaaggtccagcagtgcaagctgtaatgagattgcaacccttaagtcagaagcaaaggttactactaatgtggttacatctctatctcggagagtgaaaagtgctagatcagaattgagatctcttcaggcaacagctaacagaatgatcctgtcacaggaagagctggaggaggttgtgctaaagagatgttggctggcccgctactggacattatgttctaaacttgggatacattctgatattgctgaagaaaaaaaagaatactggtcctcatttgcaccgcttgcgcttgaagcagtcctatcaattgggcaaaaggcaagagatggaactttatcagataatgctgacatggagagcagaagcaaaatgtctgatgtaaatgatatatctaccgatggcaatattgagaccatgctttcagttgagaaagggttgcgtgaattggcttcactcaaggtagaggatgcaatcatgcttactttggctgaaaatcggcatgtcaaacctctctcaggccaagcttctgagggtcggagcccttccgagtcattagagttaagtgcggaagagcgagaagatgtacgcttcaagcaggcatggttgacctatttctggaggcgggcgaaaaatcacaacatagaagaagatatagctgatgagaagctacagttttggatagaacaaatcaattacccagttactacgagcgaagtagtagaagtcgagagaggactccacgagctgaagaaactgggaatcgagtctcagctgtgggaggcgacgaggagagctctggatgatgatttgagcaaccacgggagtccaactggatctgaagcttagcagatgcataatgtggagcgaggctctattgccgattttgtgccgtcagaggccctagagccagccagccctcctagtcctttcctttcgcttgcttggtatcttcatgtaacatattgaacttttcctctttttttttcttcttcttttgggttatctatttttatgctagtttatccgtgaaagcaaaaggggtttaaatcgtggaggagtcgtgatgctctgctctctccatctacagcaacaaaaatattatgcattgcttgattttgcaa

SEQ ID NO: 16661 - DNA, 1792 bp, Zea Mays
gaagatccctgcccccctgaccacaaccatttcgagtatcgagagacgagaccgttacaccacccccgccttcggagcggacgaaccagcgaaccgcgcgcccccgcccatctctctctctctccctcctcctccccccaccgaatccgtccaccgaatcccctcacactcccatggatcgcttggcgcggccggcgagcccgggcggcggcgggctgggctacgcgtcgcggcggggcctctacgcgcaggcttcgtcgcatcacctggccggcggcagcgcgcagacgtcgcccggcggatccccgaaggagctgtccccagtccaccgccacgcgcgggcgggatccctcggcggcgctggggcggcctccaccgcaggccgccgcgcgggggtcggcgccggggccggcgctcgcgcgcagaacagcgccgctcgcgccgccgcgcagcgcctcgctcgggtcatgggcggcgcgggcggggacgccggaagcgggagcgacgacgacgacgactacgagctatctggtccacccatcgagctctccaacaccccgcgccgcacctccacccgatccccttccccctcggtaggccgtcaccttgcggatcagacgcaggtgggccggccgccgtcgctgaccaaccgttacacggctgggaagtcggtccccatgatcccgtcgatcaagcggccggccaccagtgggccgggggctggagctggttcagagtcgcccatgccgaaccgaagggagcagaggagatcagttgatcttggaagttcattgagagctcgtcgtacatcttcttcacttaatgatgagattaacacacttcaagtggaaaatgaaagcatcttcagcttgcagaagaaaggtttgatgatggagatgccaaatccatgcacatggagagagaggattctgatgctggcgatgcagcagaaacagagccaattttgattaacaggaaagatgcagcgctagaacaaagaaagattgctatgagaattgcttcgcgaaggtccagcagtgcaagctgtaatgagattgcaacccttaagtcagaagcaaaggttactactaatgtggttacatctctatctcggagagtgaaaagtgctagatcagaattgagatctcttcaggcaacagctaacagaatgatcctgtcacaggaagagctggaggaggttgtgctaaagagatgttggctggcccgctactggacattatgttctaaacttgggatacattctgatattgctgaagaaaaaaaagaatactggtcctcatttgcaccgcttgcgcttgaagcagtcctatcaattgggcaaaaggcaagagatggaactttatcagataatgctgacatggagagcagaagcaaaatgtctgatgtaaatgatatatctaccgatggcaatattgagaccatgctttcagttgagaaagggttgcgtgaattggcttcactcaaggtagaggatgcaatcatgcttactttggctgaaaatcggcatgtcaaacctctctcaggccaagcttctgagggtcggagcccttccgagtcattagttaagtgcggaagagcgagaagatgtacgcttcaagcaggtctccggtggacatgcccaaaccatctcaattggtgttgaattaccttttcttcaattggcgctactcctaaccgatcgcgtatgacatcgtttctcactcggtccaatcttgtgtgcccacatatccaatgtaacatacacatctctgcgacacttagttgttggata

SEQ ID NO: 16662 - DNA, 2056 bp, Zea Mays
cttcccgctaatccgtggcttaattgcgggtgctttactggttgctttgcgctgcggtggatctcctggcgtggcgacatgggcctgggtttgggagctcttctcaaatccggcgggctctcggtctcggatcacgacgccatcgtctcgattaacatcttcatcgcgctgctctgcagctgcattgtcatcggccacttgctggaagggaaccgatgggtgaacgagtccatcaccgcgcttgtcatgggcctcatcaccggaggcgtcatcctgctggttactaatgggacaaactcacgcattcttgtgttcagcgaggacctgtttttcatatatttacttccgccgataatcttcaatgccgggtttcaagtaaagaaaaagcaattcttccgcaactttataacaattattttgtttggtgctattgggactctgatttcctttgtaataatctctcttggtgctatggggttgttcaagaaacttgatgttggtccactcgagcttggggactatcttgcaattggtgctattttctcggcaacagattctgtttgcaccttacaggtgcttaaccaggatgaaacacccctactctatagtctagtttttggtgaaggtgttgttaatgatgccacatctgttgtgctcttcaatgcaattgaaaaccttgatattgataattttgatgctattgttctgttgaatttcgtcggaaaatttctctacttgttcttcaccagcaccatacttggagtagctaccgggttgcttagtgcatacattatcaagaagctctgctttgccagacattcaactgatagagaagtttctatcatgatactcatggcatacctttcatacatgatatcaatgctgttggacctgagtggaattcttactgtcttcttctgtggaatagtaatgtcacattacacttggcataatgtgacagaaagttctagggttaccaccaagcatacttttgcaactttatcattcattgcagaaattttccttttcctctatgttgggatggatgcattggacattgagaagtggaaattagctagtagcagtcctaagaaaccaattgctttaagtgcaattattttgggcttggttatggttggaagagcggcatttgtattccctttgtcgttcttatccaacctaagcaaaaaggaggcccgtccaaagatctccttcaagcaacaagtaatcatatggtgggctggtctcatgagaggagcagtgtcaattgcgcttgcctataacaagtttacagcatctggtcacactgaagtgcgagtcaatgctatcatgatcaccagcacagttattgttgttctattcagcacaatggttttcggcctgctgacgaagccgcttctcagtctcctcatcccaccaaggactggactgaacacgtcgtctctgctctcaagccagtctatgctggacccactccttactagcatgatggggtctgactttgatgtagggcagatcaactcccctcaatacaacctccagttcattctcaccgcgccagctcgctccgtccatcgcctttggcgcaagtttgacgatcggttcatgcgcccggtgttcggggggcgaggtttcgtcccctttgtgcctggttcgccggtggagaggagtgtccctgaatctcacctgggcactgtgacggaggctgagcgcagttgaaatgaggcaagagggatgccgacaattttctgtagatcttcagacagataccactcatactcctattttattttcagaatccactggtgcgaattgttctttgtagtaccttgtgcatatagttttatatagagctgctacacaagctgctgtaaatttctgggaggcactcccaactgtagattactgcaattcatctgtaaatttcaatcttgttcaagaagaatgatcatatattggcatgttttttcttagcagttgtataattgtgagcctgacacaacaaatcccttttaccccaagaatgttaaatgtagaaaagacaagattgtcaaaa

SEQ ID NO: 16663 - DNA, 2246 bp, Zea Mays
gctttcagcctcatggccagcgcgggactccaccactcctcctccccctctccgcggatcacccaccgaacccacgcgaaaccggcgtccagatcttctcccccgcggttcagatccccggacgcagccggcgccttctgacttgggttggcacagccgtacaggttgctttgcgctgcggtggatctcctggcgtggcgacatgggcctgggtttgggagctcttctcaaatccggcgggctctcggtctcggatcacgacgccatcgtctcgattaacatcttcatcgcgctgctctgcagctgcattgtcatcggccacttgctggaagggaaccgatgggtgaacgagtccatcaccgcgcttgtcatgggcctcatcaccggaggcgtcatcctgctggttactaatgggacaaactcacgcattcttgtgttcagcgaggacctgtttttcatatatttacttccgccgataatcttcaatgccgggtttcaagtaaagaaaaagcaattcttccgcaactttataacaattattttgtttggtgctattgggactctgatttcctttgtaataatctctcttggtgctatggggttgttcaagaaacttgatgttggtccactcgagcttggggactatcttgcaattggtgctattttctcggcaacagattctgtttgcaccttacaggtgcttaaccaggatgaaacacccctactctatagtctagtttttggtgaaggtgttgttaatgatgccacatctgttgtgctcttcaatgcaattgaaaaccttgatattgataattttgatgctattgttctgttgaatttcgtcggaaaatttctctacttgttcttcaccagcaccatacttggagtagctaccgggttgcttagtgcatacattatcaagaagctctgctttgccagacattcaactgatagagaagtttctatcatgatactcatggcatacctttcatacatgatatcaatgctgttggacctgagtggaattcttactgtcttcttctgtggaatagtaatgtcacattacacttggcataatgtgacagaaagttctagggttaccaccaagcatacttttgcaactttatcattcattgcagaaattttccttttcctctatgttgggatggatgcattggacattgagaagtggaaattagctagtagcaggtacctttcgcctgttggaatgattgattttgaaggactagatataccaacatagataacatactatcctaagaaaccaattgctttaagtgcaattattttgggcttggttatggttggaagagcggcatttgtattccctttgtcgttcttatccaacctaagcaaaaaggaggcccgtccaaagatctccttcaagcaacaagtaatcatatggtgggctggtctcatgagaggagcagtgtcaattgcgcttgcctataacaagtttacagcatctggtcacactgaagtgcgagtcaatgctatcatgatcaccagcacagttattgttgttctattcagcacaatggttttcggcctgctgacgaagccgcttctcagtctcctcatcccaccaaggactggactgaacacgtcgtctctgctctcaagccagtctatgctggacccactccttactagcatgatggggtctgactttgatgtagggcagatcaactcccctcaatacaacctccagttcattctcaccgcgccagctcgctccgtccatcgcctttggcgcaagtttgacgatcggttcatgcgcccggtgttcggggggcgaggtttcgtcccctttgtgcctggttcgccggtggagaggagtgtccctgaatctcacctgggcactgtgacggaggctgagcgcagttgaaatgaggcaagagggatgccgacaattttctgtagatcttcagacagataccactcatactcctattttattttcagaatccactggtgcgaattgttctttgtagtaccttgtgcatatagttttatatagagctgctacacaagctgctgtaaatttctgggaggcactcccaactgtagattactgcaattcatctgtaaatttcaatcttgttcaagaagaatgatcatatattggcatgttttttcttagcagttgtataattgtgagcctgacacaacaaatcccttttaccccaagaatgttaaatgtagaaaagacaagattgtcaaaa

SEQ ID NO: 16664 - DNA, 2082 bp, Zea Mays
gctttcagcctcatggccagcgcgggactccaccactcctcctccccctctccgcggatcacccaccgaacccacgcgaaaccggcgtccagatcttctcccccgcggttcagatccccggacgcagccggcgccttctgacttgggttggcacagccgtacaggttgctttgcgctgcggtggatctcctggcgtggcgacatgggcctgggtttgggagctcttctcaaatccggcgggctctcggtctcggatcacgacgccatcgtctcgattaacatcttcatcgcgctgctctgcagctgcattgtcatcggccacttgctggaagggaaccgatgggtgaacgagtccatcaccgcgcttgtcatgggcctcatcaccggaggcgtcatcctgctggttactaatgggacaaactcacgcattcttgtgttcagcgaggacctgtttttcatatatttacttccgccgataatcttcaatgccgggtgctatggggttgttcaagaaacttgatgttggtccactcgagcttggggactatcttgcaattggtgctattttctcggcaacagattctgtttgcaccttacaggtgcttaaccaggatgaaacacccctactctatagtctagtttttggtgaaggtgttgttaatgatgccacatctgttgtgctcttcaatgcaattgaaaaccttgatattgataattttgatgctattgttctgttgaatttcgtcggaaaatttctctacttgttcttcaccagcaccatacttggagtagctaccgggttgcttagtgcatacattatcaagaagctctgctttgccagacattcaactgatagagaagtttctatcatgatactcatggcatacctttcatacatgatatcaatgctgttggacctgagtggaattcttactgtcttcttctgtggaatagtaatgtcacattacacttggcataatgtgacagaaagttctagggttaccaccaagcatacttttgcaactttatcattcattgcagaaattttccttttcctctatgttgggatggatgcattggacattgagaagtggaaattagctagtagcagtcctaagaaaccaattgctttaagtgcaattattttgggcttggttatggttggaagagcggcatttgtattccctttgtcgttcttatccaacctaagcaaaaaggaggcccgtccaaagatctccttcaagcaacaagtaatcatatggtgggctggtctcatgagaggagcagtgtcaattgcgcttgcctataacaagtttacagcatctggtcacactgaagtgcgagtcaatgctatcatgatcaccagcacagttattgttgttctattcagcacaatggttttcggcctgctgacgaagccgcttctcagtctcctcatcccaccaaggactggactgaacacgtcgtctctgctctcaagccagtctatgctggacccactccttactagcatgatggggtctgactttgatgtagggcagatcaactcccctcaatacaacctccagttcattctcaccgcgccagctcgctccgtccatcgcctttggcgcaagtttgacgatcggttcatgcgcccggtgttcggggggcgaggtttcgtcccctttgtgcctggttcgccggtggagaggagtgtccctgaatctcacctgggcactgtgacggaggctgagcgcagttgaaatgaggcaagagggatgccgacaattttctgtagatcttcagacagataccactcatactcctattttattttcagaatccactggtgcgaattgttctttgtagtaccttgtgcatatagttttatatagagctgctacacaagctgctgtaaatttctgggaggcactcccaactgtagattactgcaattcatctgtaaatttcaatcttgttcaagaagaatgatcatatattggcatgttttttcttagcagttgtataattgtgagcctgacacaacaaatcccttttaccccaagaatgttaaatgtagaaaagacaagattgtcaaaa

SEQ ID NO: 16665 - DNA, 2877 bp, Zea Mays
cgcacgtgaggcgccctcctccccaaccgaaaagtctacagaggataaggagctcgccgctcttccagtcccacagctaggggagggaaacaaacacccaaatcaaacccgcgcgtcgccagccgcagcaccaatggcgtgcgtcgccgcgctcttcgcctccccggcgctcctccccttcccctccaccacctcgtccatggcctcctgctcgtgccgcctccgccccgccgtcgtcgcccgcgcgccgcgccagcagccgcggggccggcgcgcgctccggcgcttcgatgaggtggaaggggtgtcgaagaaacggcgcggcatcggaggcggtggcggcgtcggcgctggcgggtcgcagccgtcgtcctcgcgcagggatagggggctttccgtcgatttcaaggagccgcaggttgctgagtttgatgatcttgaagaggacaaattccttaatgctgtcgtcaaggtctattgcactcatatcgcacccgattatggtcttccttggcagaagcaaaggcaacattcaagtagtgggagtgcttttatgattggggatggtaaactcttgacaaatgcgcattgcgttgagcacgacacccaggtcaaagtaaagagaaggggagatgacaaaaaatatattgccaaggttttagctaggggtgttgaatgcgatcttgcgttgctatctgttgagaatgaagagttctggagaggaacagaggcacttcattttggtcgtttgccatgccttcaggattcagtaactgttgtgggatatcctcttggtggagacactatatctgtaacaaaaggcgttgtgtcgcgcattgaggtcactccatatgcacatggaacatcagatcttcttggcattcaaattgacgcagccataaatcctggaaacagtgggggaccagcctttaatgatcaaggggagtgcattggtgtggcatttcaggtcagatgaagctgaaaatattggatatgttattccaactacagttgtatcccatttcttaaatgactatcagaaaaatggaaagtacacaggatttccatgtttgggtgtcttacttcagaaattggaaaatccggcattgcgtgaaagcttaaaagtaccttcaagcgagggtgttcttgttcgtcgggtggaacctactgctccagcaagcagtgttttgcgaaagggagatgtaattgttagctttgatggtatcgcagtaggatgtgaagcaacagtaccatttcggtccacagaacggattgctttccgctatctcacaagccaaaagtatgcaggcgatattgcccagctaggaatcattcgtgatggcaattccatgaaagtccagactattttgcagccaagaaaacatttagtgccgtttcatgttgaggggggacaaccttcttatctgattgttgctggccttgtcttcacacctttaacagaaccatttatagaggaggaatgcgaagatacactagggctgaaattgttagcaaaagcacgttactctctagcaacctttgagggggaggaaattgttattgtgtcgcaggttttggcgcacgaggtcaacattgggtatgagcacatgggcaatcaacaagtcatgaaactaaacggaaccacaataaagaatatccatcaccttgctcatcttgtggacacctgtaaagacaagttcctgacgttcgaattcgaagacgacttccttgttgttttgcatcgagaagaagcggatgctgcatcatcggacattctcaaggaacatgccataccgtccatacggtcatctgatctatcagaaccatatgcagaagcaaacaataacgagatacagaaaacaagcgaggattttggtgaaagtcctgtcacaaactttgagatggggatcgattgtctcttgtgggcatgatcgttctcttttaatggatgagctactgaggatgaagtttcagctaaatctgcagtagtgaaatgcaagcatctgccggcgaacaacggtggtcgtaggaatactctcccaatgtgtagtgcatgcaatgcaagtaccttgcggcaaagccgagtcatgttgtatgttagcatagacagaattgagagatatgctgtacgctaggagccataggatgatttgttcattttcaatctttaggcagtcaggaatttaagggattgtacaatttgtccaccagcgatcctgtaaagctcggacatgcaaatatgcaatagaccgtccagaaattttgttggtttatgtttgtgctgtatttctctcgtactggtattccagaacaaagaatctgtaggatgccagattcttggatacaaaatgaggtaattgaaatcaatcaacatggatcccacaaagtgcggtcgtgatgttgtgaggtccaaaaggctataaatcatgttcagcgtttccaaagctagaaagtgtgcatagcggatttgcattagtaaagccttctccgccatcaccacgctgagcgacgacctcctccaggacatcttcctcctgccgagatcgtgggctagacgtcatcggtgtggctgctggcctcgtgttcattcggcagtggaatcatctatctgttctccattgatcttgaaactatgaatcgcccggaggcgctgatctaccctttcacaattgcgtggccacccaccctctttcctaaatcctgctggacaaggagcttgatatgtaagtggccagtggaatatgacggtaaactccagcataagatggcagaggcgatgatagaaaaaaaaagagagaggaagaatctcagttattctgatgaagtattggggatgatgatgatcagttgctatagtttgtggctgttactagattg

SEQ ID NO: 16666 - DNA, 2871 bp, Zea Mays
cgcacgtgaggcgccctcctccccaaccgaaaagtctacagaggataaggagctcgccgctcttccagtcccacagctaggggagggaaacaaacacccaaatcaaacccgcgcgtcgccagccgcagcaccaatggcgtgcgtcgccgcgctcttcgcctccccggcgctcctccccttcccctccaccacctcgtccatggcctcctgctcgtgccgcctccgccccgccgtcgtcgcccgcgcgccgcgccagcagccgcggggccggcgcgcgctccggcgcttcgatgaggtggaaggggtgtcgaagaaacggcgcggcatcggaggcggtggcggcgtcggcgctggcgggtcgcagccgtcgtcctcgcgcagggatagggggctttccgtcgatttcaaggagccgcaggttgctgagtttgatgatcttgaagaggacaaattccttaatgctgtcgtcaaggtctattgcactcatatcgcacccgattatggtcttccttggcagaagcaaaggcaacattcaagtagtgggagtgcttttatgattggggatggtaaactcttgacaaatgcgcattgcgttgagcacgacacccaggtcaaagtaaagagaaggggagatgacaaaaaatatattgccaaggttttagctaggggtgttgaatgcgatcttgcgttgctatctgttgagaatgaagagttctggagaggaacagaggcacttcattttggtcgtttgccatgccttcaggattcagtaactgttgtgggatatcctcttggtggagacactatatctgtaacaaaaggcgttgtgtcgcgcattgaggtcactccatatgcacatggaacatcagatcttcttggcattcaaattgacgcagccataaatcctggaaacagtgggggaccagcctttaatgatcaaggggagtgcattggtgtggcatttcaggtgtacaggtcagatgaagctgaaaatattggatatgttattccaactacagttgtatcccatttcttaaatgactatcagaaaaatggaaagtacacaggatttccatgtttgggtgtcttacttcagaaattggaaaatccggcattgcgtgaaagcttaaaagtaccttcaagcgagggtgttcttgttcgtcgggtggaacctactgctccagcaagcagtgttttgcgaaagggagatgtaattgttagctttgatggtatcgcagtaggatgtgaagcaacagtaccatttcggtccacagaacggattgctttccgctatctcacaagccaaaagtatgcaggcgatattgcccagctaggaatcattcgtgatggcaattccatgaaagtccagactattttgcagccaagaaaacatttagtgccgtttcatgttgaggggggacaaccttcttatctgattgttgctggccttgtcttcacacctttaacagaaccatttatagaggaggaatgcgaagatacactagggctgaaattgttagcaaaagcacgttactctctagcaacctttgagggggaggaaattgttattgtgtcgcaggttttggcgcacgaggtcaacattgggtatgagcacatgggcaatcaacaagtcatgaaactaaacggaaccacaataaagaatatccatcaccttgctcatcttgtggacacctgtaaagacaagttcctgacgttcgaattcgaagacgacttccttgttgttttgcatcgagaagaagcggatgctgcatcatcggacattctcaaggaacatgccataccgtccatacggtcatctgatctatcagaaccatatgcagaagcaaacaataacgagatacagaaaacaagcgaggattttggtgaaagtcctgtcacaaactttgagatggggatcgattgtctcttgtgggcatgatcgttctcttttaatggatgagctactgaggatgaagtttcagctaaatctgcagtagtgaaatgcaagcatctgccggcgaacaacggtggtcgtaggaatactctcccaatgtgtagtgcatgcaatgcaagtaccttgcggcaaagccgagtcatgttgtatgttagcatagacagaattgagagatatgctgtacgctaggagccataggatgatttgttcattttcaatctttaggcagtcaggaatttaagggattgtacaatttgtccaccagcgatcctgtaaagctcggacatgcaaatatgcaatagaccgtccagaaattttgttggtttatgtttgtgctgtatttctctcgtactggtattccagaacaaagaatctgtaggatgccagattcttggatacaaaatgaggtaattgaaatcaatcaacatggatcccacaaagtgcggtcgtgatgttgtgaggtccaaaaggctataaatcatgttcagcgtttccaaagctagaaagtgtgcatagcggatttgcattagtaaagccttctccgccatcaccacgctgagcgacgacctcctccaggacatcttcctcctgccgagatcgtgggctagacgtcatcggtgtggctgctggcctcgtgttcattcggcagtggaatcatctatctgttctccattgatcttgaaactatgaatcgcccggaggcgctgatctaccctttcacaattgcgtggccacccaccctctttcctaaatcctgctggacaaggagcttgatatgaatatgacggtaaactccagcataagatggcagaggcgatgatagaaaaaaaaagagagaggaagaatctcagttattctgatgaagtattggggatgatgatgatcagttgctatagtttgtggctgttactagattg

SEQ ID NO: 16667 - DNA, 2877 bp, Zea Mays
cgcacgtgaggcgccctcctccccaaccgaaaagtctacagaggataaggagctcgccgctcttccagtcccacagctaggggagggaaacaaacacccaaatcaaacccgcgcgtcgccagccgcagcaccaatggcgtgcgtcgccgcgctcttcgcctccccggcgctcctccccttcccctccaccacctcgtccatggcctcctgctcgtgccgcctccgccccgccgtcgtcgcccgcgcgccgcgccagcagccgcggggccggcgcgcgctccggcgcttcgatgaggtggaaggggtgtcgaagaaacggcgcggcatcggaggcggtggcggcgtcggcgctggcgggtcgcagccgtcgtcctcgcgcagggatagggggctttccgtcgatttcaaggagccgcaggttgctgagtttgatgatcttgaagaggacaaattccttaatgctgtcgtcaaggtctattgcactcatatcgcacccgattatggtcttccttggcagaagcaaaggcaacattcaagtagtgggagtgcttttatgattggggatggtaaactcttgacaaatgcgcattgcgttgagcacgacacccaggtcaaagtaaagagaaggggagatgacaaaaaatatattgccaaggttttagctaggggtgttgaatgcgatcttgcgttgctatctgttgagaatgaagagttctggagaggaacagaggcacttcattttggtcgtttgccatgccttcaggattcagtaactgttgtgggatatcctcttggtggagacactatatctgtaacaaaaggcgttgtgtcgcgcattgaggtcactccatatgcacatggaacatcagatcttcttggcattcaaattgacgcagccataaatcctggaaacagtgggggaccagcctttaatgatcaaggggagtgcattggtgtggcatttcaggtgtacaggtcagatgaagctgaaaatattggatatgttattccaactacagttgtatcccatttcttaaatgactatcagaaaaatggaaagtacacaggatttccatgtttgggtgtcttacttcagaaattggaaaatccggcattgcgtgaaagcttaaaagtaccttcaagcgagggtgttcttgttcgtcgggtggaacctactgctccagcaagcagtgttttgcgaaagggagatgtaattgttagctttgatggtatcgcagtaggatgtgaagcaacagtaccatttcggtccacagaacggattgctttccgctatctcacaagccaaaagcgatattgcccagctaggaatcattcgtgatggcaattccatgaaagtccagactattttgcagccaagaaaacatttagtgccgtttcatgttgaggggggacaaccttcttatctgattgttgctggccttgtcttcacacctttaacagaaccatttatagaggaggaatgcgaagatacactagggctgaaattgttagcaaaagcacgttactctctagcaacctttgagggggaggaaattgttattgtgtcgcaggttttggcgcacgaggtcaacattgggtatgagcacatgggcaatcaacaagtcatgaaactaaacggaaccacaataaagaatatccatcaccttgctcatcttgtggacacctgtaaagacaagttcctgacgttcgaattcgaagacgacttccttgttgttttgcatcgagaagaagcggatgctgcatcatcggacattctcaaggaacatgccataccgtccatacggtcatctgatctatcagaaccatatgcagaagcaaacaataacgagatacagaaaacaagcgaggattttggtgaaagtcctgtcacaaactttgagatggggatcgattgtctcttgtgggcatgatcgttctcttttaatggatgagctactgaggatgaagtttcagctaaatctgcagtagtgaaatgcaagcatctgccggcgaacaacggtggtcgtaggaatactctcccaatgtgtagtgcatgcaatgcaagtaccttgcggcaaagccgagtcatgttgtatgttagcatagacagaattgagagatatgctgtacgctaggagccataggatgatttgttcattttcaatctttaggcagtcaggaatttaagggattgtacaatttgtccaccagcgatcctgtaaagctcggacatgcaaatatgcaatagaccgtccagaaattttgttggtttatgtttgtgctgtatttctctcgtactggtattccagaacaaagaatctgtaggatgccagattcttggatacaaaatgaggtaattgaaatcaatcaacatggatcccacaaagtgcggtcgtgatgttgtgaggtccaaaaggctataaatcatgttcagcgtttccaaagctagaaagtgtgcatagcggatttgcattagtaaagccttctccgccatcaccacgctgagcgacgacctcctccaggacatcttcctcctgccgagatcgtgggctagacgtcatcggtgtggctgctggcctcgtgttcattcggcagtggaatcatctatctgttctccattgatcttgaaactatgaatcgcccggaggcgctgatctaccctttcacaattgcgtggccacccaccctctttcctaaatcctgctggacaaggagcttgatatgtaagtggccagtggaatatgacggtaaactccagcataagatggcagaggcgatgatagaaaaaaaaagagagaggaagaatctcagttattctgatgaagtattggggatgatgatgatcagttgctatagtttgtggctgttactagattg

SEQ ID NO: 16668 - DNA, 2629 bp, Zea Mays
cggggactttcccctaatgctctgaagtgatgatacctcgtttacaaaatgttaggattttacttaagcaacagtctaattcaatcagttactctgaatgctcagattaatatatctattctaacatactgtatatacatgcctataaaccaaaaaaataaaagctactaagcaccacaacagagtaatgtgggcgcagtgtcttccttcaccatgtacatgtggactcaaccagcttacctcaatgcctcctgcggtcctgctcatgatgaacaggcaaaggatgcatccagaacagaagatattgtgtccagggaagaaataccccaatgtcatcaatcatcacatctcaacgagtcaccaacatatataatcagtcgcatgggcgttcattcagaatcagtttcaggcagtttattgcagttttgtttacaaaacatggatttcattgctctgtactgactacatgcataagaaccaacttgtctaatctaggtgtgcatcctccttgacaagcaaaattaacaattcgaccaaacatgcagcttatatatgtgaacccataatttaatatgaacagaaaactgatgtgcaacaacataaactaaaatacaaaggaaccacgaattccgaacatatgataattgttgtcctaatgcagaagaactaaatatactagagaaaaaaaccttcctagtcatgtaagtgtatgggcatatagaaaataaacatctcaagactccaactagtcattagctttagtcataacttcaaacacttcatgccaacaagatcatggaattttttttttttttttgcctaagacaactagaatgagaaaagaactaactcatcatacatattaggatggcatcataaagaaaaaatgacacatatatgatactatatcacaaaggccttcagtttctagaccaagtgcagatcgatctgtgggtatgcatgtctaatattttactaggttggatatgcatgggcgttcattcagaatcagtttcacacagtttatcgcacttctgtttacaaaacatggatttcattgctctgtactggctacatgcgtaaggatcaacttgtctaatctaggtgtatcctccttgacaagcaaacttaacaatttgataaaaaaaatgcagcttttatatgtgaacccataacttaatatggacaggaaactgatgtgcaacaacaaaaactaaaataggaaggaaacacaagttccaaatgtataataattgtcaccatagtgcaaaagaaccaaatatactgcagagaaaacttcctagtcatgtaagtgtatggacatatagaaataaaacatctcaagactccaataacaggctcatgctaactagtcatggctttaaaccttcatgatacaaactagtcacaactttaaacatttcatgccaacaagatcatggatggtgttttttttcctagagaaaagctagaatgagaaaagacctaactcagcatacatatcaggatagtatcgtatagacacgtatatgatactatatcacacagccgttcaatttctagaacaaatgcagattgatctgtgaatatgcatgtctcatattttactaggttagatggactgaatcccgtgaaacaaacaatttattcaacaagtttctgcatgaatatcatcccaaattcaataatcactctcgttgataaaaaaaatgcaaccaacagttaaacagaagtgaaatagaaactatttgaatcagatccactccgttattcacatcaaaataattgttgcttgatctcgttgagctctctctgccgcggctttctgctcggcagcaagagccagctcaggatccaccccgaaagcttgggcgtaggtgttgtctatcggcgaaaacaccgcgcggcggtacgccaagaacagcgcggccatctccatcccaggcacggtgcgcgcggctttttccgccgcgtctcgctgagtcacggcggcgtccagcaggtagttgagcgccttccgcggcacgaatcgctgccgtgcggcccggatctggtcgagttggtagtcagcgtcggtgtcgaatgccgggacgtcgaccaggaagaagttgccgtcgctggggtggggacggaaggcgtcaggaatgtcgcaagggcagagcagcgccagcgcgctgcggcgggctacctcgtcgacggcctcggccacggcggcggcaaagctgctgcgggagctgccgccctgggccgccttctcggtgaagtggtcctcgaaggggacgagctcgctggggtcaaaccacccatagctcgagtcaccgaagaaggcgacgaggacgagcccgtcgcggtggccgcggtgtacctcctcgtcgtcggtgaggctgacgctgtagatatggccaggccaccacggatgggacttcaccttggcccagaccatgtcgccgaaccgggggccgccgttcgcccatgcgatgccgcgtccggcagcaggaaccatggcgcctccagcggcggggtcggacatcctgtggaggggaaccgaaaacctagatttggatgcagggtcgattggtctgggcttgggtttgggttccggaggagggtggcctgggatcggtggaag

SEQ ID NO: 16669 - DNA, 2314 bp, Zea Mays
tctcatcgcagcatcagggcacgcactctcgctccaagaacactacaatgacttggccatctacagaaacccgtgcagactgcagagtgttgggggatgagatgatggcttgtgggactgggcacaccaagttactcatggtgccgagggtggagctttcgcatttgatggcaactagcacgcaatactctctccatcggggactttcccctaatgctctgaagtgatgatacctcgtttacaaaatgttaggattttacttaagcaacagtctaattcaatcagttactctgaatgctcagattaatatatctattctaacatactgtatatacatgcctataaaccaaaaaaataaaagctactaagcaccacaacagagtaatgtgggcgcagtgtcttccttcaccatgtacatgtggactcaaccagcttacctcaatgcctcctgcggtcctgctcatgatgaacaggcaaaggatgcatccagaacagaagatattgtgtccagggaagaaataccccaatgtcatcaatcatcacatctcaacgagtcaccaacatatataatcagtcgcatgggcgttcattcagaatcagtttcaggcagtttattgcagttttgtttacaaaacatggatttcattgctctgtactgactacatgcataagaaccaacttgtctaatctaggtgtgcatcctccttgacaagcaaaattaacaattcgaccaaacatgcagcttatatatgtgaacccataatttaatatgaacagaaaactgatgtgcaacaacataaactaaaatacaaaggaaccacgaattccgaacatatgataattgttgtcctaatgcagaagaactaaatatactagagaaaaaaaccttcctagtcattgtatggacatatagaaataaaacatctcaagactccaataacaggctcatgctaactagtcatggctttaaaccttcatgatacaaactagtcacaactttaaacatttcatgccaacaagatcatggatggtgttttttttcctagagaaaagctagaatgagaaaagacctaactcagcatacatatcaggatagtatcgtatagacacgtatatgatactatatcacacagccgttcaatttctagaacaaatgcagattgatctgtgaatatgcatgtctcatattttactaggttagatggactgaatcccgtgaaacaaacaatttattcaacaagtttctgcatgaatatcatcccaaattcaataatcactctcgttgataaaaaaaatgcaaccaacagttaaacagaagtgaaatagaaactatttgaatcagatccactccgttattcacatcaaaataattgttgcttgatctataaaagcagtaggaacattgtttacccatcaatttcaagtacacagtaacaagaacaacagtacagctagaattgagcatgtgagtgttgttgatacctcgttgagctctctctgccgcggctttctgctcggcagcaagagccagctcaggatccaccccgaaagcttgggcgtaggtgttgtctatcggcgaaaacaccgcgcggcggtacgccaagaacagcgcggccatctccatcccaggcacggtgcgcgcggctttttccgccgcgtctcgctgagtcacggcggcgtccagcaggtagttgagcgccttccgcggcacgaatcgctgccgtgcggcccggatctggtcgagttggtagtcagcgtcggtgtcgaatgccgggacgtcgaccaggaagaagttgccgtcgctggggtggggacggaaggcgtcaggaatgtcgcaagggcagagcagcgccagcgcgctgcggcgggctacctcgtcgacggcctcggccacggcggcggcaaagctgctgcgggagctgccgccctgggccgccttctcggtgaagtggtcctcgaaggggacgagctcgctggggtcaaaccacccatagctcgagtcaccgaagaaggcgacgaggacgagcccgtcgcggtggccgcggtgtacctcctcgtcgtcggtgaggctgacgctgtagatatggccaggccaccacggatgggacttcaccttggcccagaccatgtcgccgaaccgggggccgccgttcgcccatgcgatgccgcgtccggcagcaggaaccatggcgcctccagcggcggggtcggacatcctgtggaggggaaccgaaaacctagatttggatgcagggtcgattggtctgggcttgggtttgggttccggaggagggtggcctgggatcggtggaag

SEQ ID NO: 16670 - DNA, 1355 bp, Zea Mays
cttgtgttgaccctcctcatccatggcagtagtcatcagctagctagccttccctacagcaactgcatacatacaacacttccatctgcccgctcgtcttcgatcaattcccaagtcaaataataatataacagcaatggtggttcccgtgatcgacttctccaagctggacggcgctgagagggctgaaaccctggcgcagatcgccaatggctgcgaggagtggggattcttccagctcgtgaaccacggcatcccgctggagctgctcgagcgcgtcaagaaggtgtgctccgactgctaccgcctccgggaggccgggttcaaggcgtcggagccggtgcgcacgctggaggcgctcgtcgacgcggagcggcgcggtgaggtggtggcgccggtggacgacctggactgggaggacatcttctacatccacgacggatgccagtggccgtccgacccgccggcgttcaaggagaccatgcgcgagtaccgcgccgagctgaggaagctcgccgagcgagtcatggaggccatggacgagaacctcggcctcgccaggggcaccatcaaggacgccttctccggcggcggccggcacgatcccttcttcggcaccaaggtcagccactacccgccgtgcccacgcccggacctcatcacgggcctgcgcgcgcacaccgacgccggcggcgtcatcctcctgttccaggacgacaaggtcggtggcctggaggtgctcaaggacggcgagtggaccgacgtacagccgctcgagggcgccatcgtcgtcaacaccggcgaccagatcgaggtgctcagcaacgggctgtaccgcagcgcttggcaccgcgtgctgcccatgcgcgacggcaatcgccgctccatcgcatccttctacaacccagccaacgaagccaccatctcgccggcggcggtgcaggccagcggcggtgacgcgtatcccaagtacttgttcggcgattacatggacgtgtacgtcaagcagaagttccaggccaaggagcctaggttcgaagccgtcaagacgggggcgccaaagtcatctccagcggcataaataaacagggaaaacaattattgaatgcattattaaaaggtagtaataagtttgttaagtattaactagctagttgccctctttgctatatatatatatatatatatatatatatatatatatataaaataggtgagtgtccgtgcgttgcaacagaaatatataataccacgacaagttatatatgtgtgttatactgttattagaaaatatttcgtaatccatttctgatcctagccatgtataaattttgttatcttaatctagttatttc

SEQ ID NO: 16671 - DNA, 2882 bp, Zea Mays
cacaagcccaacccttcctgacgctccacgcgctcgtctctctccttccttccatcctccctccctccttccctccctcgctcgcctctggaggaccctcgccatcctgcccaagcgcaccaccaaacccccagcagcggcgctagggttcgcgcctcggcgcgtcggcaccgtcacctgcggcgatggcggggcaggagcgtaggacaatcgatctggaggagggatgggcgttcatgcagaagggcatcaccaagctgaagaacatcctcgagggcaagcccgagccgcagttcagttccgaggactacatgatgctctacacgacgatatacaacatgtgcacgcagaagccgccgcaggactactcacagcagctctacgacaagtatcgggagtcgttcgaggagtacatcgcctccatggtactaccttcattaagggagaaacatgacgagtttatgctgagggagctagtgcaaaggtggtcaaaccataaagtcatggttcgctggctgtcacgcttcttttattaccttgaccgatacttcatatcaaggaggtcacttacaccacttaaagaagtgggccttacttgcttccgagagttgatctatcaagagattaaaggacaagttaaagatgcagtgatagctctgatagacaaagaacgtgagggtgaacagattgaccgggctctgttgaagaatgttttggatatttttgttgaaattgggttgggtcaaatggagtgttatgagaatgactttgaagatttcttgctcaaggatactacagagtactactctgtcaaagctcaaagctggattcttgaggactcatgcccagattacatgattaaggctgaggagtgtttaaagcgggagaaggagcgagttggtcactatttgcatattagcagcgaacagaagttattggagaaagtgcaaaatgaattgcttgctcagtatgcaaccccgctgttagagaaggagcattctggatgttctgctttgcttcgcgatgacaaggttgaggatctttctaggatgtacagactcttctccaaaatctcccgtggtctggagcctatttcaaacatgttcaaaacgcatgtcacaagtgagggtacagccttggtcaagcaagcagaagattctgctagtaataagaagccagagaagaaggatatggttggcatgcaggaacaggtctttgtgtggaaaatcatcgagctgcatgacaaatatgtagcttatgtgacagaatgtttccagggacatacactcttccataaggcacttaaagaagcctttgaggtcttctgtaacaaaggtgtctctggcagttcgaatgctgagttgttggctaccttctgcgacaatattctgaagaaaggctgcagtgaaaagctcagtgatgaagccattgaagatgcccttgagaaggttgtgagattgctggcatacatcagtgataaagacctgtttgccgagttctatagaagattacttttcgacaaaagtgctaatgatgagcatgagagaagtattctgacaaagctcaagcaacagtgcggggggcagtttacttccaaaatggagggcatggttacggaccttactgtcgctagagatcaccaaactaagtttgaagagtttgtagctgggcatccagagttgaatcctggcatagatttggctgttactgttttgacaacgggattctggccaagctacaaaacttttgacataaaccttcctgcggagatggtgaaatgtgtagaggttttcaaggaattctatcaaacaagaacgaagcacaggaagctgacatggatttattccttgggaacctgcaacatcaatgctaagtttgatgctaaacctattgagctcattgttacgacatatcaggctgcattactactactgttcaatggatccgaaaggcttagttattctgaaattgcaacacaattaaacctgtcagatgatgatgtagtgcgtttgctccattcactttcttgtgcaaaatacaagatccttaacaaggaaccagcaaatagatccatctcgcccaatgatgtttttgagttcaattcaaaatttactgacagaatgagaagaattaagattccactgcctcccgttgatgagaagaaaaaggttgttgaagatgttgacaaagacaggaggtatgcaattgatgcatcaattgtgcgcattatgaagagccgcaaagttatgggtcatcaacagctggttgctgaatgtgttgagcagcttagccgcatgtttaagccggacttcaaagccataaagaagaggattgaggatctcatcacaagggactatttggagcgcgacaaggacaacgccaatacgtacaaataccttgcctgattggtggttagtgacaaagtccaaaacagctccgggactatgcgataccactgggatggcaatcttcctgcaatgtcgtgatgcgtattctggctccgttgtcacctgttggtttgtggaggcagagtggattggtcagctagctgacggaagtcactgactcactagaagctattaagtggttttgtacttactgagtcaaatatatgtcatacgttgaaaccatgtttcgtaattatgaatagtttctttaaaattaaattttgcgcaatcaaatgcctttctctgttgcctaaggacagtcacgctctgatatgcgatcatttcacatttaccgagtcaaatagacgtatgtatatagaaaccataccagtatacttaagttcattttagctcgttataaatgttctctctctcttaacgtccagccatcagtcgaaatattgattcttgtgtaaatgacatctattttttttt

SEQ ID NO: 16672 - DNA, 2890 bp, Zea Mays
gggatttccgaaggcctggaagccgtcaagccgatatgcgacacaagcccaacccttcctgacgctccacgcgctcgtctctctccttccttccatcctccctccctccttccctccctcgctcgcctctggaggaccctcgccatcctgcccaagcgcaccaccaaacccccagcagcggcgctagggttcgcgcctcggcgcgtcggcaccgtcacctgcggcgatggcggggcaggagcgtaggacaatcgatctggaggagggatgggcgttcatgcagaagggcatcaccaagctgaagaacatcctcgagggcaagcccgagccgcagacgatatacaacatgtgcacgcagaagccgccgcaggactactcacagcagctctacgacaagtatcgggagtcgttcgaggagtacatcgcctccatggtactaccttcattaagggagaaacatgacgagtttatgctgagggagctagtgcaaaggtggtcaaaccataaagtcatggttcgctggctgtcacgcttcttttattaccttgaccgatacttcatatcaaggaggtcacttacaccacttaaagaagtgggccttacttgcttccgagagttgatctatcaagagattaaaggacaagttaaagatgcagtgatagctctgatagacaaagaacgtgagggtgaacagattgaccgggctctgttgaagaatgttttggatatttttgttgaaattgggttgggtcaaatggagtgttatgagaatgactttgaagatttcttgctcaaggatactacagagtactactctgtcaaagctcaaagctggattcttgaggactcatgcccagattacatgattaaggctgaggagtgtttaaagcgggagaaggagcgagttggtcactatttgcatattagcagcgaacagaagttattggagaaagtgcaaaatgaattgcttgctcagtatgcaaccccgctgttagagaaggagcattctggatgttctgctttgcttcgcgatgacaaggttgaggatctttctaggatgtacagactcttctccaaaatctcccgtggtctggagcctatttcaaacatgttcaaaacgcatgtcacaagtgagggtacagccttggtcaagcaagcagaagattctgctagtaataagaagccagagaagaaggatatggttggcatgcaggaacaggtctttgtgtggaaaatcatcgagctgcatgacaaatatgtagcttatgtgacagaatgtttccagggacatacactcttccataaggcacttaaagaagcctttgaggtcttctgtaacaaaggtgtctctggcagttcgaatgctgagttgttggctaccttctgcgacaatattctgaagaaaggctgcagtgaaaagctcagtgatgaagccattgaagatgcccttgagaaggttgtgagattgctggcatacatcagtgataaagacctgtttgccgagttctatagaagattacttttcgacaaaagtgctaatgatgagcatgagagaagtattctgacaaagctcaagcaacagtgcggggggcagtttacttccaaaatggagggcatggttacggaccttactgtcgctagagatcaccaaactaagtttgaagagtttgtagctgggcatccagagttgaatcctggcatagatttggctgttactgttttgacaacgggattctggccaagctacaaaacttttgacataaaccttcctgcggagatggtgaaatgtgtagaggttttcaaggaattctatcaaacaagaacgaagcacaggaagctgacatggatttattccttgggaacctgcaacatcaatgctaagtttgatgctaaacctattgagctcattgttacgacatatcaggctgcattactactactgttcaatggatccgaaaggcttagttattctgaaattgcaacacaattaaacctgtcagatgatgatgtagtgcgtttgctccattcactttcttgtgcaaaatacaagatccttaacaaggaaccagcaaatagatccatctcgcccaatgatgtttttgagttcaattcaaaatttactgacagaatgagaagaattaagattccactgcctcccgttgatgagaagaaaaaggttgttgaagatgttgacaaagacaggaggtatgcaattgatgcatcaattgtgcgcattatgaagagccgcaaagttatgggtcatcaacagctggttgctgaatgtgttgagcagcttagccgcatgtttaagccggacttcaaagccataaagaagaggattgaggatctcatcacaagggactatttggagcgcgacaaggacaacgccaatacgtacaaataccttgcctgattggtggttagtgacaaagtccaaaacagctccgggactatgcgataccactgggatggcaatcttcctgcaatgtcgtgatgcgtattctggctccgttgtcacctgttggtttgtggaggcagagtggattggtcagctagctgacggaagtcactgactcactagaagctattaagtggttttgtacttactgagtcaaatatatgtcatacgttgaaaccatgtttcgtaattatgaatagtttctttaaaattaaattttgcgcaatcaaatgcctttctctgttgcctaaggacagtcacgctctgatatgcgatcatttcacatttaccgagtcaaatagacgtatgtatatagaaaccataccagtatacttaagttcattttagctcgttataaatgttctctctctcttaacgtccagccatcagtcgaaatattgattcttgtgtaaatgacatctattttttttt

SEQ ID NO: 16673 - DNA, 2894 bp, Zea Mays
gggatttccgaaggcctggaagccgtcaagccgatatgcgacacaagcccaacccttcctgacgctccacgcgctcgtctctctccttccttccatcctccctccctccttccctccctcgctcgcctctggaggaccctcgccatcctgcccaagcgcaccaccaaacccccagcagcggcgctagggttcgcgcctcggcgcgtcggcaccgtcacctgcggcgatggcggggcaggagcgtaggacaatcgatctggaggagggatgggcgttcatgcagaagggcatcaccaagctgaagaacatcctcgagggcaagcccgagccgcagacgatatacaacatgtgcacgcagaagccgccgcaggactactcacagcagctctacgacaagtatcgggagtcgttcgaggagtacatcgcctccatggtactaccttcattaagggagaaacatgacgagtttatgctgagggagctagtgcaaaggtggtcaaaccataaagtcatggttcgctggctgtcacgcttcttttattaccttgaccgatacttcatatcaaggaggtcacttacaccacttaaagaagtgggccttacttgcttccgagagttgatctatcaagagattaaaggacaagttaaagatgcagtgatagctctgatagacaaagaacgtgagggtgaacagattgaccgggctctgttgaagaatgttttggatatttttgttgaaattgggttgggtcaaatggagtgttatgagaatgactttgaagatttcttgctcaaggatactacagagtactactctgtcaaagctcaaagctggattcttgaggactcatgcccagattacatgattaaggctgaggagtgtttaaagcgggagaaggagcgagttggtcactatttgcatattagcagcgaacagaagttattggagaaagtgcaaaatgaattgcttgctcagtatgcaaccccgctgttagagaaggagcattctggatgttctgctttgcttcgcgatgacaaggttgaggatctttctaggatgtacagactcttctccaaaatctcccgtggtctggagcctatttcaaacatgttcaaaacgcatgtcacaagtgagggtacagccttggtcaagcaagcagaagattctgctagtaataagaagccagagaagaaggatatggttggcatgcaggaacaggtctttgtgtggaaaatcatcgagctgcatgacaaatatgtagcttatgtgacagaatgtttccagggacatacactcttccataaggcacttaaagaagcctttgaggtcttctgtaacaaaggtgtctctggcagttcgaatgctgagttgttggctaccttctgcgacaatattctgaagaaaggctgcagtgaaaagctcagtgatgaagccattgaagatgcccttgagaaggttgtgagattgctggcatacatcagtgataaagacctgtttgccgagttctatagaagattacttttcgacaaaagtgctaatgatgagcatgagagaagtattctgacaaagctcaagcaacagtgcggggggcagtttacttccaaaatggagggcatggttacggaccttactgtcgctagagatcaccaaactaagtttgaagagtttgtagctgggcatccagagttgaatcctggcatagatttggctgttactgttttgacaacgggattctggccaagctacaaaacttttgacataaaccttcctgcggagatggtgaaatgtgtagaggttttcaaggaattctatcaaacaagaacgaagcacaggaagctgacatggatttattccttgggaacctgcaacatcaatgctaagtttgatgctaaacctattgagctcattgttacgacatatcaggctgcattactactactgttcaatggatccgaaaggcttagttattctgaaattgcaacacaattaaacctgtcagatgatgatgtagtgcgtttgctccattcactttcttgtgcaaaatacaagatccttaacaaggaaccagcaaatagatccatctcgcccaatgatgtttttgagttcaattcaaaatttactgacagaatgagaagaattaagattccactgcctcccgttgatgagaagaaaaaggttgttgaagatgttgacaaagacaggaggtatgcaattgatgcatcaattgtgcgcattatgaagagccgcaaagttatgggtcatcaacagctggttgctgaatgtgttgagcagcttagccgcatgtttaagccggacttcaaagccataaagaagaggattgaggatctcatcacaagggactatttggagcgcgacaaggacaacgccaatacgtacaaataccttgcctgattggtggttagtgacaaagtccaaaacagctccgggactatgcgataccactgggatggcaatcttcctgcaatgtcgtggtagatgcgtattctggctccgttgtcacctgttggtttgtggaggcagagtggattggtcagctagctgacggaagtcactgactcactagaagctattaagtggttttgtacttactgagtcaaatatatgtcatacgttgaaaccatgtttcgtaattatgaatagtttctttaaaattaaattttgcgcaatcaaatgcctttctctgttgcctaaggacagtcacgctctgatatgcgatcatttcacatttaccgagtcaaatagacgtatgtatatagaaaccataccagtatacttaagttcattttagctcgttataaatgttctctctctcttaacgtccagccatcagtcgaaatattgattcttgtgtaaatgacatctattttttttt

SEQ ID NO: 16674 - DNA, 3226 bp, Zea Mays
gggatttccgaaggcctggaagccgtcaagccgatatgcgacacaagcccaacccttcctgacgctccacgcgctcgtctctctccttccttccatcctccctccctccttccctccctcgctcgcctctggaggaccctcgccatcctgcccaagcgcaccaccaaacccccagcagcggcgctagggttcgcgcctcggcgcgtcggcaccgtcacctgcggcgatggcggggcaggagcgtaggacaatcgatctggaggagggatgggcgttcatgcagaagggcatcaccaagctgaagaacatcctcgagggcaagcccgagccgcagacgatatacaacatgtgcacgcagaagccgccgcaggactactcacagcagctctacgacaagtatcgggagtcgttcgaggagtacatcgcctccatggtactaccttcattaagggagaaacatgacgagtttatgctgagggagctagtgcaaaggtggtcaaaccataaagtcatggttcgctggctgtcacgcttcttttattaccttgaccgatacttcatatcaaggaggtcacttacaccacttaaagaagtgggccttacttgcttccgagagttgatctatcaagagattaaaggacaagttaaagatgcagtgatagctctgatagacaaagaacgtgagggtgaacagattgaccgggctctgttgaagaatgttttggatatttttgttgaaattgggttgggtcaaatggagtgttatgagaatgactttgaagatttcttgctcaaggatactacagagtactactctgtcaaagctcaaagctggattcttgaggactcatgcccagattacatgattaaggctgaggagtgtttaaagcgggagaaggagcgagttggtcactatttgcatattagcagcgaacagaagttattggagaaagtgcaaaatgaattgcttgctcagtatgcaaccccgctgttagagaaggagcattctggatgttctgctttgcttcgcgatgacaaggttgaggatctttctaggatgtacagactcttctccaaaatctcccgtggtctggagcctatttcaaacatgttcaaaacgcatgtcacaagtgagggtacagccttggtcaagcaagcagaagattctgctagtaataagaagccagagaagaaggatatggttggcatgcaggaacaggtctttgtgtggaaaatcatcgagctgcatgacaaatatgtagcttatgtgacagaatgtttccagggacatacactcttccataaggcacttaaagaagcctttgaggtcttctgtaacaaaggtgtctctggcagttcgaatgctgagttgttggctaccttctgcgacaatattctgaagaaaggctgcagtgaaaagctcagtgatgaagccattgaagatgcccttgagaaggttgtgagattgctggcatacatcagtgataaagacctgtttgccgagttctatagaagattacttttcgacaaaagtgctaatgatgagcatgagagaagtattctgacaaagctcaagcaacagtgcggggggcagtttacttccaaaatggagggcatggttacggaccttactgtcgctagagatcaccaaactaagtttgaagagtttgtagctgggcatccagagttgaatcctggcatagatttggctgttactgttttgacaacgggattctggccaagctacaaaacttttgacataaaccttcctgcggagatggtgaaatgtgtagaggttttcaaggaattctatcaaacaagaacgaagcacaggaagctgacatggatttattccttgggaacctgcaacatcaatgctaagtttgatgctaaacctattgagctcattgttacgacatatcaggctgcattactactactgttcaatggatccgaaaggcttagttattctgaaattgcaacacaattaaacctgtcagatgatgatgtagtgcgtttgctccattcactttcttgtgcaaaatacaagatccttaacaaggaaccagcaaatagatccatctcgcccaatgatgtttttgagttcaattcaaaatttactgacagaatgagaagaattaagattccactgcctcccgttgatgagaagaaaaaggttgttgaagatgttgacaaagacaggaggtatgcaattgatgcatcaattgtgcgcattatgaagagccgcaaagttatgggtcatcaacagctggttgctgaatgtgttgagcagcttagccgcatgtttaagccggacttcaaagccataaagaagaggattgaggatctcatcacaagggactatttggagcgcgacaaggacaacgccaatacgtacaaataccttgcctgattggtggttagtgacaaagtccaaaacagctccgggactatgcgataccactgggatggcaatcttcctgcaatgtcgtggtgcgtccacttctaccatgatttgcagcacgttttggtgatttgccctgccacagcacgggctgctcacattttgtacattggtcgttaaataggataagcgtgttggcctacattagatataatgatgattgatgatatgaggaataggagaggcattcaagtacttgtatgtgtcttctatgccaatgctttatctatatagctgtatcagtgttccagtcaattgatatgagatgatgcttggagtcgttttgctatatgaagtgacggatacaatgggaatttgcagcatccgtttgtatctgaatgcacctgcttttgttttataggtagatgcgtattctggctccgttgtcacctgttggtttgtggaggcagagtggattggtcagctagctgacggaagtcactgactcactagaagctattaagtggttttgtacttactgagtcaaatatatgtcatacgttgaaaccatgtttcgtaattatgaatagtttctttaaaattaaattttgcgcaatcaaatgcctttctctgttgcctaaggacagtcacgctctgatatgcgatcatttcacatttaccgagtcaaatagacgtatgtatatagaaaccataccagtatacttaagttcattttagctcgttataaatgttctctctctcttaacgtccagccatcagtcgaaatattgattcttgtgtaaatgacatctattttttttt

SEQ ID NO: 16675 - DNA, 2393 bp, Zea Mays
atgatgaatttagaggacgctgagagcgtgtgtgagaaggtgtgcgtggtcgaagcggatttgactcgattttgtttataacaacatcaggcaggcagctacctcgtgataatcaaagcttaattaatcccgagcgaaaattatgatgcgcacatggctgccccgccggacgagagatgattattacaagtaagcacgaggaaagggaagagaagaagaagagggctcgtctcgtcttgcaggccggaggctgcgtcgctgccccgccggcgccgccgtatgccagttctttgtcagtcccttcggcaggtcttcgtgggtccttctccttcgccggcgacgagcacccaccaagagaaccttcctgcaaggctgcattgatctcgtcttgttgtttctggcccaacacttgcaactggaggccgaggcttttacaaggagctggggaagaatgggcagaagctgctatcgaatctgaagctttgcttggcacaccagcactggagagatgtataagaaccaactccaggagcttgctcagaggagctgcttcaatctgccgtcctattcctgcatccgggagggaccagatcatgcaccccggtttaaggctacagttaatttcaacggggagatgttcgagagcccagtgttttgttccactctgcggcaggcggagcatgcggcagctgaggtagcactcaatgagttatcaaagagggggccttcgtcgacgctggctgccaaagttctggatgaaaccgggatatacaagaatcttcttcaagaaactgctcatcgagctggtctaaaactccccatctatactactattagatctgggccaggtcatacgcctgtgttcgcatgcacagtggagttggcaggaaaggcatttactggcaatcctggcaagaccaagaagcaagctcaaaagaatgctgcaatggctgcctggtctgaattgaagaaactgcccagggtaggtgagccgtcatcctcatcttgtccacctgatcaggatgatgaagtgcaggaacaggtcgtagttactcggactcttgcaagcttgaaccaggcaaatagtggcaaggtgccacatcagaaggaaaaacagcaaagcaataaccgcccatcatcacggagatgttatcctaaaccaaatacaccattctaccgaccatttatgcaaaatcaggcttatcctagcgttccaccagatcaagctatgtaccatctgtggcatcggatgcaagtgacagccaacgcctcgctttccagtggtaccagctatgggcaatacaagtttttgcccaccagcagctatgctccccatgtaccctccttcacctcaagggcaattctccaatccggctaaccaggatgctctaggccttcttccatgttttcctgatgcttctcctgccatgctacggcacttctcaccttaccctgtctcctatgtgccaagaagtcctctgccggttactgttcacaatgttcatgagagaaggcatgaccatactgaaacagttgagcttcctgatgctgtggtgttctcccaatgcacgaccctagattcctttaggacatcagaatgtggcggtccaccactcaaggttcaagaaccaaccaaaaatcggaaagaaggctgtattgggtcccctgagaaagaacttgacactcttgccgtctcaagctctaccgcacaagcgtcgtcgcaaaagttggaagcaaatgaaggtaagcaaacagtgcaggcaggtttgaagcagacccatgaacagcagctgatgtcatcctcgtcttgtgttagttcttcagttgtggcacagagctcgcattacgctagctccatccagcatgatgagtctatacatagaaggaatcctcctcatactagttcgcctgcattgcctgatgtgtggtcttcccgctcgcaagctctgcccagatttggatcaccaagttgggtgttccagcagcgaccttggttggctgcacccgtcacagttcgaaccgctgttcctgtctgctcagccaggccaaacgtggtgaattctaccactggaataagacctgctgcccagagccatgatggagagagagatctgaacagcgccgcagcagcgagttctggattcaataaactccaaatttgagctgcggttttggttctgctgagcttttcatctcagttttgtttgcttcttggcttgaggtttattttttagttagatataccagataggctcttaggttttcattttacatttaccagatgtccagttccttctgaagataaatggacgagaactgtaatataaaaaatgcagaggcctttctcatgcgatttgaattcagtttcagtatgcaatcgatgtagttccagc

SEQ ID NO: 16676 - DNA, 2388 bp, Zea Mays
atgatgaatttagaggacgctgagagcgtgtgtgagaaggtgtgcgtggtcgaagcggatttgactcgattttgtttataacaacatcaggcaggcagctacctcgtgataatcaaagcttaattaatcccgagcgaaaattatgatgcgcacatggctgccccgccggacgagagatgattattacaagtaagcacgaggaaagggaagagaagaagaagagggctcgtctcgtcttgcaggccggaggctgcgtcgctgccccgccggcgccgccgtatgccagttctttgtcagtcccttcggcaggtcttcgtgggtccttctccttcgccggcgacgagcacccaccaaggacagcgggtacagcgctagttattgcttcaccttccttatctttgctgcagcaactggaggccgaggcttttacaaggagctggggaagaatgggcagaagctgctatcgaatctgaagctttgcttggcacaccagcactggagagatgtataagaaccaactccaggagcttgctcagaggagctgcttcaatctgccgtcctattcctgcatccgggagggaccagatcatgcaccccggtttaaggctacagttaatttcaacggggagatgttcgagagcccagtgttttgttccactctgcggcaggcggagcatgcggcagctgaggtagcactcaatgagttatcaaagagggggccttcgtcgacgctggctgccaaagttctggatgaaaccgggatatacaagaatcttcttcaagaaactgctcatcgagctggtctaaaactccccatctatactactattagatctgggccaggtcatacgcctgtgttcgcatgcacagtggagttggcaggaaaggcatttactggcaatcctggcaagaccaagaagcaagctcaaaagaatgctgcaatggctgcctggtctgaattgaagaaactgcccagggtaggtgagccgtcatcctcatcttgtccacctgatcaggatgatgaagtgcaggaacaggtcgtagttactcggactcttgcaagcttgaaccaggcaaatagtggcaaggtgccacatcagaaggaaaaacagcaaagcaataaccgcccatcatcacggagatgttatcctaaaccaaatacaccattctaccgaccatttatgcaaaatcaggcttatcctagcgttccaccagatcaagctatgtaccatctgtggcatcggatgcaagtgacagccaacgcctcgctttccagtggtaccagctatgggcaatacaagtttttgcccaccagcagctatgctccccatgtaccctccttcacctcaagggcaattctccaatccggctaaccaggatgctctaggccttcttccatgttttcctgatgcttctcctgccatgctacggcacttctcaccttaccctgtctcctatgtgccaagaagtcctctgccggttactgttcacaatgttcatgagagaaggcatgaccatactgaaacagttgagcttcctgatgctgtggtgttctcccaatgcacgaccctagattcctttaggacatcagaatgtggcggtccaccactcaaggttcaagaaccaaccaaaaatcggaaagaaggctgtattgggtcccctgagaaagaacttgacactcttgccgtctcaagctctaccgcacaagcgtcgtcgcaaaagttggaagcaaatgaaggtaagcaaacagtgcaggcaggtttgaagcagacccatgaacagcagctgatgtcatcctcgtcttgtgttagttcttcagttgtggcacagagctcgcattacgctagctccatccagcatgatgagtctatacatagaaggaatcctcctcatactagttcgcctgcattgcctgatgtgtggtcttcccgctcgcaagctctgcccagatttggatcaccaagttgggtgttccagcagcgaccttggttggctgcacccgtcacagttcgaaccgctgttcctgtctgctcagccaggccaaacgtggtgaattctaccactggaataagacctgctgcccagagccatgatggagagagagatctgaacagcgccgcagcagcgagttctggattcaataaactccaaatttgagctgcggttttggttctgctgagcttttcatctcagttttgtttgcttcttggcttgaggtttattttttagttagatataccagataggctcttaggttttcattttacatttaccagatgtccagttccttctgaagataaatggacgagaactgtaatataaaaaatgcagaggcctttctcatgcgatttgaattcagtttcagtatgcaatcgatgtagttccagc

SEQ ID NO: 16677 - DNA, 2530 bp, Zea Mays
atgatgaatttagaggacgctgagagcgtgtgtgagaaggtgtgcgtggtcgaagcggatttgactcgattttgtttataacaacatcaggcaggcagctacctcgtgataatcaaagcttaattaatcccgagcgaaaattatgatgcgcacatggctgccccgccggacgagagatgattattacaagtaagcacgaggaaagggaagagaagaagaagagggctcgtctcgtcttgcaggccggaggctgcgtcgctgccccgccggcgccgccgtatgccagttctttgtcagtcccttcggcaggtcttcgtgggtccttctccttcgccggcgacgagcacccaccaagcaactggaggccgaggcttttacaaggagctggggaagaatgggcagaagctgctatcgaatctgaagctttgcttggcacaccagcactggagagatgtataagaaccaactccaggagcttgctcagaggagctgcttcaatctgccgtcctattcctgcatccgggagggaccagatcatgcaccccggtttaaggctacagttaatttcaacggggagatgttcgagagcccagtgttttgttccactctgcggcaggcggagcatgcggcagctgaggtagcactcaatgagttatcaaagagggggccttcgtcgacgctggctgccaaagttctggatgaaaccgggatatacaagaatcttcttcaagaaactgctcatcgagctggtctaaaactccccatctatactactattagatctgggccaggtcatacgcctgtgttcgcatgcacagtggagttggcaggaaaggcatttactggcaatcctggcaagaccaagaagcaagctcaaaagaatgctgcaatggctgcctggtctgaattgaagaaacgtgagtaccttttcattcggtaccaacttgagtttcttgatgcatgattgttgattttgttgctttggttgtgccttcctttgttttttagtgcaacacatttggtaggaatagttgctaagttattcttggatgcaagaatataagaaaaactatcatatcttcacaaaagtttatgtgctctaatatttgatccgtaaattgtgtttagcgacatcttttaatttttttgtgaattaatttgtttgctgactaattaatttgcagtgcccagggtaggtgagccgtcatcctcatcttgtccacctgatcaggatgatgaagtgcaggaacaggtcgtagttactcggactcttgcaagcttgaaccaggcaaatagtggcaaggtgccacatcagaaggaaaaacagcaaagcaataaccgcccatcatcacggagatgttatcctaaaccaaatacaccattctaccgaccatttatgcaaaatcaggcttatcctagcgttccaccagatcaagctatgtaccatctgtggcatcggatgcaagtgacagccaacgcctcgctttccagtggtaccagctatgggcaatacaagtttttgcccaccagcagctatgctccccatgtaccctccttcacctcaagggcaattctccaatccggctaaccaggatgctctaggccttcttccatgttttcctgatgcttctcctgccatgctacggcacttctcaccttaccctgtctcctatgtgccaagaagtcctctgccggttactgttcacaatgttcatgagagaaggcatgaccatactgaaacagttgagcttcctgatgctgtggtgttctcccaatgcacgaccctagattcctttaggacatcagaatgtggcggtccaccactcaaggttcaagaaccaaccaaaaatcggaaagaaggctgtattgggtcccctgagaaagaacttgacactcttgccgtctcaagctctaccgcacaagcgtcgtcgcaaaagttggaagcaaatgaagttcttcagttgtggcacagagctcgcattacgctagctccatccagcatgatgagtctatacatagaaggaatcctcctcatactagttcgcctgcattgcctgatgtgtggtcttcccgctcgcaagctctgcccagatttggatcaccaagttgggtgttccagcagcgaccttggttggctgcacccgtcacagttcgaaccgctgttcctgtctgctcagccaggccaaacgtggtgaattctaccactggaataagacctgctgcccagagccatgatggagagagagatctgaacagcgccgcagcagcgagttctggattcaataaactccaaatttgagctgcggttttggttctgctgagcttttcatctcagttttgtttgcttcttggcttgaggtttattttttagttagatataccagataggctcttaggttttcattttacatttaccagatgtccagttccttctgaagataaatggacgagaactgtaatataaaaaatgcagaggcctttctcatgcgatttgaattcagtttcagtatgcaatcgatgtagttccagc

SEQ ID NO: 16678 - DNA, 2383 bp, Zea Mays
atgatgaatttagaggacgctgagagcgtgtgtgagaaggtgtgcgtggtcgaagcggatttgactcgattttgtttataacaacatcaggcaggcagctacctcgtgataatcaaagcttaattaatcccgagcgaaaattatgatgcgcacatggctgccccgccggacgagagatgattattacaagtaagcacgaggaaagggaagagaagaagaagagggctcgtctcgtcttgcaggccggaggctgcgtcgctgccccgccggcgccgccgtatgccagttctttgtcagtcccttcggcaggtcttcgtgggtccttctccttcgccggcgacgagcacccaccaagcgggtacagcgctagttattgcttcaccttccttatctttgctgcagcaactggaggccgaggcttttacaaggagctggggaagaatgggcagaagctgctatcgaatctgaagctttgcttggcacaccagcactggagagatgtataagaaccaactccaggagcttgctcagaggagctgcttcaatctgccgtcctattcctgcatccgggagggaccagatcatgcaccccggtttaaggctacagttaatttcaacggggagatgttcgagagcccagtgttttgttccactctgcggcaggcggagcatgcggcagctgaggtagcactcaatgagttatcaaagagggggccttcgtcgacgctggctgccaaagttctggatgaaaccgggatatacaagaatcttcttcaagaaactgctcatcgagctggtctaaaactccccatctatactactattagatctgggccaggtcatacgcctgtgttcgcatgcacagtggagttggcaggaaaggcatttactggcaatcctggcaagaccaagaagcaagctcaaaagaatgctgcaatggctgcctggtctgaattgaagaaactgcccagggtaggtgagccgtcatcctcatcttgtccacctgatcaggatgatgaagtgcaggaacaggtcgtagttactcggactcttgcaagcttgaaccaggcaaatagtggcaaggtgccacatcagaaggaaaaacagcaaagcaataaccgcccatcatcacggagatgttatcctaaaccaaatacaccattctaccgaccatttatgcaaaatcaggcttatcctagcgttccaccagatcaagctatgtaccatctgtggcatcggatgcaagtgacagccaacgcctcgctttccagtggtaccagctatgggcaatacaagtttttgcccaccagcagctatgctccccatgtaccctccttcacctcaagggcaattctccaatccggctaaccaggatgctctaggccttcttccatgttttcctgatgcttctcctgccatgctacggcacttctcaccttaccctgtctcctatgtgccaagaagtcctctgccggttactgttcacaatgttcatgagagaaggcatgaccatactgaaacagttgagcttcctgatgctgtggtgttctcccaatgcacgaccctagattcctttaggacatcagaatgtggcggtccaccactcaaggttcaagaaccaaccaaaaatcggaaagaaggctgtattgggtcccctgagaaagaacttgacactcttgccgtctcaagctctaccgcacaagcgtcgtcgcaaaagttggaagcaaatgaaggtaagcaaacagtgcaggcaggtttgaagcagacccatgaacagcagctgatgtcatcctcgtcttgtgttagttcttcagttgtggcacagagctcgcattacgctagctccatccagcatgatgagtctatacatagaaggaatcctcctcatactagttcgcctgcattgcctgatgtgtggtcttcccgctcgcaagctctgcccagatttggatcaccaagttgggtgttccagcagcgaccttggttggctgcacccgtcacagttcgaaccgctgttcctgtctgctcagccaggccaaacgtggtgaattctaccactggaataagacctgctgcccagagccatgatggagagagagatctgaacagcgccgcagcagcgagttctggattcaataaactccaaatttgagctgcggttttggttctgctgagcttttcatctcagttttgtttgcttcttggcttgaggtttattttttagttagatataccagataggctcttaggttttcattttacatttaccagatgtccagttccttctgaagataaatggacgagaactgtaatataaaaaatgcagaggcctttctcatgcgatttgaattcagtttcagtatgcaatcgatgtagttccagc

SEQ ID NO: 16679 - DNA, 819 bp, Zea Mays
ctactcatccaggtccatagagtgtgtattttcaatgcaggcggtgtgcttggtactgtgatacttagctgcacggtgaccaagtcgattccccaggaatctaaattctgtttcttcgtcatcatcactgtctatgttctttggagtgatcctgttttggtagcacctccttcgaagcagaaaacaattaaaataatagctcaccagttctttcctccccttaaattgaaaaaataagtggaggcggttccagaaattcctgccagaagacgcagcactatgttgtgctgcggccttgaaacttgcctcctcttcatctgtccaagaaagtgcaatctcctcacccatacgattgaatccccatgcatagaaagctgcaccaagttcatgtttcaacttaagtctccattctgctacatgaaaccgaacacattccactgatccaggataaacgcaaccacaaacaacttctctgcctttgccaataggatcaccacaaaacaatgttttacagccttcattttctggaggccagacctttgttcccaaccatttcagagtttctggatcatcataatttgtaggcacctcactagtccattgtggcacgtgtatttgatagttggggccaacaggtatttcatttttctgatggcttttaaaaagccaaccattagaagagttactagtcctagactcgtgtttcccttctccagtcaagttgatgtccggttttgtgaggactgaagaaccattcagtagttttgcttttgcacaattgccaacaccggtaggacctatacagcaattgcaagccat

SEQ ID NO: 16680 - DNA, 408 bp, Zea Mays
tggttggaaaaagaaatcttcacataagtttctcagagacaaacagagtctacaatgaacaacagtactactttcagaacactaacatctacatagatgctcactgctccatctcgctccagagaactacaacaggagcctagagcatggaaccaacatgtatcttattggataaggacccgattaataattcacaaagagaaaaagaaagctacaaaaaagttgaaacaaacgatacactgtcaaatcattgcattctcactttctggatgtgcgtccatgtaagtaagtgctcagtgaccagtattacctgaattccctatcagaacttgagtttgaaattcaattgtggatcagcctacaatccatctgtgcacaatccatctgtgcagtaactaattgcttggg

SEQ ID NO: 16681 - DNA, 2381 bp, Zea Mays
ctctaacccaaagccaaaacctaatccaaaatacgaatcgaatactcaagcaattacactttgtgaagagcactacctgatttaatagtttcttttgaaaaagatgagagagagagttattaggtttcattttataaataatagaaaatgcttgtgagagttgcatgttgaattcgagtgtaggctcaaatttagacaaagttttttttctcgaaattattttatttttgattcacctttatcatagtgttgacttggtcaacatcactataaggatttgtgttgcaaacgattttgaaattgtggtttgaaagtgagacaaggtggaaaagttaacttatgtttgaccaactgtttacacacattcatgcagttttttcgtgaaagttggtctttttataaaacgacaaaaaccggtatgttacaagaaatttggatgaatgtccatataattcctaatgaagacaaacgtcaaacgcgtgatatagaccacgcgctacacacagtatcaccaagcccaaaacataccaaaaaaagttgaaccaagtggttgagaattccccttttgctctcatggccatggagaacactgcgccatgcggtgacttcgggaagatcgtggccgatcttgagtctgagaacttggtggctaacgtctctgccgtgaatcaagcctcggcgttgattgctggaggtaaaatccctgaaccccagcttctgtgccgcctgatcgctggtcttgcttccaatctggagaagcctgaccatgactctgccatcaagaggtgtgtttcctttactctaaaggcaatcagggtggccgtcatcaagaaccgcatgaacatggattcctcagctcgtggtgaggctctccatgccatctggtgttgttttatggatcaaggccttcgccgtattcagcgtgattcaaatatggtgaggctgtggacagtccaggatcaattgtctgcagtcaaaatcatatgtactttcttccgtctctcaccggtaaacatcagtgacacaaggtgtgtcacagccttcgcctcactgatgttgtcaccgtacagcactgtggtgtgtgcatgtgcagatgccctgctctctttgccccctgttgttccaggattttcatttgccattgcaagagcctattgccatatgcttgcaacagtgtcaccacaatcaccacttgaggtaagcagcatggttgcgatgcttggtaggctgaagcaagtaagtacgaccatggtccaccacccaggggtttagtgaccttgctgtggatgtcctagcagctttatcaaattgcaatcttgctgttcgaaagaatcttctgaacctgatggtgaggctcctcactccaaggaacatcagtgctgtgctattgctccttgataatgagctgaatagggctgctaacatccatatcgagtaccacaagatgctagaggaggcgatcagagaatgccatgctgcttttccggggtgtattgtagaattcacactagatcccaagtacagtgtgttcattgatagtattctgtacatcatagacatcatgaatcccgaccagtcgttgcgaggcccacttctgaaaggtctactaagggcgctccggcatgtgaagtcaccactggtatgcgccgctgctgtttgggccatctcaatgttctctggatcactggaagaggtcagtgatgccattgttgcactttcatgcttcttcaaggacctgcttgatcgacgtaagattgagaagctgatacttggaggagaagcggagaatcaatacaagctttctactgactattatggtgtcactgccggagatgcaacacagggaaagcaccagcagccatggctgatggagatggaggaactgctgtttgtgcgcatagggctcacacggcaagcaggtgggagctatgccattccttcgagttccaagagcagtgctagttcttcaaacgcgtatcttcctgagccattgggtaatacagacaatctgatcttcctcgtgcattctggagatgccctcttggcagatttcgtggaaatcatgctgtctaacctcaagaagaaggtcaaagagctggagtgatgctgatgagttcatttgatgtaataatttggaggtcaaataactagaaatggagtcgttgaaccttggccaatcgtacctcaatatgcataataatgctgtcttctgtgtgcttattacttctattattactatattatcactgatactttttctattcaacattttgccatctatttgtgtgacttgtgtggtctcatctagcctaccccaatctacatgagatcgaatatactctcatcgtggatggtatatatacacgtacttttgggaatat

SEQ ID NO: 16682 - DNA, 1970 bp, Zea Mays
cttgcagttctacaggcgtgggtttcttctactgacaggctctaagaaagaagacaaacgtcaaacgcgtgatatagaccacgcgctacacacagtatcaccaagcccaaaacataccaaaaaaagttgaaccaagtggttgagaattccccttttgctctcatggccatggagaacactgcgccatgcggtgacttcgggaagatcgtggccgatcttgagtctgagaacttggtggctaacgtctctgccgtgaatcaagcctcggcgttgattgctggaggtaaaatccctgaaccccagcttctgtgccgcctgatcgctggtcttgcttccaatctggagaagcctgaccatgactctgccatcaagaggtgtgtttcctttactctaaaggcaatcagggtggccgtcatcaagaaccgcatgaacatggattcctcagctcgtggtgaggctctccatgccatctggtgttgttttatggatcaaggccttcgccgtattcagcgtgattcaaatatggtgaggctgtggacagtccaggatcaattgtctgcagtcaaaatcatatgtactttcttccgtctctcaccggtaaacatcagtgacacaaggtgtgtcacagccttcgcctcactgatgttgtcaccgtacagcactgtggtgtgtgcatgtgcagatgccctgctctctttgccccctgttgttccaggattttcatttgccattgcaagagcctattgccatatgcttgcaacagtgtcaccacaatcaccacttgaggtaagcagcatggttgcgatgcttggtaggctgaagcaagtaagtacgaccatggtccaccacccaggggtttagtgaccttgctgtggatgtcctagcagctttatcaaattgcaatcttgctgttcgaaagaatcttctgaacctgatggtgaggctcctcactccaaggaacatcagtgctgtgctattgctccttgataatgagctgaatagggctgctaacatccatatcgagtaccacaagatgctagaggaggcgatcagagaatgccatgctgcttttccggggtgtattgtagaattcacactagatcccaagtacagtgtgttcattgatagtattctgtacatcatagacatcatgaatcccgaccagtcgttgcgaggcccacttctgaaaggtctactaagggcgctccggcatgtgaagtcaccactggtatgcgccgctgctgtttgggccatctcaatgttctctggatcactggaagaggtcagtgatgccattgttgcactttcatgcttcttcaaggacctgcttgatcgacgtaagattgagaagctgatacttggaggagaagcggagaatcaatacaagctttctactgactattatggtgtcactgccggagatgcaacacagggaaagcaccagcagccatggctgatggagatggaggaactgctgtttgtgcgcatagggctcacacggcaagcaggtgggagctatgccattccttcgagttccaagagcagtgctagttcttcaaacgcgtatcttcctgagccattgggtaatacagacaatctgatcttcctcgtgcattctggagatgccctcttggcagatttcgtggaaatcatgctgtctaacctcaagaagaaggtcaaagagctggagtgatgctgatgagttcatttgatgtaataatttggaggtcaaataactagaaatggagtcgttgaaccttggccaatcgtacctcaatatgcataataatgctgtcttctgtgtgcttattacttctattattactatattatcactgatactttttctattcaacattttgccatctatttgtgtgacttgtgtggtctcatctagcctaccccaatctacatgagatcgaatatactctcatcgtggatggtatatatacacgtacttttgggaatat

SEQ ID NO: 16683 - DNA, 2509 bp, Zea Mays
tgctgtccggtgctcctcgtcgggcgcttcgctgccgccttgcaattgcaacccacggcaaatgctgctcgacgatgagcgaggctagcaggagccacctcctcacctggatcgatggcggccgttcatctcggctaagatccaaatctcggcatcggcggcacccctcgactctccccacgcccctagccatcctaactgcgaccgtggatgaagatctcaaagaatcttggaggtgcagcggcttgtacaacatttgatcgatgagtcagtgggcctaaagaaaataaagcagcccaagatgatctccatcatgggaatccgtggctccggcaagaccgcacttgccacagaggtgcatgagaggcatcttagactatctccagcagcttacccatccccatacccatattcaaactctactctgcgaacagcgcaatctatagtacaaaacagtgcttttgggtaaactatgggtagactgctgcagacggtcttaggacagagaaattcaataactccggacacaatttggataaaatgatgatcaacatggtcaacttttcatctgacagctgcaacctaaaagaagacaaacgtcaaacgcgtgatatagaccacgcgctacacacagtatcaccaagcccaaaacataccaaaaaaagttgaaccaagtggttgagaattccccttttgctctcatggccatggagaacactgcgccatgcggtgacttcgggaagatcgtggccgatcttgagtctgagaacttggtggctaacgtctctgccgtgaatcaagcctcggcgttgattgctggaggtaaaatccctgaaccccagcttctgtgccgcctgatcgctggtcttgcttccaatctggagaagcctgaccatgactctgccatcaagaggtgtgtttcctttactctaaaggcaatcagggtggccgtcatcaagaaccgcatgaacatggattcctcagctcgtggtgaggctctccatgccatctggtgttgttttatggatcaaggccttcgccgtattcagcgtgattcaaatatggtgaggctgtggacagtccaggatcaattgtctgcagtcaaaatcatatgtactttcttccgtctctcaccggtaaacatcagtgacacaaggtgtgtcacagccttcgcctcactgatgttgtcaccgtacagcactgtggtgtgtgcatgtgcagatgccctgctctctttgccccctgttgttccaggattttcatttgccattgcaagagcctattgccatatgcttgcaacagtgtcaccacaatcaccacttgaggtaagcagcatggttgcgatgcttggtaggctgaagcaagtaagtacgaccatggtccaccacccaggggtttagtgaccttgctgtggatgtcctagcagctttatcaaattgcaatcttgctgttcgaaagaatcttctgaacctgatggtgaggctcctcactccaaggaacatcagtgctgtgctattgctccttgataatgagctgaatagggctgctaacatccatatcgagtaccacaagatgctagaggaggcgatcagagaatgccatgctgcttttccggggtgtattgtagaattcacactagatcccaagtacagtgtgttcattgatagtattctgtacatcatagacatcatgaatcccgaccagtcgttgcgaggcccacttctgaaaggtctactaagggcgctccggcatgtgaagtcaccactggtatgcgccgctgctgtttgggccatctcaatgttctctggatcactggaagaggtcagtgatgccattgttgcactttcatgcttcttcaaggacctgcttgatcgacgtaagattgagaagctgatacttggaggagaagcggagaatcaatacaagctttctactgactattatggtgtcactgccggagatgcaacacagggaaagcaccagcagccatggctgatggagatggaggaactgctgtttgtgcgcatagggctcacacggcaagcaggtgggagctatgccattccttcgagttccaagagcagtgctagttcttcaaacgcgtatcttcctgagccattgggtaatacagacaatctgatcttcctcgtgcattctggagatgccctcttggcagatttcgtggaaatcatgctgtctaacctcaagaagaaggtcaaagagctggagtgatgctgatgagttcatttgatgtaataatttggaggtcaaataactagaaatggagtcgttgaaccttggccaatcgtacctcaatatgcataataatgctgtcttctgtgtgcttattacttctattattactatattatcactgatactttttctattcaacattttgccatctatttgtgtgacttgtgtggtctcatctagcctaccccaatctacatgagatcgaatatactctcatcgtggatggtatatatacacgtacttttgggaatat

SEQ ID NO: 16684 - DNA, 2401 bp, Zea Mays
gtcctgacccaccgcttctcctccgtgctgtccggtgctcctcgtcgggcgcttcgctgccgccttgcaattgcaacccacggcaaatgctgctcgacgatgagcgaggctagcaggagccacctcctcacctggatcgatggcggccgttcatctcggctaagatccaaatctcggcatcggcggcacccctcgactctccccacgcccctagccatcctaactgcgaccgtggatgaagatctcaaagaatcttggaggtgcagcgggatgacagcgtagggaggcccaatggtgtgatgtagcgagtcctaacggtgctcggatcggggcggatggcccccagtctcggcaggaggcttgtacaacatttgatcgatgagtcagtgggcctaaagaaaataaagcagcccaagatgatctccatcatgggaatccgtggctccggcaagaccgcacttgccacagaggtgcatgagagaagacaaacgtcaaacgcgtgatatagaccacgcgctacacacagtatcaccaagcccaaaacataccaaaaaaagttgaaccaagtggttgagaattccccttttgctctcatggccatggagaacactgcgccatgcggtgacttcgggaagatcgtggccgatcttgagtctgagaacttggtggctaacgtctctgccgtgaatcaagcctcggcgttgattgctggaggtaaaatccctgaaccccagcttctgtgccgcctgatcgctggtcttgcttccaatctggagaagcctgaccatgactctgccatcaagaggtgtgtttcctttactctaaaggcaatcagggtggccgtcatcaagaaccgcatgaacatggattcctcagctcgtggtgaggctctccatgccatctggtgttgttttatggatcaaggccttcgccgtattcagcgtgattcaaatatggtgaggctgtggacagtccaggatcaattgtctgcagtcaaaatcatatgtactttcttccgtctctcaccggtaaacatcagtgacacaaggtgtgtcacagccttcgcctcactgatgttgtcaccgtacagcactgtggtgtgtgcatgtgcagatgccctgctctctttgccccctgttgttccaggattttcatttgccattgcaagagcctattgccatatgcttgcaacagtgtcaccacaatcaccacttgaggtaagcagcatggttgcgatgcttggtaggctgaagcaagtaagtacgaccatggtccaccacccaggggtttagtgaccttgctgtggatgtcctagcagctttatcaaattgcaatcttgctgttcgaaagaatcttctgaacctgatggtgaggctcctcactccaaggaacatcagtgctgtgctattgctccttgataatgagctgaatagggctgctaacatccatatcgagtaccacaagatgctagaggaggcgatcagagaatgccatgctgcttttccggggtgtattgtagaattcacactagatcccaagtacagtgtgttcattgatagtattctgtacatcatagacatcatgaatcccgaccagtcgttgcgaggcccacttctgaaaggtctactaagggcgctccggcatgtgaagtcaccactggtatgcgccgctgctgtttgggccatctcaatgttctctggatcactggaagaggtcagtgatgccattgttgcactttcatgcttcttcaaggacctgcttgatcgacgtaagattgagaagctgatacttggaggagaagcggagaatcaatacaagctttctactgactattatggtgtcactgccggagatgcaacacagggaaagcaccagcagccatggctgatggagatggaggaactgctgtttgtgcgcatagggctcacacggcaagcaggtgggagctatgccattccttcgagttccaagagcagtgctagttcttcaaacgcgtatcttcctgagccattgggtaatacagacaatctgatcttcctcgtgcattctggagatgccctcttggcagatttcgtggaaatcatgctgtctaacctcaagaagaaggtcaaagagctggagtgatgctgatgagttcatttgatgtaataatttggaggtcaaataactagaaatggagtcgttgaaccttggccaatcgtacctcaatatgcataataatgctgtcttctgtgtgcttattacttctattattactatattatcactgatactttttctattcaacattttgccatctatttgtgtgacttgtgtggtctcatctagcctaccccaatctacatgagatcgaatatactctcatcgtggatggtatatatacacgtacttttgggaatat

SEQ ID NO: 16685 - DNA, 2880 bp, Zea Mays
gtcctgacccaccgcttctcctccgtgctgtccggtgctcctcgtcgggcgcttcgctgccgccttgcaattgcaacccacggcaaatgctgctcgacgatgagcgaggctagcaggagccacctcctcacctggatcgatggcggccgttcatctcggctaagatccaaatctcggcatcggcggcacccctcgactctccccacgcccctagccatcctaactgcgaccgtggatgaagatctcaaagaatcttggaggtgcagcgggatgacagcgtagggaggcccaatggtgtgatgtagcgagtcctaacggtgctcggatcggggcggatggcccccagtctcggcaggaggcttgtacaacatttgatcgatgagtcagtgggcctaaagaaaataaagcagcccaagatgatctccatcatgggaatccgtggctccggcaagaccgcacttgccacagaggtgcatgagaggtatgttggcttgcagttctacaggcgtgggtttcttctactgacaggctctaagaaaggtgcatttctttgaggaaattttaagcatactaccaaactctctttagtattcatggtttgtttaaattgccggctgcatattagcattgcatttctagattgaactacatagtagcattgcatttctagattgaactacataatgtaagctggctggatccaagaagctcctaaagcattgattattctttttcaggcatcttagactatctccagcagcttacccatccccatacccatattcaaactctactctgcgaacagcgcaatctatagtacaaaacagtgcttttgggtaaactatgggtagactgctgcagacggtcttaggacagagaaattcaataactccggacacaatttggataaaatgatgatcaacatggtcaacttttcatctgacagctgcaacctaaaagaagacaaacgtcaaacgcgtgatatagaccacgcgctacacacagtatcaccaagcccaaaacataccaaaaaaagttgaaccaagtggttgagaattccccttttgctctcatggccatggagaacactgcgccatgcggtgacttcgggaagatcgtggccgatcttgagtctgagaacttggtggctaacgtctctgccgtgaatcaagcctcggcgttgattgctggaggtaaaatccctgaaccccagcttctgtgccgcctgatcgctggtcttgcttccaatctggagaagcctgaccatgactctgccatcaagaggtgtgtttcctttactctaaaggcaatcagggtggccgtcatcaagaaccgcatgaacatggattcctcagctcgtggtgaggctctccatgccatctggtgttgttttatggatcaaggccttcgccgtattcagcgtgattcaaatatggtgaggctgtggacagtccaggatcaattgtctgcagtcaaaatcatatgtactttcttccgtctctcaccggtaaacatcagtgacacaaggtgtgtcacagccttcgcctcactgatgttgtcaccgtacagcactgtggtgtgtgcatgtgcagatgccctgctctctttgccccctgttgttccaggattttcatttgccattgcaagagcctattgccatatgcttgcaacagtgtcaccacaatcaccacttgaggtaagcagcatggttgcgatgcttggtaggctgaagcaagtaagtacgaccatggtccaccacccaggggtttagtgaccttgctgtggatgtcctagcagctttatcaaattgcaatcttgctgttcgaaagaatcttctgaacctgatggtgaggctcctcactccaaggaacatcagtgctgtgctattgctccttgataatgagctgaatagggctgctaacatccatatcgagtaccacaagatgctagaggaggcgatcagagaatgccatgctgcttttccggggtgtattgtagaattcacactagatcccaagtacagtgtgttcattgatagtattctgtacatcatagacatcatgaatcccgaccagtcgttgcgaggcccacttctgaaaggtctactaagggcgctccggcatgtgaagtcaccactggtatgcgccgctgctgtttgggccatctcaatgttctctggatcactggaagaggtcagtgatgccattgttgcactttcatgcttcttcaaggacctgcttgatcgacgtaagattgagaagctgatacttggaggagaagcggagaatcaatacaagctttctactgactattatggtgtcactgccggagatgcaacacagggaaagcaccagcagccatggctgatggagatggaggaactgctgtttgtgcgcatagggctcacacggcaagcaggtgggagctatgccattccttcgagttccaagagcagtgctagttcttcaaacgcgtatcttcctgagccattgggtaatacagacaatctgatcttcctcgtgcattctggagatgccctcttggcagatttcgtggaaatcatgctgtctaacctcaagaagaaggtcaaagagctggagtgatgctgatgagttcatttgatgtaataatttggaggtcaaataactagaaatggagtcgttgaaccttggccaatcgtacctcaatatgcataataatgctgtcttctgtgtgcttattacttctattattactatattatcactgatactttttctattcaacattttgccatctatttgtgtgacttgtgtggtctcatctagcctaccccaatctacatgagatcgaatatactctcatcgtggatggtatatatacacgtacttttgggaatat

SEQ ID NO: 16686 - DNA, 2420 bp, Zea Mays
tgccccccgtatagtcctgacccaccgcttctcctccgtgctgtccggtgctcctcgtcgggcgcttcgctgccgccttgcaattgcaacccacggcaaatgctgctcgacgatgagcgaggctagcaggagccacctcctcacctggatcgatggcggccgttcatctcggctaagatccaaatctcggcatcggcggcacccctcgactctccccacgcccctagccatcctaactgcgaccgtggatgaagatctcaaagaatcttggaggtgcagcgggatgacagcgtagggaggcccaatggtgtgatgtagcgagtcctaacggtgctcggatcggggcggatggcccccagtctcggcaggagggacaggcttgtacaacatttgatcgatgagtcagtgggcctaaagaaaataaagcagcccaagatgatctccatcatgggaatccgtggctccggcaagaccgcacttgccacagaggtgcatgagagaagacaaacgtcaaacgcgtgatatagaccacgcgctacacacagtatcaccaagcccaaaacataccaaaaaaagttgaaccaagtggttgagaattccccttttgctctcatggccatggagaacactgcgccatgcggtgacttcgggaagatcgtggccgatcttgagtctgagaacttggtggctaacgtctctgccgtgaatcaagcctcggcgttgattgctggaggtaaaatccctgaaccccagcttctgtgccgcctgatcgctggtcttgcttccaatctggagaagcctgaccatgactctgccatcaagaggtgtgtttcctttactctaaaggcaatcagggtggccgtcatcaagaaccgcatgaacatggattcctcagctcgtggtgaggctctccatgccatctggtgttgttttatggatcaaggccttcgccgtattcagcgtgattcaaatatggtgaggctgtggacagtccaggatcaattgtctgcagtcaaaatcatatgtactttcttccgtctctcaccggtaaacatcagtgacacaaggtgtgtcacagccttcgcctcactgatgttgtcaccgtacagcactgtggtgtgtgcatgtgcagatgccctgctctctttgccccctgttgttccaggattttcatttgccattgcaagagcctattgccatatgcttgcaacagtgtcaccacaatcaccacttgaggtaagcagcatggttgcgatgcttggtaggctgaagcaagtaagtacgaccatggtccaccacccaggggtttagtgaccttgctgtggatgtcctagcagctttatcaaattgcaatcttgctgttcgaaagaatcttctgaacctgatggtgaggctcctcactccaaggaacatcagtgctgtgctattgctccttgataatgagctgaatagggctgctaacatccatatcgagtaccacaagatgctagaggaggcgatcagagaatgccatgctgcttttccggggtgtattgtagaattcacactagatcccaagtacagtgtgttcattgatagtattctgtacatcatagacatcatgaatcccgaccagtcgttgcgaggcccacttctgaaaggtctactaagggcgctccggcatgtgaagtcaccactggtatgcgccgctgctgtttgggccatctcaatgttctctggatcactggaagaggtcagtgatgccattgttgcactttcatgcttcttcaaggacctgcttgatcgacgtaagattgagaagctgatacttggaggagaagcggagaatcaatacaagctttctactgactattatggtgtcactgccggagatgcaacacagggaaagcaccagcagccatggctgatggagatggaggaactgctgtttgtgcgcatagggctcacacggcaagcaggtgggagctatgccattccttcgagttccaagagcagtgctagttcttcaaacgcgtatcttcctgagccattgggtaatacagacaatctgatcttcctcgtgcattctggagatgccctcttggcagatttcgtggaaatcatgctgtctaacctcaagaagaaggtcaaagagctggagtgatgctgatgagttcatttgatgtaataatttggaggtcaaataactagaaatggagtcgttgaaccttggccaatcgtacctcaatatgcataataatgctgtcttctgtgtgcttattacttctattattactatattatcactgatactttttctattcaacattttgccatctatttgtgtgacttgtgtggtctcatctagcctaccccaatctacatgagatcgaatatactctcatcgtggatggtatatatacacgtacttttgggaatat

SEQ ID NO: 16687 - DNA, 2716 bp, Zea Mays
cttacctactattttaaaatttattctacaaataatatcaaaaagtgtcattcaattttacactgtccacccatgccccccgtatagtcctgacccaccgcttctcctccgtgctgtccggtgctcctcgtcgggcgcttcgctgccgccttgcaattgcaacccacggcaaatgctgctcgacgatgagcgaggctagcaggagccacctcctcacctggatcgatggcggccgttcatctcggctaagatccaaatctcggcatcggcggcacccctcgactctccccacgcccctagccatcctaactgcgaccgtggatgaagatctcaaagaatcttggaggtgcagcgggatgacagcgtagggaggcccaatggtgtgatgtagcgagtcctaacggtgctcggatcggggcggatggcccccagtctcggcaggagggacaggcttgtacaacatttgatcgatgagtcagtgggcctaaagaaaataaagcagcccaagatgatctccatcatgggaatccgtggctccggcaagaccgcacttgccacagaggtgcatgagaggcatcttagactatctccagcagcttacccatccccatacccatattcaaactctactctgcgaacagcgcaatctatagtacaaaacagtgcttttgggtaaactatgggtagactgctgcagacggtcttaggacagagaaattcaataactccggacacaatttggataaaatgatgatcaacatggtcaacttttcatctgacagctgcaacctaaaagaagacaaacgtcaaacgcgtgatatagaccacgcgctacacacagtatcaccaagcccaaaacataccaaaaaaagttgaaccaagtggttgagaattccccttttgctctcatggccatggagaacactgcgccatgcggtgacttcgggaagatcgtggccgatcttgagtctgagaacttggtggctaacgtctctgccgtgaatcaagcctcggcgttgattgctggaggtaaaatccctgaaccccagcttctgtgccgcctgatcgctggtcttgcttccaatctggagaagcctgaccatgactctgccatcaagaggtgtgtttcctttactctaaaggcaatcagggtggccgtcatcaagaaccgcatgaacatggattcctcagctcgtggtgaggctctccatgccatctggtgttgttttatggatcaaggccttcgccgtattcagcgtgattcaaatatggtgaggctgtggacagtccaggatcaattgtctgcagtcaaaatcatatgtactttcttccgtctctcaccggtaaacatcagtgacacaaggtgtgtcacagccttcgcctcactgatgttgtcaccgtacagcactgtggtgtgtgcatgtgcagatgccctgctctctttgccccctgttgttccaggattttcatttgccattgcaagagcctattgccatatgcttgcaacagtgtcaccacaatcaccacttgaggtaagcagcatggttgcgatgcttggtaggctgaagcaagtaagtacgaccatggtccaccacccaggggtttagtgaccttgctgtggatgtcctagcagctttatcaaattgcaatcttgctgttcgaaagaatcttctgaacctgatggtgaggctcctcactccaaggaacatcagtgctgtgctattgctccttgataatgagctgaatagggctgctaacatccatatcgagtaccacaagatgctagaggaggcgatcagagaatgccatgctgcttttccggggtgtattgtagaattcacactagatcccaagtacagtgtgttcattgatagtattctgtacatcatagacatcatgaatcccgaccagtcgttgcgaggcccacttctgaaaggtctactaagggcgctccggcatgtgaagtcaccactggtatgcgccgctgctgtttgggccatctcaatgttctctggatcactggaagaggtcagtgatgccattgttgcactttcatgcttcttcaaggacctgcttgatcgacgtaagattgagaagctgatacttggaggagaagcggagaatcaatacaagctttctactgactattatggtgtcactgccggagatgcaacacagggaaagcaccagcagccatggctgatggagatggaggaactgctgtttgtgcgcatagggctcacacggcaagcaggtgggagctatgccattccttcgagttccaagagcagtgctagttcttcaaacgcgtatcttcctgagccattgggtaatacagacaatctgatcttcctcgtgcattctggagatgccctcttggcagatttcgtggaaatcatgctgtctaacctcaagaagaaggtcaaagagctggagtgatgctgatgagttcatttgatgtaataatttggaggtcaaataactagaaatggagtcgttgaaccttggccaatcgtacctcaatatgcataataatgctgtcttctgtgtgcttattacttctattattactatattatcactgatactttttctattcaacattttgccatctatttgtgtgacttgtgtggtctcatctagcctaccccaatctacatgagatcgaatatactctcatcgtggatggtatatatacacgtacttttgggaatat

SEQ ID NO: 16688 - DNA, 731 bp, Zea Mays
tcctgacccaccgcttctcctccgtgctgtccggtgctcctcgtcgggcgcttcgctgccgccttgcaattgcaacccacggcaaatgctgctcgacgatgagcgaggctagcaggagccacctcctcacctggatcgatggcggccgttcatctcggctaagatccaaatctcggcatcggcggcacccctcgactctccccacgcccctagccatcctaactgcgaccgtggatgaagatctcaaagaatcttggaggtgcagcgggatgacagcgtagggaggcccaatggtgtgatgtagcgagtcctaacggtgctcggatcggggcggatggcccccagtctcggcaggaggcttgtacaacatttgatcgatgagtcagtgggcctaaagaaaataaagcagcccaagatgatctccatcatgggaatccgtggctccggcaagaccgcacttgccacagaggtgcatgagaggcatcttagactatctccagcagcttacccatccccatacccatattcaaactctactctgcgaacagcgcaatctatagtacaaaacagtgcttttgggtaaactatgggtagactgctgcagacggtcttaggacagagaaattcaataactccggacacaatttggataaaatgatgatcaacatggtcaacttttcatctgacagctgcaacctaaaagctcaccgcaaacgtaaatatttaatgct

SEQ ID NO: 16689 - DNA, 1890 bp, Zea Mays
tggataccttgatcttcctagaagttaggaacatataagtggtacactctgcttattgatttgtttgtgttttctcatggctggtttcatggtgtcactgagctgctctgtttttgaacccaaggcttagaagaacaaacaacacatgttcatggtagtaaggaagctagcctaaaatctggttcaaaccttgcatgcaacactcatgatgggataaatgaccactctggcacactaaagttgcaatcagctgggcaaagcacattgcttgaagtggatgagtacagtgaactgggaaacctttcctcagaagtatcagcaatatatcttgctatgcagcagtctaagttggagtgcattgatgaacagagtcaagattctacctcaacagaaggttatggtgaagctgaggagactgaagagtatgatgattttgacccctactcctttatcaaagatttacctgatttatctatggtggtccccaagtttcgtcctgttctccttccaaagcagacccggagttgtcctacgatgactcttgtacttgatcttgatggtatgaactattagctatatacacacttaaatagtcttcaatactgcatttaatagccttttatagccatttacacgagtatctgcaaccaaagctgcttattcatgttattcggttcaaaactgcagaatgtctgctgcctctacaatgcataagtttaaagcacgaatccatctatctaagactactaattagggaacaagcaagcactgatctaattttgttgtcttagtacaattttcttgcagctatgggctggtatgtgttataacaagataaactccagtgctccacatgttggctaaatctagcagaacagaaggcgatattatttttgcaggctgatgtatttgtacgatgaatatatcactatcatggtatttcagaactcagattcatcatggatgtagatcttggttatttatgtaaactagattgtttgctgtatggtagtaatctagcacttagtagtaccgaaacttccctagaaccatgctttggtccacaatgttggatttatttctctttctcttgtctaggttctattactactgccagtttgatataagttttaaagtatcattcatttcttatattgatgttaatttcatgtttgtcttgctacaatgtagagacacttgtacattcaactcttgaacactgtgaggatgctgatttcacatttccagttcattttaacttcagagagcacacaatatatgttcgatgccgcccctatctcaaggaattcttggatagggttgccagcgtgtttgagacaattattttcactgctagtcaaagcatttatgcggagcaacttctcaatgttcttgatcccaaaagaaagttgttccgtcatcgtgtttatcgtgaatcttgtgtctatgtggagggaaactacatgaaggatctgacagtacttggacgtgacttaactcgcgtaatgattgttgacaattctccgcaggcctttgggttccagttggacaatggcattcctatagaaagctggtttgatgatcccaatgacatggagctgctgaaattgctcccgttcttagaaagcttggtcggcgttgaagatgtcaggccttatatagcaaggaagttcaacctaagggagaagcatgtcaggatctcctggctccttgcattattgtatgctctaccgaccgcaatgtacaattttcgctgcagttggcagttgtagacttcacttgcattttgttggcccagttgacatgggaagggcctacttgaacattttgtcgatcagttaatatcgtgttgattcatatattgtctgcgacatgtgtgaaagtcgaccg

SEQ ID NO: 16690 - DNA, 2559 bp, Zea Mays
atgggagagagcgtttccagtcgctgcgctgcgcgtcattctcctcccctccttccacccggcaaaaaccccgcgtcggccactctccggaggcgactagggtttcagcccctgggacacgccgccggtcgtggcacctccgccaccggatcccggtacccgagctacgccatcgccgccccgcccccggtcaccgccggtgcgcttccgccgacaccagacgcagctcgtccgccccgtcacgtgcacctctgcgtgggcgcgggattggatagggtttggggtttcggcggctggcgccaaatcccaccgctgctgctcgcgcaggaggtctcgagccctcggggttcccctactccgctccggctggagttctcgatgaaacttgttctacagtgttcttctgttgcatgactcagttgttttgagttatacttcataataacaatgcaaacacgaaaaaagggtgctgcaaaaaatgcagtggggtatcatgccaatcctaagacaagtaggccatccagaagggcaactcaatctacagttgctgaaaagaaagtatctgatctcatcacgtcttcttccaagaagcagagacctgttggtgtcacttccaagaagcattctaaaggaggaaggaagctgctagtttcatgtgatacaactgatgctggaaatgatgcacctcaggcccagcattctgatggtgttgcagatgatcgtcccaacgattccatattctctccaacataccatcatcacaaggaaggtggtgtgaataacctatccaaaggcttagaagaacaaacaacacatgttcatggtagtaaggaagctagcctaaaatctggttcaaaccttgcatgcaacactcatgatgggataaatgaccactctggcacactaaagttgcaatcagctgggcaaagcacattgcttgaagtggatgagtacagtgaactgggaaacctttcctcagaagtatcagcaatatatcttgctatgcagcagtctaagttggagtgcattgatgaacagagtcaagattctacctcaacagaaggttatggtgaagctgaggagactgaagagtatgatgattttgacccctactcctttatcaaagatttacctgatttatctatggtggtccccaagtttcgtcctgttctccttccaaagcagacccggagttgtcctacgatgactcttgtacttgatcttgatggtatgaactattagctatatacacacttaaatagtcttcaatactgcatttaatagccttttatagccatttacacgagtatctgcaaccaaagctgcttattcatgttattcggttcaaaactgcagaatgtctgctgcctctacaatgcataagtttaaagcacgaatccatctatctaagactactaattagggaacaagcaagcactgatctaattttgttgtcttagtacaattttcttgcagctatgggctggtatgtgttataacaagataaactccagtgctccacatgttggctaaatctagcagaacagaaggcgatattatttttgcaggctgatgtatttgtacgatgaatatatcactatcatggtatttcagaactcagattcatcatggatgtagatcttggttatttatgtaaactagattgtttgctgtatggtagtaatctagcacttagtagtaccgaaacttccctagaaccatgctttggtccacaatgttggatttatttctctttctcttgtctaggttctattactactgccagtttgatataagttttaaagtatcattcatttcttatattgatgttaatttcatgtttgtcttgctacaatgtagagacacttgtacattcaactcttgaacactgtgaggatgctgatttcacatttccagttcattttaacttcagagagcacacaatatatgttcgatgccgcccctatctcaaggaattcttggatagggttgccagcgtgtttgagacaattattttcactgctagtcaaagcatttatgcggagcaacttctcaatgttcttgatcccaaaagaaagttgttccgtcatcgtgtttatcgtgaatcttgtgtctatgtggagggaaactacatgaaggatctgacagtacttggacgtgacttaactcgcgtaatgattgttgacaattctccgcaggcctttgggttccagttggacaatggcattcctatagaaagctggtttgatgatcccaatgacatggagctgctgaaattgctcccgttcttagaaagcttggtcggcgttgaagatgtcaggccttatatagcaaggaagttcaacctaagggagaagcatgtcaggatctcctggctccttgcattattgtatgctctaccgaccgcaatgtacaattttcgctgcagttggcagttgtagacttcacttgcattttgttggcccagttgacatgggaagggcctacttgaacattttgtcgatcagttaatatcgtgttgattcatatattgtctgcgacatgtgtgaaagtcgaccg

SEQ ID NO: 16691 - DNA, 2371 bp, Zea Mays
atgggagagagcgtttccagtcgctgcgctgcgcgtcattctcctcccctccttccacccggcaaaaaccccgcgtcggccactctccggaggcgactagggtttcagcccctgggacacgccgccggtcgtggcacctccgccaccggatcccggtacccgagctacgccatcgccgccccgcccccggtcaccgccggtgcgcttccgccgacaccagacgcagctcgtccgccccgtcacgtgcacctctgcgtgggcgcgggattggatagggtttggggtttcggcggctggcgccaaatcccaccgctgctgctcgcgcaggaggtctcgagccctcggggttcccctactccgctccggctggagttctcgatgaaacttgttctacagtgttcttctgttgcatgactcagttgttttgagttatacttcataataacaatgcaaacacgaaaaaagggtgctgcaaaaaatgcagtggggtatcatgccaatcctaagacaagtaggccatccagaagggcaactcaatctacagttgctgaaaagaaagtatctgatctcatcacgtcttcttccaagaagcagagacctgttggtgtcacttccaagaagcattctaaaggaggaaggaagctgctagtttcatgtgatacaactgatgctggaaatgatgcacctcaggcccagcattctgatggtgttgcagatgatcgtcccaacgattccatattctctccaacataccatcatcacaaggaaggtggtgtgaataacctatccaaaggcttagaagaacaaacaacacatgttcatggtagtaaggaagctagcctaaaatctggttcaaaccttgcatgcaacactcatgatgggataaatgaccactctggcacactaaagttgcaatcagctgggcaaagcacattgcttgaagtggatgagtacagtgaactgggaaacctttcctcagaagtatcagcaatatatcttgctatgcagcagtctaagttggagtgcattgatgaacagagtcaagattctacctcaacagaaggttatggtgaagctgaggagactgaagagtatgatgattttgacccctactcctttatcaaagatttacctgatttatctatggtggtccccaagtttcgtcctgttctccttccaaagcagacccggagttgtcctacgatgactcttgtacttgatcttgatggtatgaactattagctatatacacacttaaatagtcttcaatactgcatttaatagccttttatagccatttacacgagtatctgcaaccaaagctgcttattcatgttattcggttcaaaactgcagaatgtctgctgcctctacaatgcataagtttaaagcacgaatccatctatctaagactactaattagggaacaagcaagcactgatctaattttgttgtcttagtacaattttcttgcagctatgggctggtatgtgttataacaagataaactccagtgctccacatgttggctaaatctagcagaacagaaggcgatattatttttgcaggctgatgtatttgtacgatgaatatatcactatcatgagacacttgtacattcaactcttgaacactgtgaggatgctgatttcacatttccagttcattttaacttcagagagcacacaatatatgttcgatgccgcccctatctcaaggaattcttggatagggttgccagcgtgtttgagacaattattttcactgctagtcaaagcatttatgcggagcaacttctcaatgttcttgatcccaaaagaaagttgttccgtcatcgtgtttatcgtgaatcttgtgtctatgtggagggaaactacatgaaggatctgacagtacttggacgtgacttaactcgcgtaatgattgttgacaattctccgcaggcctttgggttccagttggacaatggcattcctatagaaagctggtttgatgatcccaatgacatggagctgctgaaattgctcccgttcttagaaagcttggtcggcgttgaagatgtcaggccttatatagcaaggaagttcaacctaagggagaaggtgccaaaggtcgccgtgatgataaatgtaggaccggagctgatatagtggttcttgttgaatgtagcatgtcaggatctcctggctccttgcattattgtatgctctaccgaccgcaatgtacaattttcgctgcagttggcagttgtagacttcacttgcattttgttggcccagttgacatgggaagggcctacttgaacattttgtcgatcagttaatatcgtgttgattcatatattgtctgcgacatgtgtgaaagtcgaccg

SEQ ID NO: 16692 - DNA, 2008 bp, Zea Mays
atgggagagagcgtttccagtcgctgcgctgcgcgtcattctcctcccctccttccacccggcaaaaaccccgcgtcggccactctccggaggcgactagggtttcagcccctgggacacgccgccggtcgtggcacctccgccaccggatcccggtacccgagctacgccatcgccgccccgcccccggtcaccgccggtgcgcttccgccgacaccagacgcagctcgtccgccccgtcacgtgcacctctgcgtgggcgcgggattggatagggtttggggtttcggcggctggcgccaaatcccaccgctgctgctcgcgcaggaggtctcgagccctcggggttcccctactccgctccggctggagttctcgatgaaacttgttctacagtgttcttctgttgcatgactcagttgttttgagttatacttcataataacaatgcaaacacgaaaaaagggtgctgcaaaaaatgcagtggggtatcatgccaatcctaagacaagtaggccatccagaagggcaactcaatctacagttgctgaaaagaaagtatctgatctcatcacgtcttcttccaagaagcagagacctgttggtgtcacttccaagaagcattctaaaggaggaaggaagctgctagtttcatgtgatacaactgatgctggaaatgatgcacctcaggcccagcattctgatggtgttgcagatgatcgtcccaacgattccatattctctccaacataccatcatcacaaggaaggtggtgtgaataacctatccaaaggcttagaagaacaaacaacacatgttcatggtagtaaggaagctagcctaaaatctggttcaaaccttgcatgcaacactcatgatgggataaatgaccactctggcacactaaagttgcaatcagctgggcaaagcacattgcttgaagtggatgagtacagtgaactgggaaacctttcctcagaagtatcagcaatatatcttgctatgcagcagtctaagttggagtgcattgatgaacagagtcaagattctacctcaacagaaggttatggtgaagctgaggagactgaagagtatgatgattttgacccctactcctttatcaaagatttacctgatttatctatggtggtccccaagtttcgtcctgttctccttccaaagcagacccggagttgtcctacgatgactcttgtacttgatcttgatgttcattttaacttcagagagcacacaatatatgttcgatgccgcccctatctcaaggaattcttggatagggttgccagcgtgtttgagacaattattttcactgctagtcaaagcatttatgcggagcaacttctcaatgttcttgatcccaaaagaaagttgttccgtcatcgtgtttatcgtgaatcttgtgtctatgtggagggaaactacatgaaggatctgacagtacttggacgtgacttaactcgcgtaatgattgttgacaattctccgcaggcctttgggttccagttggacaatggcattcctatagaaagctggtttgatgatcccaatgacatggagctgctgaaattgctcccgttcttagaaagcttggtcggcgttgaagatgtcaggccttatatagcaaggaagttcaacctaagggagaaggtagccaccgcatcttctcttacaatagacatgcagatgtgatccgtccaatgctgccaggtatttttcaggtgccaaaggtcgccgtgatgataaatgtaggaccggagctgatatagtggttcttgttgaatgtagcatgtcaggatctcctggctccttgcattattgtatgctctaccgaccgcaatgtacaattttcgctgcagttggcagttgtagacttcacttgcattttgttggcccagttgacatgggaagggcctacttgaacattttgtcgatcagttaatatcgtgttgattcatatattgtctgcgacatgtgtgaaagtcgaccg

SEQ ID NO: 16693 - DNA, 2656 bp, Zea Mays
atgggagagagcgtttccagtcgctgcgctgcgcgtcattctcctcccctccttccacccggcaaaaaccccgcgtcggccactctccggaggcgactagggtttcagcccctgggacacgccgccggtcgtggcacctccgccaccggatcccggtacccgagctacgccatcgccgccccgcccccggtcaccgccggtgcgcttccgccgacaccagacgcagctcgtccgccccgtcacgtgcacctctgcgtgggcgcgggattggatagggtttggggtttcggcggctggcgccaaatcccaccgctgctgctcgcgcaggaggtctcgagccctcggggttcccctactccgctccggctggagttctcgatgaaacttgttctacagtgttcttctgttgcatgactcagttgttttgagttatacttcataataacaatgcaaacacgaaaaaagggtgctgcaaaaaatgcagtggggtatcatgccaatcctaagacaagtaggccatccagaagggcaactcaatctacagttgctgaaaagaaagtatctgatctcatcacgtcttcttccaagaagcagagacctgttggtgtcacttccaagaagcattctaaaggaggaaggaagctgctagtttcatgtgatacaactgatgctggaaatgatgcacctcaggtaccccctagcgtcttccctgatctgcaggcccagcattctgatggtgttgcagatgatcgtcccaacgattccatattctctccaacataccatcatcacaaggaaggtggtgtgaataacctatccaaaggcttagaagaacaaacaacacatgttcatggtagtaaggaagctagcctaaaatctggttcaaaccttgcatgcaacactcatgatgggataaatgaccactctggcacactaaagttgcaatcagctgggcaaagcacattgcttgaagtggatgagtacagtgaactgggaaacctttcctcagaagtatcagcaatatatcttgctatgcagcagtctaagttggagtgcattgatgaacagagtcaagattctacctcaacagaaggttatggtgaagctgaggagactgaagagtatgatgattttgacccctactcctttatcaaagatttacctgatttatctatggtggtccccaagtttcgtcctgttctccttccaaagcagacccggagttgtcctacgatgactcttgtacttgatcttgatggtatgaactattagctatatacacacttaaatagtcttcaatactgcatttaatagccttttatagccatttacacgagtatctgcaaccaaagctgcttattcatgttattcggttcaaaactgcagaatgtctgctgcctctacaatgcataagtttaaagcacgaatccatctatctaagactactaattagggaacaagcaagcactgatctaattttgttgtcttagtacaattttcttgcagctatgggctggtatgtgttataacaagataaactccagtgctccacatgttggctaaatctagcagaacagaaggcgatattatttttgcaggctgatgtatttgtacgatgaatatatcactatcatggtatttcagaactcagattcatcatggatgtagatcttggttatttatgtaaactagattgtttgctgtatggtagtaatctagcacttagtagtaccgaaacttccctagaaccatgctttggtccacaatgttggatttatttctctttctcttgtctaggttctattactactgccagtttgatataagttttaaagtatcattcatttcttatattgatgttaatttcatgtttgtcttgctacaatgtagagacacttgtacattcaactcttgaacactgtgaggatgctgatttcacatttccagttcattttaacttcagagagcacacaatatatgttcgatgccgcccctatctcaaggaattcttggatagggttgccagcgtgtttgagacaattattttcactgctagtcaaagcatttatgcggagcaacttctcaatgttcttgatcccaaaagaaagttgttccgtcatcgtgtttatcgtgaatcttgtgtctatgtggagggaaactacatgaaggatctgacagtacttggacgtgacttaactcgcgtaatgattgttgacaattctccgcaggcctttgggttccagttggacaatggcattcctatagaaagctggtttgatgatcccaatgacatggagctgctgaaattgctcccgttcttagaaagcttggtcggcgttgaagatgtcaggccttatatagcaaggaagttcaacctaagggagaaggtgccaaaggtcgccgtgatgataaatgtaggaccggagctgatatagtggttcttgttgaatgtagcatgtcaggatctcctggctccttgcattattgtatgctctaccgaccgcaatgtacaattttcgctgcagttggcagttgtagacttcacttgcattttgttggcccagttgacatgggaagggcctacttgaacattttgtcgatcagttaatatcgtgttgattcatatattgtctgcgacatgtgtgaaagtcgaccg

SEQ ID NO: 16694 - DNA, 1839 bp, Zea Mays
atgggagagagcgtttccagtcgctgcgctgcgcgtcattctcctcccctccttccacccggcaaaaaccccgcgtcggccactctccggaggcgactagggtttcagcccctgggacacgccgccggtcgtggcacctccgccaccggatcccggtacccgagctacgccatcgccgccccgcccccggtcaccgccggtgcgcttccgccgacaccagacgcagctcgtccgccccgtcacgtgcacctctgcgtgggcgcgggattggatagggtttggggtttcggcggctggcgccaaatcccaccgctgctgctcgcgcaggaggtctcgagccctcggggttcccctactccgctccggctggagttctcgatgaaacttgttctacagtgttcttctgttgcatgactcagttgttttgagttatacttcataataacaatgcaaacacgaaaaaagggtgctgcaaaaaatgcagtggggtatcatgccaatcctaagacaagtaggccatccagaagggcaactcaatctacagttgctgaaaagaaagtatctgatctcatcacgtcttcttccaagaagcagagacctgttggtgtcacttccaagaagcattctaaaggaggaaggaagctgctagtttcatgtgatacaactgatgctggaaatgatgcacctcaggcccagcattctgatggtgttgcagatgatcgtcccaacgattccatattctctccaacataccatcatcacaaggaaggtggtgtgaataacctatccaaaggcttagaagaacaaacaacacatgttcatggtagtaaggaagctagcctaaaatctggttcaaaccttgcatgcaacactcatgatgggataaatgaccactctggcacactaaagttgcaatcagctgggcaaagcacattgcttgaagtggatgaagtcaagattctacctcaacagaaggttatggtgaagctgaggagactgaagagtatgatgattttgacccctactcctttatcaaagatttacctgatttatctatggtggtccccaagtttcgtcctgttctccttccaaagcagacccggagttgtcctacgatgactcttgtacttgatcttgatgagacacttgtacattcaactcttgaacactgtgaggatgctgatttcacatttccagttcattttaacttcagagagcacacaatatatgttcgatgccgcccctatctcaaggaattcttggatagggttgccagcgtgtttgagacaattattttcactgctagtcaaagcatttatgcggagcaacttctcaatgttcttgatcccaaaagaaagttgttccgtcatcgtgtttatcgtgaatcttgtgtctatgtggagggaaactacatgaaggatctgacagtacttggacgtgacttaactcgcgtaatgattgttgacaattctccgcaggcctttgggttccagttggacaatggcattcctatagaaagctggtttgatgatcccaatgacatggagctgctgaaattgctcccgttcttagaaagcttggtcggcgttgaagatgtcaggccttatatagcaaggaagttcaacctaagggagaagcatgtcaggatctcctggctccttgcattattgtatgctctaccgaccgcaatgtacaattttcgctgcagttggcagttgtagacttcacttgcattttgttggcccagttgacatgggaagggcctacttgaacattttgtcgatcagttaatatcgtgttgattcatatattgtctgcgacatgtgtgaaagtcgaccg

SEQ ID NO: 16695 - DNA, 1906 bp, Zea Mays
atgggagagagcgtttccagtcgctgcgctgcgcgtcattctcctcccctccttccacccggcaaaaaccccgcgtcggccactctccggaggcgactagggtttcagcccctgggacacgccgccggtcgtggcacctccgccaccggatcccggtacccgagctacgccatcgccgccccgcccccggtcaccgccggtgcgcttccgccgacaccagacgcagctcgtccgccccgtcacgtgcacctctgcgtgggcgcgggattggatagggtttggggtttcggcggctggcgccaaatcccaccgctgctgctcgcgcaggaggtctcgagccctcggggttcccctactccgctccggctggagttctcgatgaaacttgttctacagtgttcttctgttgcatgactcagttgttttgagttatacttcataataacaatgcaaacacgaaaaaagggtgctgcaaaaaatgcagtggggtatcatgccaatcctaagacaagtaggccatccagaagggcaactcaatctacagttgctgaaaagaaagtatctgatctcatcacgtcttcttccaagaagcagagacctgttggtgtcacttccaagaagcattctaaaggaggaaggaagctgctagtttcatgtgatacaactgatgctggaaatgatgcacctcaggcccagcattctgatggtgttgcagatgatcgtcccaacgattccatattctctccaacataccatcatcacaaggaaggtggtgtgaataacctatccaaaggcttagaagaacaaacaacacatgttcatggtagtaaggaagctagcctaaaatctggttcaaaccttgcatgcaacactcatgatgggataaatgaccactctggcacactaaagttgcaatcagctgggcaaagcacattgcttgaagtggatgaagtcaagattctacctcaacagaaggttatggtgaagctgaggagactgaagagtatgatgattttgacccctactcctttatcaaagatttacctgatttatctatggtggtccccaagtttcgtcctgttctccttccaaagcagacccggagttgtcctacgatgactcttgtacttgatcttgatgagacacttgtacattcaactcttgaacactgtgaggatgctgatttcacatttccagttcattttaacttcagagagcacacaatatatgttcgatgccgcccctatctcaaggaattcttggatagggttgccagcgtgtttgagacaattattttcactgctagtcaaagcatttatgcggagcaacttctcaatgttcttgatcccaaaagaaagttgttccgtcatcgtgtttatcgtgaatcttgtgtctatgtggagggaaactacatgaaggatctgacagtacttggacgtgacttaactcgcgtaatgattgttgacaattctccgcaggcctttgggttccagttggacaatggcattcctatagaaagctggtttgatgatcccaatgacatggagctgctgaaattgctcccgttcttagaaagcttggtcggcgttgaagatgtcaggccttatatagcaaggaagttcaacctaagggagaaggtgccaaaggtcgccgtgatgataaatgtaggaccggagctgatatagtggttcttgttgaatgtagcatgtcaggatctcctggctccttgcattattgtatgctctaccgaccgcaatgtacaattttcgctgcagttggcagttgtagacttcacttgcattttgttggcccagttgacatgggaagggcctacttgaacattttgtcgatcagttaatatcgtgttgattcatatattgtctgcgacatgtgtgaaagtcgaccg

SEQ ID NO: 16696 - DNA, 2626 bp, Zea Mays
atgggagagagcgtttccagtcgctgcgctgcgcgtcattctcctcccctccttccacccggcaaaaaccccgcgtcggccactctccggaggcgactagggtttcagcccctgggacacgccgccggtcgtggcacctccgccaccggatcccggtacccgagctacgccatcgccgccccgcccccggtcaccgccggtgcgcttccgccgacaccagacgcagctcgtccgccccgtcacgtgcacctctgcgtgggcgcgggattggatagggtttggggtttcggcggctggcgccaaatcccaccgctgctgctcgcgcaggaggtctcgagccctcggggttcccctactccgctccggctggagttctcgatgaaacttgttctacagtgttcttctgttgcatgactcagttgttttgagttatacttcataataacaatgcaaacacgaaaaaagggtgctgcaaaaaatgcagtggggtatcatgccaatcctaagacaagtaggccatccagaagggcaactcaatctacagttgctgaaaagaaagtatctgatctcatcacgtcttcttccaagaagcagagacctgttggtgtcacttccaagaagcattctaaaggaggaaggaagctgctagtttcatgtgatacaactgatgctggaaatgatgcacctcaggcccagcattctgatggtgttgcagatgatcgtcccaacgattccatattctctccaacataccatcatcacaaggaaggtggtgtgaataacctatccaaaggcttagaagaacaaacaacacatgttcatggtagtaaggaagctagcctaaaatctggttcaaaccttgcatgcaacactcatgatgggataaatgaccactctggcacactaaagttgcaatcagctgggcaaagcacattgcttgaagtggatgagtacagtgaactgggaaacctttcctcagaagtatcagcaatatatcttgctatgcagcagtctaagttggagtgcattgatgaacagagtcaagattctacctcaacagaaggttatggtgaagctgaggagactgaagagtatgatgattttgacccctactcctttatcaaagatttacctgatttatctatggtggtccccaagtttcgtcctgttctccttccaaagcagacccggagttgtcctacgatgactcttgtacttgatcttgatggtatgaactattagctatatacacacttaaatagtcttcaatactgcatttaatagccttttatagccatttacacgagtatctgcaaccaaagctgcttattcatgttattcggttcaaaactgcagaatgtctgctgcctctacaatgcataagtttaaagcacgaatccatctatctaagactactaattagggaacaagcaagcactgatctaattttgttgtcttagtacaattttcttgcagctatgggctggtatgtgttataacaagataaactccagtgctccacatgttggctaaatctagcagaacagaaggcgatattatttttgcaggctgatgtatttgtacgatgaatatatcactatcatggtatttcagaactcagattcatcatggatgtagatcttggttatttatgtaaactagattgtttgctgtatggtagtaatctagcacttagtagtaccgaaacttccctagaaccatgctttggtccacaatgttggatttatttctctttctcttgtctaggttctattactactgccagtttgatataagttttaaagtatcattcatttcttatattgatgttaatttcatgtttgtcttgctacaatgtagagacacttgtacattcaactcttgaacactgtgaggatgctgatttcacatttccagttcattttaacttcagagagcacacaatatatgttcgatgccgcccctatctcaaggaattcttggatagggttgccagcgtgtttgagacaattattttcactgctagtcaaagcatttatgcggagcaacttctcaatgttcttgatcccaaaagaaagttgttccgtcatcgtgtttatcgtgaatcttgtgtctatgtggagggaaactacatgaaggatctgacagtacttggacgtgacttaactcgcgtaatgattgttgacaattctccgcaggcctttgggttccagttggacaatggcattcctatagaaagctggtttgatgatcccaatgacatggagctgctgaaattgctcccgttcttagaaagcttggtcggcgttgaagatgtcaggccttatatagcaaggaagttcaacctaagggagaaggtgccaaaggtcgccgtgatgataaatgtaggaccggagctgatatagtggttcttgttgaatgtagcatgtcaggatctcctggctccttgcattattgtatgctctaccgaccgcaatgtacaattttcgctgcagttggcagttgtagacttcacttgcattttgttggcccagttgacatgggaagggcctacttgaacattttgtcgatcagttaatatcgtgttgattcatatattgtctgcgacatgtgtgaaagtcgaccg

SEQ ID NO: 16697 - DNA, 2035 bp, Zea Mays
atgggagagagcgtttccagtcgctgcgctgcgcgtcattctcctcccctccttccacccggcaaaaaccccgcgtcggccactctccggaggcgactagggtttcagcccctgggacacgccgccggtcgtggcacctccgccaccggatcccggtacccgagctacgccatcgccgccccgcccccggtcaccgccggtgcgcttccgccgacaccagacgcagctcgtccgccccgtcacgtgcacctctgcgtgggcgcgggattggatagggtttggggtttcggcggctggcgccaaatcccaccgctgctgctcgcgcaggaggtctcgagccctcggggttcccctactccgctccggctggagttctcgatgaaacttgttctacagtgttcttctgttgcatgactcagttgttttgagttatacttcataataacaatgcaaacacgaaaaaagggtgctgcaaaaaatgcagtggggtatcatgccaatcctaagacaagtaggccatccagaagggcaactcaatctacagttgctgaaaagaaagtatctgatctcatcacgtcttcttccaagaagcagagacctgttggtgtcacttccaagaagcattctaaaggaggaaggaagctgctagtttcatgtgatacaactgatgctggaaatgatgcacctcaggtaccccctagcgtcttccctgatctgcaggcccagcattctgatggtgttgcagatgatcgtcccaacgattccatattctctccaacataccatcatcacaaggaaggtggtgtgaataacctatccaaaggcttagaagaacaaacaacacatgttcatggtagtaaggaagctagcctaaaatctggttcaaaccttgcatgcaacactcatgatgggataaatgaccactctggcacactaaagttgcaatcagctgggcaaagcacattgcttgaagtggatgagtacagtgaactgggaaacctttcctcagaagtatcagcaatatatcttgctatgcagcagtctaagttggagtgcattgatgaacagagtcaagattctacctcaacagaaggttatggtgaagctgaggagactgaagagtatgatgattttgacccctactcctttatcaaagatttacctgatttatctatggtggtccccaagtttcgtcctgttctccttccaaagcagacccggagttgtcctacgatgactcttgtacttgatcttgatgagacacttgtacattcaactcttgaacactgtgaggatgctgatttcacatttccagttcattttaacttcagagagcacacaatatatgttcgatgccgcccctatctcaaggaattcttggatagggttgccagcgtgtttgagacaattattttcactgctagtcaaagcatttatgcggagcaacttctcaatgttcttgatcccaaaagaaagttgttccgtcatcgtgtttatcgtgaatcttgtgtctatgtggagggaaactacatgaaggatctgacagtacttggacgtgacttaactcgcgtaatgattgttgacaattctccgcaggcctttgggttccagttggacaatggcattcctatagaaagctggtttgatgatcccaatgacatggagctgctgaaattgctcccgttcttagaaagcttggtcggcgttgaagatgtcaggccttatatagcaaggaagttcaacctaagggagaaggtatttttcaggtgccaaaggtcgccgtgatgataaatgtaggaccggagctgatatagtggttcttgttgaatgtagcatgtcaggatctcctggctccttgcattattgtatgctctaccgaccgcaatgtacaattttcgctgcagttggcagttgtagacttcacttgcattttgttggcccagttgacatgggaagggcctacttgaacattttgtcgatcagttaatatcgtgttgattcatatattgtctgcgacatgtgtgaaagtcgaccg

SEQ ID NO: 16698 - DNA, 2222 bp, Zea Mays
atgggagagagcgtttccagtcgctgcgctgcgcgtcattctcctcccctccttccacccggcaaaaaccccgcgtcggccactctccggaggcgactagggtttcagcccctgggacacgccgccggtcgtggcacctccgccaccggatcccggtacccgagctacgccatcgccgccccgcccccggtcaccgccggtgcgcttccgccgacaccagacgcagctcgtccgccccgtcacgtgcacctctgcgtgggcgcgggattggatagggtttggggtttcggcggctggcgccaaatcccaccgctgctgctcgcgcaggaggtctcgagccctcggggttcccctactccgctccggctggagttctcgatgaaacttgttctacagtgttcttctgttgcatgactcagttgttttgagttatacttcataataacaatgcaaacacgaaaaaagggtgctgcaaaaaatgcagtggggtatcatgccaatcctaagacaagtaggccatccagaagggcaactcaatctacagttgctgaaaagaaagtatctgatctcatcacgtcttcttccaagaagcagagacctgttggtgtcacttccaagaagcattctaaaggaggaaggaagctgctagtttcatgtgatacaactgatgctggaaatgatgcacctcaggcccagcattctgatggtgttgcagatgatcgtcccaacgattccatattctctccaacataccatcatcacaaggaaggtggtgtgaataacctatccaaaggcttagaagaacaaacaacacatgttcatggtagtaaggaagctagcctaaaatctggttcaaaccttgcatgcaacactcatgatgggataaatgaccactctggcacactaaagttgcaatcagctgggcaaagcacattgcttgaagtggatgagtacagtgaactgggaaacctttcctcagaagtatcagcaatatatcttgctatgcagcagtctaagttggagtgcattgatgaacagagtcaagattctacctcaacagaaggttatggtgaagctgaggagactgaagagtatgatgattttgacccctactcctttatcaaagatttacctgatttatctatggtggtccccaagtttcgtcctgttctccttccaaagcagacccggagttgtcctacgatgactcttgtacttgatcttgatggtatgaactattagctatatacacacttaaatagtcttcaatactgcatttaatagccttttatagccatttacacgagtatctgcaaccaaagctgcttattcatgttattcggttcaaaactgcagaatgtctgctgcctctacaatgcataagtttaaagcacgaatccatctatctaagactactaattagggaacaagcaagcactgatctaattttgttgtcttagtacaattttcttgcagctatgggctggtatgtgttataacaagataaactccagtgctccacatgttggctaaatctagcagaacagaaggcgatattatttttgcaggctgatgtatttgtacgatgaatatatcactatcatggtatttcagaactcagattcatcatggatgtagatcttggttatttatgtaaactagattgtttgctgtatggtagtaatctagcacttagtagtaccgaaacttccctagaaccatgctttggtccacaatgttggatttatttctctttctcttgtctaggttctattactactgccagtttgatataagttttaaagtatcattcatttcttatattgatgttaatttcatgtttgtcttgctacaatgtagagacacttgtacattcaactcttgaacactgtgaggatgctgatttcacatttccagttcattttaacttcagagagcacacaatatatgttcgatgccgcccctatctcaaggaattcttggatagggttgccagcgtgtttgagacaattattttcactgctagtcaaagcatttatgcggagcaacttctcaatgttcttgatcccaaaagaaagttgttccgtcatcgtgtttatcgtgaatcttgtgtctatgtggagggaaactacatgaaggatctgacagtacttggacgtgacttaactcgcgtaatgattgttgacaattctccgcaggatttaaatgtaaagccgctttcc

SEQ ID NO: 16699 - DNA, 606 bp, Zea Mays
tcgccgtagcccctgccgttgacaggagagctcatcgtagctgagcagcgcgcgcaccagagatagggacgagcaggaggaggatccacccgtgcctgccagtcgttggagcctgtgcacgccagagacagggaggagaaggagagacacactcaagcagggatggtggagcaggccaccgccggagaagagggctagggagtgcgccgcgccggagaacaatcaggccacgctgctagagatccgcctgcattgcgcacgccttggacccacgcgccgcgtacaccgaggtcggcccgtgctgccgcatgctgagatctacgcgcgtcgcgctcgccggggatccgcctgcacacacctgggattcgccgtgcagcacacgtcggagacccgtccgcgccgcgccgcctgggacacccgcgccgttccccttgggacccgcccgcatcgctgcgtgccggagaagggcccaccctcgttgcacgccggtgaaggttgttgaaactgccgcacgcgaagaagggagaggtggagagcgatggaccagccgctgccagcgaacctggaagcgtgctcgcgtgtgattcgatttgggaagagaattac

SEQ ID NO: 16700 - DNA, 71 bp, Zea Mays
gtccaagatacaaacaacagtcccagtttcaactagaaaattcagcggcacatgcaacaacaaatgttcag

SEQ ID NO: 16701 - DNA, 376 bp, Zea Mays
catgaatctgctcacatatccaactgagaaagctaaatcaggttggtcttgcatcaggagaggggaattacactgatatcgtcagggaggctcagagaaacatcaagcttcctaacgtagttcttgtagacgcgataggattgcccctccgcgacgaccaactacacctctccacagaagcccaactccggctgggtgacatgctcggacaagcctttttgaaatttaactcgtccatggattcgagacaatgacatcgatattataccggtactggacctgttgttgggtgtagagctaaatgacaaataccattcttttggaatgttccattgtaaagtgtagagcattgtacaagaggagtgagttctgtcca

SEQ ID NO: 16702 - DNA, 824 bp, Zea Mays
ccgcgactggcggtcactggcaaaagcgaaacgtccaagtcaaccaacgaggcaacgacgcgggcaaagcggcataggggaagcgagaagcccaaccaccgagccctcgcctcaaaatccagctgccacgccgagcccaagctcccaatcgccatgaagccggcggcgcggcggccgctgctgctgtgcgcgctggcggcggcggcggcgctctccatcctgctggtcgcgccgccgcctctcgccgcgcacctatcatcactgctcctcgccttcccggcgtcgccctacgcgggcgggcccaagctggtggtcctcctcgccggccagtccaatatggcaggccgcggcctcgcgccgtcgctgctcccgccgcagtttcgcccgcacccgcgcgtgctccgcctcgccgcgtcccgccgctgggtcgtcgccgccccgccgctccacgccgacatcgacacccacaaggcgtgcggtctcggtcccgccatgcccttcgcccaccgtctcctccacgctgcctccccggacctcgtcctgggcctcgtgccctgcgccgtcggcggcaccaggatctggatgtgggccaagggggagcctctctacgaggccgccgtcgcccgggggcgcgccgctgttgccgccggcggaggcaccctcggcgccgtgctctggttccagggggagagcgacaccatcgagctcgacgacgccacggcctacggcggcaggatggagcgcctcgtcaacgatttcagggctgatctcggcatgccgaatctgctcgtcatacagctgatctgaatgtctaaggagggcac

SEQ ID NO: 16703 - DNA, 795 bp, Zea Mays
caacgaggcaacgacgcgggcaaagcggcataggggaagcgagaagcccaaccaccgagccctcgcctcaaaatccagctgccacgccgagcccaagctcccaatcgccatgaagccggcggcgcggcggccgctgctgctgtgcgcgctggcggcggcggcggcgctctccatcctgctggtcgcgccgccgcctctcgccgcgcacctatcatcactgctcctcgccttcccggcgtcgccctacgcgggcgggcccaagctggtggtcctcctcgccggccagtccaatatggcaggccgcggcctcgcgccgtcgctgctcccgccgcagtttcgcccgcacccgcgcgtgctccgcctcgccgcgtcccgccgctgggtcgtcgccgccccgccgctccacgccgacatcgacacccacaaggcgtgcggtctcggtcccgccatgcccttcgcccaccgtctcctccacgctgcctccccggacctcgtcctgggcctcgtgccctgcgccgtcggcggcaccaggatctggatgtgggccaagggggagcctctctacgaggccgccgtcgcccgggggcgcgccgctgttgccgccggcggaggcaccctcggcgccgtgctctggttccagggggagagcgacaccatcgagctcgacgacgccacggcctacggcggcaggatggagcgcctcgtcaacgatttcagggctgatctcggcatgccgaatctgctcgtcatacagagttctctgaacttcagtttgccgagaggcttcgtgagaat

SEQ ID NO: 16704 - DNA, 432 bp, Zea Mays
aaacaggatacttgctgagtatgttgatgtgtactcacccttgctctacacaccaaccccccctccccaggttgtccgcattgcaaccactgctcaggagaagatgaagccgtggaaggagacttccaggagttccaagactacgacgagttctagacgtgggttagcggcaacccccagtcggctgcttgtgaaggccgcatttatctacgtttcgttttcgcactttgatttattgtaaagactatgtggatgtctcagacatatgatgtaatcgactatttcccttttaatactatttgagcactgtgcgatgatgtccatgttatgtaactgctgtgtacgtgaattgctgatcctgacacgtacatggttcgaattcggtttgccttctaaaaccgggtgtgacaacagctttggatttattcacca

SEQ ID NO: 16705 - DNA, 1070 bp, Zea Mays
ctggttctagcaaccgagaatgttcagagatgaattagagagagatggcatgcctaacattgaaagaacattgcgacaaggattccagacttggttcagaacccatatcctcagaatgcggaatataaatcaagaagaggctgatgatgatctattttccttggcttgtggtcctgatttcagagttcgaaaatactcctcacgcatagtgaatggtgtgcggtttaacactagtgaccgtgacaagcatcgaaagacacaaaatagtggagtaatgacacaagctgctgaaattgctcaattggtacaagaaaatggccaaaaagtgtatgggagtgatagtgaagaagaagatgatgacgatacaattttggagtattgcagcgaagccgaagaaggtgctacaaatgatgttgacagtgatgacgaatagctgatactactgatatttagttgtgaaatgacacttgtaatatttatttggataggctgtagtattttctgccatttaattgtgaatgtaacttgaaatatttatttggatggaccatgttcaattcagatcatggttttatgaataatggtcatgttgagttcagatcttgttattttgctgcttctatcgtgccctcctctgatgcttctatcgtgccctcctctgttggtcttgctatggtagagccctccgaccttgctttggtgctgccctccattgctgcctcgtcaaggttatattcatctaaaatatactttattttttcaagtttctaaaattcacatgattatttactattttcatgttttgtgtagggaaaataaaaggaagagaggaaaagaggttgcgcgtacaactgaagacagtccaacgaagaatacaacgaccaaggttatgaagaaggcaaaaatcaagaaaaggctcgttgcggacttgtagctgagatttagctgaatttggtactgtcatgtcatcaaactgtgctgagttcagactgaatgtcattaaactgaataactaaatgtttgaacctgctgcttcagactaaatgtcattaaactgtgctgagttctgc

SEQ ID NO: 16706 - DNA, 4037 bp, Zea Mays
ccccaatcccttctccttcgtgcagctgcgcgccagatcgacttcaccgtcgctgctcgtcctgcctagctgacggtccggccagcatcgcctcctgctcgcggcctcgctcagctccctccaccctccggtgagacgcagatctcctgctcgcggcctcgcccagctccctccaccctccggtgagacgcagatcttggtgcgacggggcactacggaggcagggtagtgcggttgtgcgtgtgttggtggcctggttctagcaaccgagatggatagaagttgggtgcatgctagactattttctcatgaatatataaatggcgtcaaagaatttatgagcttcattcatgggaactttggagaggatgaagaaatcttatgtccatgtagtagatgccttaatcaaaagtaccaacatcaagctcttgtggagaggcatatattgatgaatggcatggaaagtacatatactcgatggattcatcatggagagaatcttgatgtatatggtttgttaaatgagtcaggtatgactgaggacaacagctatgatgatggtaatttgatgatgatggtaatttgaatgggttgttacaagacttagacagcacagagaaagataagcaagacaatgaaaatgagaatgatccagaacctaatggcaaggattcattttttaaatcgttgatgaaagaggctaagcgtcaactttatccagatgggttgatgttgaaggaaagaagattccacagaaagtgttgcgccattttccgttgatacctaggctacagaggatgtttgtgaacaaagaaacagcagaacaagcacagtggcacaagctgaagcgaaatcctaaggaaaatgaaatgagtcacccagctaatggtgaggcatggcaagattttgatagaaaatatccaaattttgcaaaagatgccagaaaccttagacttggcttagcaactgatgggtttaaccccttttcggaaaaaacactaaatacagcatgtggcctgtacttgttgtgccatacaactttcaccttgggcgtgcatggaggagtcaaatttcatgatggctttacttattcctggtcctacatcacctggaaaggacttcgatatttttttagagcctcttatagaagatttacttgagctttggacaggtgtacctacttacgatgctctaactggacaaaagtttaacctacgtgctgcagttttatggtgcatccacgattatccagctttgggcactctttcagggcgtaaaacaaaaggtttttttgcatgtattcattgtgataagcaatctctttcatacagcctaaggagcaaaattggttattttgggcattttcgttttcttccggtgggacatcgcttgcgcaaaaataatgaatttgttggtcttcatgaaagcaatgatcccccaggtaaattctctatggaagagttgatggctgaattggagagagtcaaacatgttaggcctaggaagcaacaaggaagtaggaaaaggaaacgttctaatttggacaaggatcatgtggtaatttggagttggatggttagtttatggaagttaccatattggaagaatttgaaactgagacataatcttgatatcatgcacattgagaaaaacatatgtgaaaacttgattgggactattctcaatatacccgggaagacaaaggatacaattaaagctaggcttgatctgaaagatatgggtattagaaaggagttgcattttagagggaatgtagattcatgtgagatgccttatgcaagatataccttgcccacagaatataagaaggccttttgtgattttttgcgggaggtgaagtttccagatggatttgcatccaacatatcaagatgtttaaatgctgagggaaccaaattacaagggcttaaaacacatgattgtcacattcttttgcaaagaatattaccagttgccatgagaggatttttggacaaggatatttatgaagcactagcggatctggggaaattttttagggaattgtgcagcagaactcttaaaaaggatgtgttggctgaaatgaggaaagaaattccaataattttggtgaagctcgagaaaatatttcccccagctttctttgatgtgatggtgcatctagctgtgcatctacctgatgaggcattattgcgaggtcctgtgcattatggttggatgtacccaattgaaaggcgattgtatactttgaagcgctatgtgaggaacagggcacgaccggaaggctcaatcgctgaggcatatattgcggacgagtgcttgacattttgctctaaatacatggatgatgttgaaacaaaatttaatcgggaaccaagaaataaagggttttctaatgaggaagcctatactgttgatgtttttgggcatggagttaattttacctctgcgcctgaactagtgtatgatgatagtgccattgatcaaatggtatggtatgttctgaacaattgtagtcaggttgacaaatatatgagaatgttcagagatgaattagagagagatggcatgcctaacattgaaagaacattgcgacaaggattccagacttggttcagaacccatatcctcagaatgcggaatataaatcaagaagaggctgatgatgatctattttccttggcttgtggtcctgatttcagagttcgaaaatactcctcacgcatagtgaatggtgtgcggtttaacactagtgaccgtgacaagcatcgaaagacacaaaatagtggagtaatgacacaaggtactcataacggtcaagaaattgattttttttggaaccttaagagagatcattcagttagagcataaccttgatgagagatcagtagttttgtttaaatgtgactggtttaaactagacgggaggactgagcttaaagatgatggcttttttaaaagcatcaactttggaagtctatggtacaagaatgattcctatattctagccactcaagctaggaaggtcttctatttggcggacacaaaattgggtaaaaattggcatgttgttcagacatttgaccatagacatctttataatgtgagtgaaaatgatgttgcacaacataatgctcctgcatatcaagaaaatgagtgttgtgaagagaatgctagtcgacaagcagtttccgataatatatatgagaagcctttaagtagagatgatgaacaaggtcttatttttgaagctgctgaaattgctcaattggtacaagaaaatggccaaaaagtgtatgggagtgatagtgaagaagaagatgatgacgatacaattttggagtattgcagcgaagccgaagaaggtgctacaaatgatgttgacagtgatgacgaatagctgatactactgatatttagttgtgaaatgacacttgtaatatttatttggataggctgtagtattttctgccatttaattgtgaatgtaacttgaaatatttatttggatggaccatgttcaattcagatcatggttttatgaataatggtcatgttgagttcagatcttgttattttgctgcttctatcgtgccctcctctgatgcttctatcgtgccctcctctgttggtcttgctatggtagagccctccgaccttgctttggtgctgccctccattgctgcctcgtcaaggttatattcatctaaaatatactttattttttcaagtttctaaaattcacatgattatttactattttcatgttttgtgtagggaaaataaaaggaagagaggaaaagaggttgcgcgtacaactgaagacagtccaacgaagaatacaacgaccaaggttatgaagaaggcaaaaatcaagaaaaggctcgttgcggacttgtagctgagatttagctgaatttggtactgtcatgtcatcaaactgtgctgagttcagactgaatgtcattaaactgaataactaaatgtttgaacctgctgcttcagactaaatgtcattaaactgtgctgagttctgc

SEQ ID NO: 16707 - DNA, 4270 bp, Zea Mays
attccgctcgtttctcaggagtcaggaccttgccccggccccaatcccttctccttcgtgcagctgcgcgccagatcgacttcaccgtcgctgctcgtcctgcctagctgacggtccggccagcatcgcctcctgctcgcggcctcgctcagctccctccaccctccggtgagacgcagatctcctgctcgcggcctcgcccagctccctccaccctccggtgagacgcagatcttggtgcgacggggcactacggaggcagggtagtgcggttgtgcgtgtgttggtggcctggttctagcaaccgagatggatagaagttgggtgcatgctagactattttctcatgaatatataaatggcgtcaaagaatttatgagcttcattcatgggaactttggagaggatgaagaaatcttatgtccatgtagtagatgccttaatcaaaagtaccaacatcaagctcttgtggagaggcatatattgatgaatggcatggaaagtacatatactcgatggattcatcatggagagaatcttgatgtatatggtttgttaaatgagtcaggtatgactgaggacaacagctatgatgatggtaatttgatgatgatggtaatttgaatgggttgttacaagacttagacagcacagagaaagataagcaagacaatgaaaatgagaatgatccagaacctaatggcaaggattcattttttaaatcgttgatgaaagaggctaagcgtcaactttatccaggttgtacgaaattttcgaagttgtcctttgtggtaaaacttctttatatgaagtcattgtataggatatgcaactccgccttttctgcaatattaaaactgttaggtgatgctttcctagaatgcaatacactccccaaatcatattatgaagcaaagagcattttaaagaaattaggtcttggatatgaatcaatacatgtgtgctataataattgtgtgctcttcagaaaagaatatagcaagcttgacaattgccctatttgtggtctctcaagatgggttgatgttgaaggaaagaagattccacagaaagtgttgcgccattttccgttgatacctaggctacagaggatgtttgtgaacaaagaaacagcagaacaagcacagtggcacaagctgaagcgaaatcctaaggaaaatgaaatgagtcacccagctaatggtgaggcatggcaagattttgatagaaaatatccaaattttgcaaaagatgccagaaaccttagacttggcttagcaactgatgggtttaaccccttttcggaaaaaacactaaatacagcatgtggcctgtacttgttgtgccatacaactttcaccttgggcgtgcatggaggagtcaaatttcatgatggctttacttattcctggtcctacatcacctggaaaggacttcgatatttttttagagcctcttatagaagatttacttgagctttggacaggtgtacctacttacgatgctctaactggacaaaagtttaacctacgtgctgcagttttatggtgcatccacgattatccagctttgggcactctttcagggcgtaaaacaaaaggtttttttgcatgtattcattgtgataagcaatctctttcatacagcctaaggagcaaaattggttattttgggcattttcgttttcttccggtgggacatcgcttgcgcaaaaataatgaatttgttggtcttcatgaaagcaatgatcccccaggtaaattctctatggaagagttgatggctgaattggagagagtcaaacatgttaggcctaggaagcaacaaggaagtaggaaaaggaaacgttctaatttggacaaggatcatgtggtaatttggagttggatggttagtttatggaagttaccatattggaagaatttgaaactgagacataatcttgatatcatgcacattgagaaaaacatatgtgaaaacttgattgggactattctcaatatacccgggaagacaaaggatacaattaaagctaggcttgatctgaaagatatgggtattagaaaggagttgcattttagagggaatgtagattcatgtgagatgccttatgcaagatataccttgcccacagaatataagaaggccttttgtgattttttgcgggaggtgaagtttccagatggatttgcatccaacatatcaagatgtttaaatgctgagggaaccaaattacaagggcttaaaacacatgattgtcacattcttttgcaaagaatattaccagttgccatgagaggatttttggacaaggatatttatgaagcactagcggatctggggaaattttttagggaattgtgcagcagaactcttaaaaaggatgtgttggctgaaatgaggaaagaaattccaataattttggtgaagctcgagaaaatatttcccccagctttctttgatgtgatggtgcatctagctgtgcatctacctgatgaggcattattgcgaggtcctgtgcattatggttggatgtacccaattgaaaggcgattgtatactttgaagcgctatgtgaggaacagggcacgaccggaaggctcaatcgctgaggcatatattgcggacgagtgcttgacattttgctctaaatacatggatgatgttgaaacaaaatttaatcgggaaccaagaaataaagggttttctaatgaggaagcctatactgttgatgtttttgggcatggagttaattttacctctgcgcctgaactagtgtatgatgatagtgccattgatcaaatggtatggtatgttctgaacaattgtagtcaggttgacaaatatatgagaatgttcagagatgaattagagagagatggcatgcctaacattgaaagaacattgcgacaaggattccagacttggttcagaacccatatcctcagaatgcggaatataaatcaagaagaggctgatgatgatctattttccttggcttgtggtcctgatttcagagttcgaaaatactcctcacgcatagtgaatggtgtgcggtttaacactagtgaccgtgacaagcatcgaaagacacaaaatagtggagtaatgacacaaggtactcataacggtcaagaaattgattttttttggaaccttaagagagatcattcagttagagcataaccttgatgagagatcagtagttttgtttaaatgtgactggtttaaactagacgggaggactgagcttaaagatgatggcttttttaaaagcatcaactttggaagtctatggtacaagaatgattcctatattctagccactcaagctaggaaggtcttctatttggcggacacaaaattgggtaaaaattggcatgttgttcagacatttgaccatagacatctttataatgtgagtgaaaatgatgttgcacaacataatgctcctgcatatcaagaaaatgagtgttgtgaagagaatgctagtcgacaagcagtttccgataatatatatgagaagcctttaagtagagatgatgaacaaggtcttatttttgaagctgctgaaattgctcaattggtacaagaaaatggccaaaaagtgtatgggagtgatagtgaagaagaagatgatgacgatacaattttggagtattgcagcgaagccgaagaaggtgctacaaatgatgttgacagtgatgacgaatagctgatactactgatatttagttgtgaaatgacacttgtaatatttatttggataggctgtagtattttctgccatttaattgtgaatgtaacttgaaatatttatttggatggaccatgttcaattcagatcatggttttatgaataatggtcatgttgagttcagatcttgttattttgctgcttctatcgtgccctcctctgatgcttctatcgtgccctcctctgttggtcttgctatggtagagccctccgaccttgctttggtgctgccctccattgctgcctcgtcaagggaaaataaaaggaagagaggaaaagaggttgcgcgtacaactgaagacagtccaacgaagaatacaacgaccaaggttatgaagaaggcaaaaatcaagaaaaggctcgttgcggacttgtagctgagatttagctgaatttggtactgtcatgtcatcaaactgtgctgagttcagactgaatgtcattaaactgaataactaaatgtttgaacctgctgcttcagactaaatgtcattaaactgtgctgagttctgc

SEQ ID NO: 16708 - DNA, 1814 bp, Zea Mays
ttattattccgctcgtttctcaggagtcaggaccttgccccggccccaatcccttctccttcgtgcagctgcgcgccagatcgacttcaccgtcgctgctcgtcctgcctagctgacggtccggccagcatcgcctcctgctcgcggcctcgctcagctccctccaccctccggtgagacgcagatctcctgctcgcggcctcgcccagctccctccaccctccggtgagacgcagatcttggtgcgacggggcactacggaggcagggtagtgcggttgtgcgtgtgttggtggcctggttctagcaaccgagaatgttcagagatgaattagagagagatggcatgcctaacattgaaagaacattgcgacaaggattccagacttggttcagaacccatatcctcagaatgcggaatataaatcaagaagaggctgatgatgatctattttccttggcttgtggtcctgatttcagagttcgaaaatactcctcacgcatagtgaatggtgtgcggtttaacactagtgaccgtgacaagcatcgaaagacacaaaatagtggagtaatgacacaaggtactcataacggtcaagaaattgattttttttggaaccttaagagagatcattcagttagagcataaccttgatgagagatcagtagttttgtttaaatgtgactggtttaaactagacgggaggactgagcttaaagatgatggcttttttaaaagcatcaactttggaagtctatggtacaagaatgattcctatattctagccactcaagctaggaaggtcttctatttggcggacacaaaattgggtaaaaattggcatgttgttcagacatttgaccatagacatctttataatgtgagtgaaaatgatgttgcacaacataatgctcctgcatatcaagaaaatgagtgttgtgaagagaatgctagtcgacaagcagtttccgataatatatatgagaagcctttaagtagagatgatgaacaaggtcttatttttgaagctgctgaaattgctcaattggtacaagaaaatggccaaaaagtgtatgggagtgatagtgaagaagaagatgatgacgatacaattttggagtattgcagcgaagccgaagaaggtgctacaaatgatgttgacagtgatgacgaatagctgatactactgatatttagttgtgaaatgacacttgtaatatttatttggataggctgtagtattttctgccatttaattgtgaatgtaacttgaaatatttatttggatggaccatgttcaattcagatcatggttttatgaataatggtcatgttgagttcagatcttgttattttgctgcttctatcgtgccctcctctgatgcttctatcgtgccctcctctgttggtcttgctatggtagagccctccgaccttgctttggtgctgccctccattgctgcctcgtcaaggttatattcatctaaaatatactttattttttcaagtttctaaaattcacatgattatttactattttcatgttttgtgtagggaaaataaaaggaagagaggaaaagaggttgcgcgtacaactgaagacagtccaacgaagaatacaacgaccaaggttatgaagaaggcaaaaatcaagaaaaggctcgttgcggacttgtagctgagatttagctgaatttggtactgtcatgtcatcaaactgtgctgagttcagactgaatgtcattaaactgaataactaaatgtttgaacctgctgcttcagactaaatgtcattaaactgtgctgagttctgc

SEQ ID NO: 16709 - DNA, 1673 bp, Zea Mays
ttattattccgctcgtttctcaggagtcaggaccttgccccggccccaatcccttctccttcgtgcagctgcgcgccagatcgacttcaccgtcgctgctcgtcctgcctagctgacggtccggccagcatcgcctcctgctcgcggcctcgctcagctccctccaccctccgaatgttcagagatgaattagagagagatggcatgcctaacattgaaagaacattgcgacaaggattccagacttggttcagaacccatatcctcagaatgcggaatataaatcaagaagaggctgatgatgatctattttccttggcttgtggtcctgatttcagagttcgaaaatactcctcacgcatagtgaatggtgtgcggtttaacactagtgaccgtgacaagcatcgaaagacacaaaatagtggagtaatgacacaaggtactcataacggtcaagaaattgattttttttggaaccttaagagagatcattcagttagagcataaccttgatgagagatcagtagttttgtttaaatgtgactggtttaaactagacgggaggactgagcttaaagatgatggcttttttaaaagcatcaactttggaagtctatggtacaagaatgattcctatattctagccactcaagctaggaaggtcttctatttggcggacacaaaattgggtaaaaattggcatgttgttcagacatttgaccatagacatctttataatgtgagtgaaaatgatgttgcacaacataatgctcctgcatatcaagaaaatgagtgttgtgaagagaatgctagtcgacaagcagtttccgataatatatatgagaagcctttaagtagagatgatgaacaaggtcttatttttgaagctgctgaaattgctcaattggtacaagaaaatggccaaaaagtgtatgggagtgatagtgaagaagaagatgatgacgatacaattttggagtattgcagcgaagccgaagaaggtgctacaaatgatgttgacagtgatgacgaatagctgatactactgatatttagttgtgaaatgacacttgtaatatttatttggataggctgtagtattttctgccatttaattgtgaatgtaacttgaaatatttatttggatggaccatgttcaattcagatcatggttttatgaataatggtcatgttgagttcagatcttgttattttgctgcttctatcgtgccctcctctgatgcttctatcgtgccctcctctgttggtcttgctatggtagagccctccgaccttgctttggtgctgccctccattgctgcctcgtcaaggttatattcatctaaaatatactttattttttcaagtttctaaaattcacatgattatttactattttcatgttttgtgtagggaaaataaaaggaagagaggaaaagaggttgcgcgtacaactgaagacagtccaacgaagaatacaacgaccaaggttatgaagaaggcaaaaatcaagaaaaggctcgttgcggacttgtagctgagatttagctgaatttggtactgtcatgtcatcaaactgtgctgagttcagactgaatgtcattaaactgaataactaaatgtttgaacctgctgcttcagactaaatgtcattaaactgtgctgagttctgc

SEQ ID NO: 16710 - DNA, 4164 bp, Zea Mays
agatccaatcaagaagataatgccgctgctttattattccgctcgtttctcaggagtcaggaccttgccccggccccaatcccttctccttcgtgcagctgcgcgccagatcgacttcaccgtcgctgctcgtcctgcctagctgacggtccggccagcatcgcctcctgctcgcggcctcgctcagctccctccaccctccgatggatagaagttgggtgcatgctagactattttctcatgaatatataaatggcgtcaaagaatttatgagcttcattcatgggaactttggagaggatgaagaaatcttatgtccatgtagtagatgccttaatcaaaagtaccaacatcaagctcttgtggagaggcatatattgatgaatggcatggaaagtacatatactcgatggattcatcatggagagaatcttgatgtatatggtttgttaaatgagtcaggtatgactgaggacaacagctatgatgatggtaatttgatgatgatggtaatttgaatgggttgttacaagacttagacagcacagagaaagataagcaagacaatgaaaatgagaatgatccagaacctaatggcaaggattcattttttaaatcgttgatgaaagaggctaagcgtcaactttatccaggttgtacgaaattttcgaagttgtcctttgtggtaaaacttctttatatgaagtcattgtataggatatgcaactccgccttttctgcaatattaaaactgttaggtgatgctttcctagaatgcaatacactccccaaatcatattatgaagcaaagagcattttaaagaaattaggtcttggatatgaatcaatacatgtgtgctataataattgtgtgctcttcagaaaagaatatagcaagcttgacaattgccctatttgtggtctctcaagatgggttgatgttgaaggaaagaagattccacagaaagtgttgcgccattttccgttgatacctaggctacagaggatgtttgtgaacaaagaaacagcagaacaagcacagtggcacaagctgaagcgaaatcctaaggaaaatgaaatgagtcacccagctaatggtgaggcatggcaagattttgatagaaaatatccaaattttgcaaaagatgccagaaaccttagacttggcttagcaactgatgggtttaaccccttttcggaaaaaacactaaatacagcatgtggcctgtacttgttgtgccatacaactttcaccttgggcgtgcatggaggagtcaaatttcatgatggctttacttattcctggtcctacatcacctggaaaggacttcgatatttttttagagcctcttatagaagatttacttgagctttggacaggtgtacctacttacgatgctctaactggacaaaagtttaacctacgtgctgcagttttatggtgcatccacgattatccagctttgggcactctttcagggcgtaaaacaaaaggtttttttgcatgtattcattgtgataagcaatctctttcatacagcctaaggagcaaaattggttattttgggcattttcgttttcttccggtgggacatcgcttgcgcaaaaataatgaatttgttggtcttcatgaaagcaatgatcccccaggtaaattctctatggaagagttgatggctgaattggagagagtcaaacatgttaggcctaggaagcaacaaggaagtaggaaaaggaaacgttctaatttggacaaggatcatgtggtaatttggagttggatggttagtttatggaagttaccatattggaagaatttgaaactgagacataatcttgatatcatgcacattgagaaaaacatatgtgaaaacttgattgggactattctcaatatacccgggaagacaaaggatacaattaaagctaggcttgatctgaaagatatgggtattagaaaggagttgcattttagagggaatgtagattcatgtgagatgccttatgcaagatataccttgcccacagaatataagaaggccttttgtgattttttgcgggaggtgaagtttccagatggatttgcatccaacatatcaagatgtttaaatgctgagggaaccaaattacaagggcttaaaacacatgattgtcacattcttttgcaaagaatattaccagttgccatgagaggatttttggacaaggatatttatgaagcactagcggatctggggaaattttttagggaattgtgcagcagaactcttaaaaaggatgtgttggctgaaatgaggaaagaaattccaataattttggtgaagctcgagaaaatatttcccccagctttctttgatgtgatggtgcatctagctgtgcatctacctgatgaggcattattgcgaggtcctgtgcattatggttggatgtacccaattgaaaggcgattgtatactttgaagcgctatgtgaggaacagggcacgaccggaaggctcaatcgctgaggcatatattgcggacgagtgcttgacattttgctctaaatacatggatgatgttgaaacaaaatttaatcgggaaccaagaaataaagggttttctaatgaggaagcctatactgttgatgtttttgggcatggagttaattttacctctgcgcctgaactagtgtatgatgatagtgccattgatcaaatggtatggtatgttctgaacaattgtagtcaggttgacaaatatatgagaatgttcagagatgaattagagagagatggcatgcctaacattgaaagaacattgcgacaaggattccagacttggttcagaacccatatcctcagaatgcggaatataaatcaagaagaggctgatgatgatctattttccttggcttgtggtcctgatttcagagttcgaaaatactcctcacgcatagtgaatggtgtgcggtttaacactagtgaccgtgacaagcatcgaaagacacaaaatagtggagtaatgacacaaggtactcataacggtcaagaaattgattttttttggaaccttaagagagatcattcagttagagcataaccttgatgagagatcagtagttttgtttaaatgtgactggtttaaactagacgggaggactgagcttaaagatgatggcttttttaaaagcatcaactttggaagtctatggtacaagaatgattcctatattctagccactcaagctaggaaggtcttctatttggcggacacaaaattgggtaaaaattggcatgttgttcagacatttgaccatagacatctttataatgtgagtgaaaatgatgttgcacaacataatgctcctgcatatcaagaaaatgagtgttgtgaagagaatgctagtcgacaagcagtttccgataatatatatgagaagcctttaagtagagatgatgaacaaggtcttatttttgaagctgctgaaattgctcaattggtacaagaaaatggccaaaaagtgtatgggagtgatagtgaagaagaagatgatgacgatacaattttggagtattgcagcgaagccgaagaaggtgctacaaatgatgttgacagtgatgacgaatagctgatactactgatatttagttgtgaaatgacacttgtaatatttatttggataggctgtagtattttctgccatttaattgtgaatgtaacttgaaatatttatttggatggaccatgttcaattcagatcatggttttatgaataatggtcatgttgagttcagatcttgttattttgctgcttctatcgtgccctcctctgatgcttctatcgtgccctcctctgttggtcttgctatggtagagccctccgaccttgctttggtgctgccctccattgctgcctcgtcaagggaaaataaaaggaagagaggaaaagaggttgcgcgtacaactgaagacagtccaacgaagaatacaacgaccaaggttatgaagaaggcaaaaatcaagaaaaggctcgttgcggacttgtagctgagatttagctgaatttggtactgtcatgtcatcaaactgtgctgagttcagactgaatgtcattaaactgaataactaaatgtttgaacctgctgcttcagactaaatgtcattaaactgtgctgagttctgc

SEQ ID NO: 16711 - DNA, 2841 bp, Zea Mays
aacacactggaacacctgcgaactctccctgcgatcaaccgcgtttcaaatctatccgcgacaactaagcattcgattctccgacaacaacaagcagggtaatggcgtctgcggacgtgcacatggctggcggtgcggagacggagaccttcgcattccaggccgagatcaaccagctgctctccctcatcatcaacaccttctactcgaacaaggagatcttcctcagagagctcatctccaacgcatcggatgcgcttgacaagatccgcttcgagagcctgacggacaagtcgaagctggacgcgcagccggagctcttcatccggctcgtcccggacaaggccagcaagacgctgtccatcatcgactccggcgtgggcatgaccaagtccgacctggtcaacaacctcggcaccatcgcgcggtcgggcaccaaggagttcatggaggcgcttgccgcgggcgccaccgacgtgtcgatgatcggccagttcggcgtcggcttctactccgcctacctcgtcgcggacagggtcatggtcaccaccaagcacaacgacgacgagcagtacgtgtgggagtcccaggccggcgggtccttcaccgtcacgcatgacaccacgggggagcgactcggccggggcaccaagatcacgctcttcctcaaggacgaccagctcgagtacctggaggagcgccgcctcaaggacctcgtcaagaagcactcggagttcatcagctaccccatctacctgtggacggagaagaccaccgagaaggagatcagtgacgacgaggaggaggacaacaagaaggaggaggagggcgacgtcgaggaggtggacgacgaggacaaggacgccaaggataagagcaaaaagaagaagaaggtgaaggaggtgagccacgagtgggtgcagatcaacaagcagaagcccatctggctccgcaagcccgaggagatcacgcgcgaggagtacgcctccttctacaagtctctgaccaacgactgggaggaccacctcgccgtgaagcacttctcggtggaggggcagctggagttcaaggccatcctgttcgtgccccgccgcgcgcccttcgacctgttcgacacgcgcaagaagctcaacaacatcaagctctacgtccgccgcgtcttcatcatggacaactgcgaggagctcatcccggagtggctgggcttcgtgaagggcgtggtggactcggatgacctgccgctcaacatctcccgcgagacgctgcagcagaacaagatcctcaaggtcatccgcaagaacctggtcaagaagtgcatcgagatgttcttcgagatcgcggagaacaaggacgactacgccaagttctacgacgccttctccaagaacatcaagctgggcatccacgaggactcgcagaaccgcgccaagctcgccgacctcctgcgctaccactccaccaagagcggcgacgagacgacgagcctcaaggactacgtgacgcgcatgaaggaggggcagaaggacatctactacatcaccggcgagagcaggaaggccgtggagaactcgccgttcctggagcgtctcaagaagaagggctacgaggtgctgttcatggtggacgccatcgacgagtacgccgtggggcagcttaaggagtacgacggcaagaagctggtgtcggcaaccaaggagggcctgaagctggacgacgaggacgacgaggaggccaagaagcggcgggaggagcgcaagaagcggttcgaggagctgtgcaaggtgatcaaggacatcctgggcgaccgcgtcgagaaggtggtggtgtcggaccgcatcgtcgactcgccgtgctgcctggtgacgggcgagtacgggtggaccgccaacatggaacggatcatgaaggcgcaggcactacgggacagcagcatgagcgcgtacatgtcctccaagaagaccatggagatcaacccggacaacggcatcatggaggagctccggaagcgcgccgaggccgaccgaaacgacaagtccgtcaaggacctcgtgctgctgctcttcgagacggcgctgctcacctcggggttcagcctcgacgaccccaacacgttcgcggccaggatccacaggatgctcaagctcggcctcaacatcgacgaggacgctgctgccgacgaggacgccgacatgcccgcgcttgacgagggcgccgccgaggagagcaagatggaggaggtcgactgaggtgtccttctttcctatatatgcaagttctcagcgatgagggacgacggtcaatggcgatgcctgtttgtgtgtgtctgcgtgtgggtccaaaggggacactgttggtacaggtcacagtagtgtctagtagtaccttgattgccaggaggcaggaccgtgtgtcttcttcgtgtcacatttcgggtctgctctgagtgtcgtggaatcctgtgaaacatataatacatccgatccgagtccttagcttccctcataaaggagaaaaagaaaacaaaacaagttattagtcggtgtatgaataaggatatatacggtggtatatggccacaaaaggtgggagaaaagcacccgtgaagctcaacagatgcccaagttgacgtggccacaagcactgaagtttattaggattaatatttattttgattaaatcaatttctattttctagagtaggttagttttatgcttggtcacataaactataatgagagtttgtttagatttttataaagtcaattcctatttttgagaaaacctggttgtagatggattataaaaacattatgataagaactcacggttatcgttttctcc

SEQ ID NO: 16712 - DNA, 1449 bp, Zea Mays
caaacggacagtgcagagattcgaagaagacacaaataaaatctcgccaaattcatgaactctctagtctctactctcttctcctggcaacgatttccaaacgcacgcaaacgctgtcacagtttgtcacggcagcggcaagtcggcaacgctgccgcggcacgtctcctccctctcttttccggttcgggtagtcgggtgtaccgccattcgtgatcgaaccagactcgagagggagaggaggagggagtccgaggggagagacccaattagctgcagggattggtcgggttcggctccgccttcggagagtcccaagagatgggtggcgcggcggcgggtaccaagtggatccaccacatccagcgcctcagcgcggccaaggtgtcggcggaggcggtggagcggggccagagccgcgtcatcgacgcctccctcaccctaattcgcgagcgcgcaaagctcaaggcagagttgctgcgtgctctgggtggcgtgaaagcttcagcgtcgctcttaggggtccctcttggtcacaactcatcctttttacaaggccctgcatttgctcctccacgcatacgggaggccatttggtgtggaagcacaaactctagcacagaggaaggcaaagaattgaatgatcctcgggtgctaactgatgttggagatgtccccattcacgagatccgtgactgtggtgtcgaagatgacagattaatgcatgtaattagtgagtctgtcaaaacagtgatggaggaggagcctcttcgaccgttggtgttaggaggcgatcattcaatatcttatccagtgggaacacttattcgcatgcctcgtcatttgccagaataatggaaggtggttatgccaggagactgctacaggttggattgagatcaatcaccaaagaagggcgtgaacaagggaagagatttggtgtggaacagtatgagatgcgaaccttctcaaaggaccgagagaagcttgagaatctgaaacttggggaaggcgtaaagggtgtgtatgtctcagttgatgtggactgccttgacccagcgtttgctcctggggtctctcacatcgaacctggaggcctctccttccgcaatgtcctcaacatcctccagaatttgcagggtgacgttgtcgccgctgatgtggtggagttcaacccacagcgtgacacggtagatgggatgacagccatggtcgccgcgaagctggttcgggagctcactgctaagatctccaagtgaaacggtcaggattgcaccactcttcttgaagcaaagcgaaagggtgggttttgatgtcccggtggttattggtcatggtttctatgtatcgagcaccaaattgttcgacatgtgacaggtttatatgttaattaggttgcaataacaccataatggtttatttaaaaaaattctaaaaaaatacaaaaaa

SEQ ID NO: 16713 - DNA, 1434 bp, Zea Mays
ggagcatccgagtatcggccaaacggacagtgcagagattcgaagaagacacaaataaaatctcgccaaattcatgaactctctagtctctactctcttctcctggcaacgatttccaaacgcacgcaaacgctgtcacagtttgtcacggcagcggcaagtcggcaacgctgccgcggcacgtctcctccctctcttttccggttcgggtagtcgggtgtaccgccattcgtgatcgaaccagactcgagagggagaggaggagggagtccgaggggagagacccaattagctgcagggattggtcgggttcggctccgccttcggagagtcccaagagatgggtggcgcggcggcgggtaccaagtggatccaccacatccagcgcctcagcgcggccaaggtgtcggcggaggcggtggagcggggccagagccgcgtcatcgacgcctccctcaccctaattcgcgagcgcgcaaagctcaaggcagagttgctgcgtgctctgggtggcgtgaaagcttcagcgtcgctcttaggggtccctcttggtcacaactcatcctttttacaaggccctgcatttgctcctccacgcatacgggaggccatttggtgtggaagcacaaactctagcacagaggaaggcaaagaattgaatgatcctcgggtgctaactgatgttggagatgtccccattcacgagatccgtgactgtggtgtcgaagatgacagattaatgcatgtaattagtgagtctgtcaaaacagtgatggaggaggagcctcttcgaccgttggtgttaggaggcgatcattcaatatcttatccagtgaataatggaaggtggttatgccaggagactgctacaggttggattgagatcaatcaccaaagaagggcgtgaacaagggaagagatttggtgtggaacagtatgagatgcgaaccttctcaaaggaccgagagaagcttgagaatctgaaacttggggaaggcgtaaagggtgtgtatgtctcagttgatgtggactgccttgacccagcgtttgctcctggggtctctcacatcgaacctggaggcctctccttccgcaatgtcctcaacatcctccagaatttgcagggtgacgttgtcgccgctgatgtggtggagttcaacccacagcgtgacacggtagatgggatgacagccatggtcgccgcgaagctggttcgggagctcactgctaagatctccaagtgaaacggtcaggattgcaccactcttcttgaagcaaagcgaaagggtgggttttgatgtcccggtggttattggtcatggtttctatgtatcgagcaccaaattgttcgacatgtgacaggtttatatgttaattaggttgcaataacaccataatggtttatttaaaaaaattctaaaaaaatacaaaaaa

SEQ ID NO: 16714 - DNA, 407 bp, Zea Mays
gccctacataaactccagccgcacccccttcatcctattggactatcgtcactgcgagtcgcgaaagggccggggcgaggaagttaccacctgcacatcggagctaagctcatctgggcagaaaaaggggagagaggagagcttcggaccgtggggaatctagttgcttcgtcgaaggtgattcgcggccgggctcggcagaggattgggcagcaccgccccgaattgccgcagccaaccccattcgtgcgctggcggatactcaccgcgatagcgttctgccgggagctcgactgcgcgcgtgggcaggaatccgtggagcctaatcaccgcaaggttacgagtcacttgaagagcaagtggtacctggaatctcaagtgccaggcaagttgtgcccttgatccac

SEQ ID NO: 16715 - DNA, 3128 bp, Zea Mays
ctttggtatagtacccctaggtttaaaacattcagaacaatttttatgaagcaccaaagtagagccaaaaccactgcaaccccattttagtgttctgaatcagcatttattatgtctggcagagaatatttggacatgttttacttccaattttgtgtagcaccaagcccatctcccattagtaattttgttcatcttactatggtcttcaaacttgctacaaaactttggcccaaaaccaaatagactgggcacaatagagctccaaaattgagctcaacacactaaaacctggtttcagctttctgcgctaagtctaggaaccaaaaacctgacagcctatttttgagtgaattttacacctagttcccagcaacatacagtggtagagttcaaatagtaaatggtgtgagcttcactgatcgatttagaacatggaacatataccacacagctgagaaagctcttgagattacctggccacggtgatgtggacaatggtcaccacgcagagggctggcgtgcttggctctggttcagatcaaggctagagactgggaagagagttatctctagtatgagcacaagaactctattctcctttccgtggtctgaaaatagagcttgagacagggaggaaacctcactggaccctgccttttaagcttgctgaaatgggcagatgtcccatgaacctgtccagcatgcagtggagttgtgttctcagggtgccagccacacatgcacttcattacgtggctcacatgctcactgccacacaggttcacagcacagctcaaagacattgaatgtggtcatctcccaattacagcacccaaatatcacttgtggataggttccaacaggttcaaagccttgatatttcgtccagcagagggtggtgtcttaagacctcaatcctacactccatactcatctcaactacacacacaaatatcccctttgtccccaactgcaagcgacaactgaaacaattaaacaccccactgctcactgcagtccaacttggatattttgcactagtgaatgttctctagatctttagtgacacctttcaaccttatccccatccaagctcataggtgagagcagcagggggtgatctttttcagattccttttgaccaacactgaactaccacagcttaacagaacccctccttccaccctttcatttcttctacttccaagcaacatcacggaatcaatcttggtgaactttgttcaccaactaaccctctaacttatctccacagaggccatagacttataccccttggatcaaccacaaattaactctaaaatctagggaaaacactaaaccaaaaccacagtcactgcatcagacctgatctgcaccaatctgacagaggtagtttgaacacctttttctcccagttttgtgcagcatcaagtccacctcactatataaaacttgttcaatgtactctggtcttcaaatgtgatacagaaaatttagcccaaaaccaaatggattagccacaaatgagctccaaaattagtaccttttactgaatttcggtttcagtgaactgaacaaaaatttcagtcaaagcaacctgacagcccatcttggagctaacttctctcccaaatttgtgtagcaccaacccagtagtgcttaaacaagtttgttctcctagatatggtcttaaaacttgctgcagaaactttggttcaaaaccacctagaataggcactacacagctccaaaactgcactaaaaatattgatttcagacattcagttctgaataaactaagtcaccaaccacctgacagtcaaacttggagcagctgttactccaattttcgtataggatcatgtccattacctttaaagaagatgttcaccaatatatggtcttcaattcctctatagaaatctcagtccaaaaccttataaacaaccacaaaagggctccaaactcggcaccatacaacaaatttcagttttcagaactgaaccaaattcagttataggaatgcctagcagctgattttgggggcatttttatccactttttatgtggaaagaagccaaagtcacttaaagaaacttgttcaccatcatatgggcttcaacttctctataaataccatagcacaaaacattatagaacaaccacaaataggcttcaaaactgctatcaaaacactgaaattcagtttcagttactgtttccaatctgaaaattcagaaatacagcagcaccacttggaaccactctttttcctgggttccaaatgtttataggggcaagttgcttaataaagtttatactccaatagttcctctacaagtttgatatagtaaccattaactaaaacctcttgaattccaaactacaatagcccaaagtttgctccaattgctgaaattcagaatctgaatttcactaagtctgaaatctacaatttctgacagctctacattggactagtttttctccaagttccatagagtgttagggctaggtgacttaaccaaacttgtactcctcatgtagctctatgactttgttataatgatcatcttcaaaatagttttagatcagaagttacaagggtccaaagttgtctagtttatattattttcagcaattccaaaatgaacccaaaactgaatttttgtacttaactccaaattcttccacacaacttaggaatctccaaatatgaaatttgttcacttttccaagtcctacaaccttggtatatagacttttagctaaatccttctagattttgaattccccttttgggctagttttagggtttcaaatgagtttcatttgtgtttcagattcttccagggattcatccctttgatccatccattagaaacaaagttactctctagtctaagatccaactttagcatatgtagctccttccgaacaagtccttgatttcggagttattttgtttatccacaatttcaagcaaggttttcaacctaagtcctatactcaacacacgacatcacacttttgaaaagaaaattttaacctagtaaatgcattctaggtgtaacaagcacattaatgcagatgcttatgatgacatgtcagagttttagtttacg

SEQ ID NO: 16716 - DNA, 1283 bp, Zea Mays
atttagaggacgttgttggagagaaagtagatataggagatggaatattttagagaagaatgtaaagaacggatatagaggatgtatatagaggacgttgctggagacagtcttactggatggaatggatggatggatggatggatggatggatgaggttttttcatggacctggtcatggtcctcgtcgcttgactgtaatgtctcaactggaacgtaacggacgtgccaggtgtggtgttatgaacgtagatggttattcttcgtcggtctacgcgctcacgacactctcgatcagcagtagacctcttgttgaattttgtggaatttcggttacaagcgtcgaccggactcggcaggtcgtcgtagtactaaaaaccctagctagactgccgtgcatgaatcgaccaaaaaaaggctagcacacttgtccagcatataaaggggcggccggccagacacacaggcccattgttaaaagacgatcgaattggcaattagcttgatatattactacttactagctagctctagcgagatggcctgcttcttccggctaccgccgccggccccgtattgcctgctcatcgtcatcatcatatgctcgccgctgctctccacctgctcccacgccaagccttgcacccaatgttgcgacgacgacgacgacgaccaggatcttgcggtgctcaacatgagcttcgtctccaactctggcgccgccggacgacacttggtcttcgtcctcgctccgcaaactatgcagcagccatcattattcgtctccccaaggataccaccaaagctatccgtagagccctctagtcccacatggacgactataacctacagcgtggctgtgctggccatgtgcagatatattttgtttgctatatagatataacattatgtatatttctactgatagatagccttgttcccccttgtagttaagggtatatataagctgatctatatatttatttttttgcagtacactctgttggttgccattcttggtgtgtaaacaataatatatacatattatttactggtgcttttgtcgcaacaaactcctgtcatttgtcaccgtcatgcatctttcttaatgcatgtcaggacttgaaaagccactgctcactagcgacacgaatgttttgccgagtgcttcagccactcgacaaagccttaaaaacactcggcaaaatatttgccgagtgtggcactcgataaaaagtctcgacgaaccgtacatcgacaatattttctttgccgagtacttt

SEQ ID NO: 16717 - DNA, 440 bp, Zea Mays
tggccagattatccttagaccaagtcttttgtagtgaagagttgcacacacatttcttttgtttcgaaactgaatttttgaggtgcacagacatttattttatttcaaaattgaattttttttgttttagaactgaatttttagtgaagagcacacatatttaatagtttcggagcacgacattttaaaattaatacaaaagtgaatttattatagagcgcacacatttcactgaatttggccgtttggttgtggcttcactgaatatgagctgtgtttcctccaacaattgatcttggtcgcttgactggcaatggtcacttctattttccttgcacctcctgtagaagaggaactgaatactcttttactgaggattgccaatgctagaatctggtgattttgtcagctgtttgcatgttgatgcttatgtgtcgatt

SEQ ID NO: 16718 - DNA, 2948 bp, Zea Mays
ccacagcagcccagcagcactgactcctctatttatgatggctgcctgcaccaagagaagagggagatcgaatcagatatcgcccactactcaggactaaagcagtagtgtactcgtacaattgagccgcaagaaaagcatcgcatccatcgtcttctccatcagtccatcccgattcccgagtaccattcgattctatattccgccattgttgatcggctcgctcgccttccttggttcatcactagtaacggcaggaaaggagccgagccattccaatccaagattgattcagtgctggccatggagaaggagactccgccgccgctgcatacggaccaggagactagtgtttcatccgagcaacaacgtccacggccgcatctctccatcgacatcccggcagcatcaagcctgccggcagatcacctgctcccgatggctacggcgacgcaggccggcaccagcatcaccccgccttccaccaggagggggcaacagacaagcagcaacatcctcagcacgcccgctccttcctccagctctagcaagccaagcagcaggccgcctctgcgctcgccgtccttcatgctgaggcagacggtgaagagcctgctgccgttggggagcttcaagtcgtcggccgtcaagagctacgaggcctccatctccaagctgttcggcgccagcgccaccaaggtgatggccaggacgccgtcgctgccgctggaccatgctctgtcgtcgtcgccacatccaccaccagttcagcagaaatcagccgcgctccaccacatgtgccgctcgcagtcgctccccacgaccaccaacatgaagaaggcgaagctgctgaacgcggccaacgccaagagctttaagcggatggactcgctcggcggcacgttccgcgtcgtgccttccacgcccagaacccccgccaccgccgtccccgacgacatagcccctgctccaccaggcggcccaggggtcgacggcggcgaggacataccggaggaggaggccgtgtgccggatctgcatggcggagctgtcggagggcagcgacaccctcatcaagctggagtgcgcgtgcaagggcgagctggcgctggcgcacacggactgcgccgtcaagtggttcagcatcaagggcacccggacctgcgaggtgtgcaagcaggacgtgcagaacctcccggtgaccctgctgcgggttcagagcgtgcagcggcgggacctcctgaatcgcggcggcgccagcaacacgcccagatacgaccggtacaggtgaaatcctcatcgctagctctagacgactcgtcatcagaattctattgggattgcaaaaggctagtgtttaatttgtggagggatagtgactggacactaatttagtcgatgaatgaatgaataatgacaattttgaccaagattgctttgcttgcatatcagtgacactattttgcattaaaaaaatgcactttatattttggtagctgaaaaacgacagtgcaaataagtttagaaccactattatagagtttctttgtaatagtgtaacaagtgcatatataatagtaccactgtacaatgctttcctgcagctggtcccatggagtacacgcagctagctaacacctgtcccaattcccgtagctaccatcttggagtgacacaacaatacactagtagcggccggttaccgaatttgagcagatcagcaccacacgtgttgtcaaattaacattatatttctcttaagaatcaaatcaatcttgctgatgtgatcgagctatagtggtgtgtatgctcgattgcttattactgctgtctcttgtcttgttgctcatcagaatgtggcacgggacgcctatccttgtgatcataagcatcctggcctacttctgcttcttggaagaactactggtggcccatgacggcattgttgcgctggctatatcgctgcccttctcatgtatcctgggcctcttctcgtccttgaccaccacaagcatggtggcaagaagatacgtatggatctacgccgcggctcagttcctcttggtcgtcttcttcacccatctcttctacagatacgtaagcaccaaacgcgtacgcacggagctagctcttctcaactgaacatgctcatatgctgaccgaccagcgcgcgcgcggcgggtctttgcgtacatattgcattgcagctccatttgcaggccgtgatctccatcatcctggcgaccttcgccggcttcggcgtgggcatgaccggcaactccatcgccatcgagatactgcggtggagggcgaggcgggtggcgcctcctacccagcaggcccgccgtcgtcgtcaccgcaggccgcgtgcacctcaacatcaggctcctgatctgccggcgtctggttctgctgatcagacttccagccagccttcagctgcagacatgggaatgggaattggagcgggacagcaccacgtcatggccaccgccgccggcgatgttgagaacccacccgtccctcaggcatagaacgtcgttactgtggagcaggagcagtttgtagtttgtagtttacctgagagggaccttgttacactagtatatatacatgatagtacagatggagtctgaatcttgtttctctacgcatgccttgtgaaagagatcatcatttggcgctgtattttactgtatgtacattctcccaaaagccgtttcttacgtaaaggagtttgagaaaaaaaaatggcagctcctagctcctccacataaattgaatacaaattgttacaaaacaatacttttccctttccaaagctctaagggctggaaactcacattcccttgggtttggagagaattgatggcttattcggttcggggtggattgaagatgatttgagaggattaaatctctttttagtcaaaaatgaatacaaagtga

SEQ ID NO: 16719 - DNA, 2387 bp, Zea Mays
ccacagcagcccagcagcactgactcctctatttatgatggctgcctgcaccaagagaagagggagatcgaatcagatatcgcccactactcaggactaaagcagtagtgtactcgtacaattgagccgcaagaaaagcatcgcatccatcgtcttctccatcagtccatcccgattcccgagtaccattcgattctatattccgccattgttgatcggctcgctcgccttccttggttcatcactagtaacggcaggaaaggagccgagccattccaatccaagattgattcagtgctggccatggagaaggagactccgccgccgctgcatacggaccaggagactagtgtttcatccgagcaacaacgtccacggccgcatctctccatcgacatcccggcagcatcaagcctgccggcagatcacctgctcccgatggctacggcgacgcaggccggcaccagcatcaccccgccttccaccaggagggggcaacagacaagcagcaacatcctcagcacgcccgctccttcctccagctctagcaagccaagcagcaggccgcctctgcgctcgccgtccttcatgctgaggcagacggtgaagagcctgctgccgttggggagcttcaagtcgtcggccgtcaagagctacgaggcctccatctccaagctgttcggcgccagcgccaccaaggtgatggccaggacgccgtcgctgccgctggaccatgctctgtcgtcgtcgccacatccaccaccagttcagcagaaatcagccgcgctccaccacatgtgccgctcgcagtcgctccccacgaccaccaacatgaagaaggcgaagctgctgaacgcggccaacgccaagagctttaagcggatggactcgctcggcggcacgttccgcgtcgtgccttccacgcccagaacccccgccaccgccgtccccgacgacatagcccctgctccaccaggcggcccaggggtcgacggcggcgaggacataccggaggaggaggccgtgtgccggatctgcatggcggagctgtcggagggcagcgacaccctcatcaagctggagtgcgcgtgcaagggcgagctggcgctggcgcacacggactgcgccgtcaagtggttcagcatcaagggcacccggacctgcgaggtgtgcaagcaggacgtgcagaacctcccggtgaccctgctgcgggttcagagcgtgcagcggcgggacctcctgaatcgcggcggcgccagcaacacgcccagatacgaccggtacagaatgtggcacgggacgcctatccttgtgatcataagcatcctggcctacttctgcttcttggaagaactactggtggcccatgacggcattgttgcgctggctatatcgctgcccttctcatgtatcctgggcctcttctcgtccttgaccaccacaagcatgggtacgtggcaagaagatacgtatggatctacgccgcggctcagttcctcttggtcgtcttcttcacccatctcttctacagatacgtaagcaccaaacgcgtacgcacggagctagctcttctcaactgaacatgctcatatgctgaccgaccagcgcgcgcgcggcgggtctttgcgtacatattgcattgcagctccatttgcaggccgtgatctccatcatcctggcgaccttcgccggcttcggcgtgggcatgaccggcaactccatcgccatcgagatactgcggtggagggcgaggcgggtggcgcctcctacccagcaggcccgccgtcgtcgtcaccgcaggccgcgtgcacctcaacatcaggctcctgatctgccggcgtctggttctgctgatcagacttccagccagccttcagctgcagacatgggaatgggaattggagcgggacagcaccacgtcatggccaccgccgccggcgatgttgagaacccacccgtccctcaggcatagaacgtcgttactgtggagcaggagcagtttgtagtttgtagtttacctgagagggaccttgttacactagtatatatacatgatagtacagatggagtctgaatcttgtttctctacgcatgccttgtgaaagagatcatcatttggcgctgtattttactgtatgtacattctcccaaaagccgtttcttacgtaaaggagtttgagaaaaaaaaatggcagctcctagctcctccacataaattgaatacaaattgttacaaaacaatacttttccctttccaaagctctaagggctggaaactcacattcccttgggtttggagagaattgatggcttattcggttcggggtggattgaagatgatttgagaggattaaatctctttttagtcaaaaatgaatacaaagtga

SEQ ID NO: 16720 - DNA, 881 bp, Zea Mays
agctatctcactaagtcaccagattcaaagtatctttataggtgatcaaggcattgaggacgcatccacgtattcgacgtctagtgtacgtttcctgcaaccctgacagtctagtcgccaacgcgatcgagctttgcacaccaacatccgagaaacaagagaagaacaagggcaaccgagggtggcggtctatgagcagcgcggggcttgctcggcagaggacgaagtcgatgcccaactctgagccttttatccccaagagggcaatggctgtcgatctgttccctcacacgccgcattgcgagatggttatgctctttgagagatgaaggaagtgtgtgtctaccaatgcctcagattcttgacctgtgtcgaggaccctatcagtttttcctcatcaccttggcccatccatatgttgtaacttagtgacatctattcgattgagaggccaggacagttggtggtgggatttgccttcttttgatataggatcggctactcttaatcacctgtacgtatttattgtttttgttaaatggatgtaatagtaggattaatttcaaagaaaaaaaaagagaaaatgattcctagagattgagttacagtaggtccaggctgatgaggcatcacattcataaacgtacctgttgctgctgaagttgagaggcatcatcacattcacaaggcaggctcctgcaggcatgaggtttaggtggccagcatgcaattttttttattcattccatttagagcatttattaattaagggctaggtagctgctgcaggacactcccattggctgcaagaccaggtttcttcatccataaattctgagctaacaaccgcttgactgccggtggtggtgttggtgttggtt

SEQ ID NO: 16721 - DNA, 846 bp, Zea Mays
caccaggtgatcaaggcattgaggacgcatccacgtattcgacgtctagtgtacgtttcctgcaaccctgacagtctagtcgccaacgcgatcgagctttgcacaccaacatccgagaaacaagagaagaacaagggcaaccgagggtggcggtctatgagcagcgcggggcttgctcggcagaggacgaagtcgatgcccaactctgagccttttatccccaagagggcaatggctgtcgatctgttccctcacacgccgcattgcgagatggttatgctctttgagagatgaaggaagtgtgtgtctaccaatgcctcagattcttgacctgtgtcgaggaccctatcagtttttcctcatcaccttggcccatccatatgttgtaacttagtgacatctattcgattgagaggccaggacagttggtggtgggatttgccttcttttgatataggatcggctactcttaatcacctgtacgtatttattgtttttgttaaatggatgtaatagtaggattaatttcaaagaaaaaaaaagagaaaatgattcctagagattgagttacagtaggtccaggctgatgaggcatcacattcataaacgtacctgttgctgctgaagttgagaggcatcatcacattcacaaggcaggctcctgcaggcatgaggtttaggtggccagcatgcaattttttttattcattccatttagagcatttattaattaagggctaggtagctgctgcaggacactcccattggctgcaagaccaggtttcttcatccataaattctgagctaacaaccgcttgactgccggtggtggtgttggtgttggtt

SEQ ID NO: 16722 - DNA, 2840 bp, Zea Mays
atggcgctgcagggaatctcatatgcaatagcaaagaaaaagaagggaatgacagttggttttgtgacttttcagagtgttgaacaactaacaaatgctgttcaggtctcatcaaaaagcacatgatggagcacttgtatccaatactggaaccacaacagaaaatggtagcagtcctactacacctgcagaggaaacatctgtgcttgaatcggtgtcatcaagtaaaaaaggtgcccgtgatgcagttactccccttgccaatatgacttacattgatcagctagaacacaaaaatcaatctatggcacagatactgaagaaacttactcgcaatgctaggaaagcttgcccacctgccattccccatcctgattgggtttttaaatcaaaggaaatcggtggtcttccttgcaagtttgaaggcattttggagtccccagttgttaatggataccgtaacaagtgtgagttctctgtaggatattccttagagggcaaaaagacagtaggatttatgctcggaaatttcaggttgatttctctctcattttttcactgctcttaattccattaataatgactggtacaacgtaattctagggaaggtgtgactgctgttgaggaacctgtgaattgtccaaatgtctcagaaatttcctgcaaatacgctcagatgttccaagattttcttcaaccatcaagtttccctttgtggagcaggattgacaactctgggttttggcgccaactcacagtccgtgaaggaagatgtccagctgaagctgttgtttcacagaatgcagaatcacaaatatcagaagtcatgcttattgtgcaggatgatccatcgtcacctcattcctcacaagccaataactaatactagtatgaggaatggagtcattccatcaaatttgaggaatgatctcatgatgcaacacctcatctggtgtgttcaacaggtgttgatgaagctcttatgaaagaagagtttgacaagctgtctgctatcctgatacaaggagcagcaacatgctcacctcccttgccactgacaactattgtagtgcaagatcataaagggatatcaaatgctgcacctactgattgcccactgatcccactattggtaccaaagggagatcagttggatggcacaacagaagataaaataagaatccatgatcacataagcaacttaaagttctctctatcaccaacagcttttttccaggttaatactcttgctgcggaaaggttgtacacccttgctggtgattgggctaatctcaattcagacacattactttttgatgtgtgttgtgggactggaactattggcctgaccttagcacagcatgttggaatggttgttgggattgaaatgaatgaatcggcagtttcaaatgcttgcagaaatgcccttgtcaatggcataaaaaattgtcgttttgtctgtggtaaggctgaagatgtgatggggccccttctcacagaatatcttggttcaccacagcagcaggctgcagcttctaaaagtaattctgaaatcgatgatgcaagcaaaaatgaggatacaattggctgtgcaagttatgatggtgaaaatatagatagctcaaagcagagaaatgacaatgctgaaggtcagcagcctatgggtgcgtcagttgatcatcctacctgtgcaagcgaggtggatgaaaacaatgtggcttctggtgaacagaattgtggggaagcatcattggttaatgataaacccattgagacagcatcagataatagtttggagcaaggcaaggcatgcaaggatggttcttccagtccaaacaacaatgtccttgctgctaatgcatgccagtttaagaatgtcgttgctattgtagactctccacgtgttggccttcgccctactgtcaggggttgggacaggattattcaagtgttgtccacagttgtccctcaaaattggagggacgagagagaacaccagagtgatcaaggcattgaggacgcatccacgtattcgacgtctagtgtacgtttcctgcaaccctgacagtctagtcgccaacgcgatcgagctttgcacaccaacatccgagaaacaagagaagaacaagggcaaccgagggtggcggtctatgagcagcgcggggcttgctcggcagaggacgaagtcgatgcccaactctgagccttttatccccaagagggcaatggctgtcgatctgttccctcacacgccgcattgcgagatggttatgctctttgagagatgaaggaagtgtgtgtctaccaatgcctcagattcttgacctgtgtcgaggaccctatcagtttttcctcatcaccttggcccatccatatgttgtaacttagtgacatctattcgattgagaggccaggacagttggtggtgggatttgccttcttttgatataggatcggctactcttaatcacctgtacgtatttattgtttttgttaaatggatgtaatagtaggattaatttcaaagaaaaaaaaagagaaaatgattcctagagattgagttacagtaggtccaggctgatgaggcatcacattcataaacgtacctgttgctgctgaagttgagaggcatcatcacattcacaaggcaggctcctgcaggcatgaggtttaggtggccagcatgcaattttttttattcattccatttagagcatttattaattaagggctaggtagctgctgcaggacactcccattggctgcaagaccaggtttcttcatccataaattctgagctaacaaccgcttgactgccggtggtggtgttggtgttggtt

SEQ ID NO: 16723 - DNA, 2831 bp, Zea Mays
atggcgctgcagggaatctcatatgcaatagcaaagaaaaagaagggaatgacagttggttttgtgacttttcagagtgttgaacaactaacaaatgctgttcagatccttaagaagaacccttctggtggaaaggaaataaagatagtagatgccaatcgtaggtctcatcaaaaagcacatgatggagcacttgtatccaatactggaaccacaacagaaaatggtagcagtcctactacacctgcagaggaaacatctgtgcttgaatcggtgtcatcaagtaaaaaaggtgcccgtgatgcagttactccccttgccaatatgacttacattgatcagctagaacacaaaaatcaatctatggcacagatactgaagaaacttactcgcaatgctaggaaagcttgcccacctgccattccccatcctgattgggtttttaaatcaaaggaaatcggtggtcttccttgcaagtttgaaggcattttggagtccccagttgttaatggataccgtaacaagtgtgagttctctgtaggatattccttagagggcaaaaagacagtaggatttatgctcggaaatttcagggaaggtgtgactgctgttgaggaacctgtgaattgtccaaatgtctcagaaatttcctgcaaatacgctcagatgttccaagattttcttcaaccatcaagtttccctttgtggagcaggattgacaactctgggttttggcgccaactcacagtccgtgaaggaagatgtccagctgaagctgttgtttcacagaatgcagaatcacaaatatcagaagtcatgcttattgtgcaggatgatccatcgtcacctcattcctcacaagccaataactaatactagtatgaggaatggagtcattccatcaaatttgaggaatgatctcatgatgcaacacctcatctggtgtgttcaacaggtgttgatgaagctcttatgaaagaagagtttgacaagctgtctgctatcctgatacaaggagcagcaacatgctcacctcccttgccactgacaactattgtagtgcaagatcataaagggatatcaaatgctgcacctactgattgcccactgatcccactattggtaccaaagggagatcagttggatggcacaacagaagataaaataagaatccatgatcacataagcaacttaaagttctctctatcaccaacagcttttttccaggttaatactcttgctgcggaaaggttgtacacccttgctggtgattgggctaatctcaattcagacacattactttttgatgtgtgttgtgggactggaactattggcctgaccttagcacagcatgttggaatggttgttgggattgaaatgaatgaatcggcagtttcaaatgcttgcagaaatgcccttgtcaatggcataaaaaattgtcgttttgtctgtggtaaggctgaagatgtgatggggccccttctcacagaatatcttggttcaccacagcagcaggctgcagcttctaaaagtaattctgaaatcgatgatgcaagcaaaaatgaggatacaattggctgtgcaagttatgatggtgaaaatatagatagctcaaagcagagaaatgacaatgctgaaggtcagcagcctatgggtgcgtcagttgatcatcctacctgtgcaagcgaggtggatgaaaacaatgtggcttctggtgaacagaattgtggggaagcatcattggttaatgataaacccattgagacagcatcagataatagtttggagcaaggcaaggcatgcaaggatggttcttccagtccaaacaacaatgtccttgctgctaatgcatgccagtttaagaatgtcgttgctattgtagactctccacgtgttggccttcgccctactgtcaggggttgggacaggattattcaagtgttgtccacagttgtccctcaaaattggagggacgagagagaacaccagagtgatcaaggcattgaggacgcatccacgtattcgacgtctagtgtacgtttcctgcaaccctgacagtctagtcgccaacgcgatcgagctttgcacaccaacatccgagaaacaagagaagaacaagggcaaccgagggtggcggtctatgagcagcgcggggcttgctcggcagaggacgaagtcgatgcccaactctgagccttttatccccaagagggcaatggctgtcgatctgttccctcacacgccgcattgcgagatggttatgctctttgagagatgaaggaagtgtgtgtctaccaatgcctcagattcttgacctgtgtcgaggaccctatcagtttttcctcatcaccttggcccatccatatgttgtaacttagtgacatctattcgattgagaggccaggacagttggtggtgggatttgccttcttttgatataggatcggctactcttaatcacctgtacgtatttattgtttttgttaaatggatgtaatagtaggattaatttcagaagaaaaaaaaagagaaaatgattcctagagattgagttacagtaggtccaggctgatgaggcatcacattcataaacgtacctgttgctgctgaagttgagaggcatcatcacattcacaaggcaggctcctgcaggcatgaggtttaggtggccagcatgcaattttttttattcattccatttagagcatttattaattaagggctaggtagctgctgcaggacactcccattggctgcaagaccaggtttcttcatccataaattctgagctaacaaccgcttgactgccggtggtggtgttggtgttggtt

SEQ ID NO: 16724 - DNA, 2732 bp, Zea Mays
agacaacctgcctctgataccaattggaatctcatatgcaatagcaaagaaaaagaagggaatgacagttggttttgtgacttttcagagtgttgaacaactaacaaatgctgttcagatccttaagaagaacccttctggtggaaaggaaataaagatagtagatgccaatcgtaggtctcatcaaaaagcacatgatggagcacttgtatccaatactggaaccacaacagaaaatggtagcagtcctactacacctgcagaggaaacatctgtgcttgaatcggtgtcatcaagtaaaaaaggtgcccgtgatgcagttactccccttgccaatatgacttacattgatcagctagaacacaaaaatcaatctatggcacagatactgaagaaacttactcgcaatgctaggaaagcttgcccacctgccattccccatcctgattgggtttttaaatcaaaggaaatcggtggtcttccttgcaagtttgaaggcattttggagtccccagttgttaatggataccgtaacaagtgtgagttctctgtaggatattccttagagggcaaaaagacagtaggatttatgctcggaaatttcagggaaggtgtgactgctgttgaggaacctgtgaattgtccaaatgtctcagaaatttcctgcaaatacgctcagatgttccaagattttcttcaaccatcaagtttccctttgtggagcaggattgacaactctgggttttggcgccaactcacagtccgtgaaggaagatgtccagctgaagctgttgtttcacagaatgcagaatcacaaatatcagaagtcatgcttattgtgcaggtgtgttcaacaggtgttgatgaagctcttatgaaagaagagtttgacaagctgtctgctatcctgatacaaggagcagcaacatgctcacctcccttgccactgacaactattgtagtgcaagatcataaagggatatcaaatgctgcacctactgattgcccactgatcccactattggtaccaaagggagatcagttggatggcacaacagaagataaaataagaatccatgatcacataagcaacttaaagttctctctatcaccaacagcttttttccaggttaatactcttgctgcggaaaggttgtacacccttgctggtgattgggctaatctcaattcagacacattactttttgatgtgtgttgtgggactggaactattggcctgaccttagcacagcatgttggaatggttgttgggattgaaatgaatgaatcggcagtttcaaatgcttgcagaaatgcccttgtcaatggcataaaaaattgtcgttttgtctgtggtaaggctgaagatgtgatggggccccttctcacagaatatcttggttcaccacagcagcaggctgcagcttctaaaagtaattctgaaatcgatgatgcaagcaaaaatgaggatacaattggctgtgcaagttatgatggtgaaaatatagatagctcaaagcagagaaatgacaatgctgaaggtcagcagcctatgggtgcgtcagttgatcatcctacctgtgcaagcgaggtggatgaaaacaatgtggcttctggtgaacagaattgtggggaagcatcattggttaatgataaacccattgagacagcatcagataatagtttggagcaaggcaaggcatgcaaggatggttcttccagtccaaacaacaatgtccttgctgctaatgcatgccagtttaagaatgtcgttgctattgtagactctccacgtgttggccttcgccctactgtcaggggttgggacaggattattcaagtgttgtccacagttgtccctcaaaattggagggacgagagagaacaccagagtgatcaaggcattgaggacgcatccacgtattcgacgtctagtgtacgtttcctgcaaccctgacagtctagtcgccaacgcgatcgagctttgcacaccaacatccgagaaacaagagaagaacaagggcaaccgagggtggcggtctatgagcagcgcggggcttgctcggcagaggacgaagtcgatgcccaactctgagccttttatccccaagagggcaatggctgtcgatctgttccctcacacgccgcattgcgagatggttatgctctttgagagatgaaggaagtgtgtgtctaccaatgcctcagattcttgacctgtgtcgaggaccctatcagtttttcctcatcaccttggcccatccatatgttgtaacttagtgacatctattcgattgagaggccaggacagttggtggtgggatttgccttcttttgatataggatcggctactcttaatcacctgtacgtatttattgtttttgttaaatggatgtaatagtaggattaatttcaaagaaaaaaaaagagaaaatgattcctagagattgagttacagtaggtccaggctgatgaggcatcacattcataaacgtacctgttgctgctgaagttgagaggcatcatcacattcacaaggcaggctcctgcaggcatgaggtttaggtggccagcatgcaattttttttattcattccatttagagcatttattaattaagggctaggtagctgctgcaggacactcccattggctgcaagaccaggtttcttcatccataaattctgagctaacaaccgcttgactgccggtggtggtgttggtgttggtt

SEQ ID NO: 16725 - DNA, 3271 bp, Zea Mays
cgagaattcctttcgttgcgcgttgcaagtgcaagtgcaacccgccgatccgcgcacacagccgaccgccgccgccatggaggacgtcctgacaccgccgccgcagccggaactcgtcggagagaagcgtaagagggatgagacttcgctggatgcgtccattgaagacgctccagccgcccccgcctccaccggcggcgccgaggatgcggccggcagcgacgtcgcccggcacccgatgtggaagacgagcctgtgctcctactttcgccgtcgcggcgccggcgccgaagagtgcagccacggggagtcctgccgttacgcgcacaccgaggaggagctccgcccgcgtcccgacggcacctgggaccccacctctgaccgcgccaagaagctgcgcaaggtcgccgcggaggcccaggaggaggccgaggaggaggtcacggtggatgagcagtcacttgaaaagtgcctcgtcgggctccccatggggtggacggctgataggctcaagcccttcctccaggaccagggaatctcatatgcaatagcaaagaaaaagaagggaatgacagttggttttgtgacttttcagagtgttgaacaactaacaaatgctgttcagatccttaagaagaacccttctggtggaaaggaaataaagatagtagatgccaatcgtaggtctcatcaaaaagcacatgatggagcacttgtatccaatactggaaccacaacagaaaatggtagcagtcctactacacctgcagaggaaacatctgtgcttgaatcggtgtcatcaagtaaaaaaggtgcccgtgatgcagttactccccttgccaatatgacttacattgatcagctagaacacaaaaatcaatctatggcacagatactgaagaaacttactcgcaatgctaggaaagcttgcccacctgccattccccatcctgattgggtttttaaatcaaaggaaatcggtggtcttccttgcaagtttgaaggcattttggagtccccagttgttaatggataccgtaacaagtgtgagttctctgtaggatattccttagagggcaaaaagacagtaggatttatgctcggaaatttcagggaaggtgtgactgctgttgaggaacctgtgaattgtccaaatgtctcagaaatttcctgcaaatacgctcagatgttccaagattttcttcaaccatcaagtttccctttgtggagcaggattgacaactctgggttttggcgccaactcacagtccgtgaaggaagatgtccagctgaagctgttgtttcacagaatgcagaatcacaaatatcagaagtcatgcttattgtgcaggatgatccatcgtcacctcattcctcacaagccaataactaatactagtatgaggaatggagtcattccatcaaatttgaggaatgatctcatgatgcaacacctcatctggtgtgttcaacaggtgttgatgaagctcttatgaaagaagagtttgacaagctgtctgctatcctgatacaaggagcagcaacatgctcacctcccttgccactgacaactattgtagtgcaagatcataaagggatatcaaatgctgcacctactgattgcccactgatcccactattggtaccaaagggagatcagttggatggcacaacagaagataaaataagaatccatgatcacataagcaacttaaagttctctctatcaccaacagcttttttccaggttaatactcttgctgcggaaaggttgtacacccttgctggtgattgggctaatctcaattcagacacattactttttgatgtgtgttgtgggactggaactattggcctgaccttagcacagcatgttggaatggttgttgggattgaaatgaatgaatcggcagtttcaaatgcttgcagaaatgcccttgtcaatggcataaaaaattgtcgttttgtctgtggtaaggctgaagatgtgatggggccccttctcacagaatatcttggttcaccacagcagcaggctgcagcttctaaaagtaattctgaaatcgatgatgcaagcaaaaatgaggatacaattggctgtgcaagttatgatggtgaaaatatagatagctcaaagcagagaaatgacaatgctgaaggtcagcagcctatgggtgcgtcagttgatcatcctacctgtgcaagcgaggtggatgaaaacaatgtggcttctggtgaacagaattgtggggaagcatcattggttaatgataaacccattgagacagcatcagataatagtttggagcaaggcaaggcatgcaaggatggttcttccagtccaaacaacaatgtccttgctgctaatgcatgccagtttaagaatgtcgttgctattgtagactctccacgtgttggccttcgccctactgtgatcaaggcattgaggacgcatccacgtattcgacgtctagtgtacgtttcctgcaaccctgacagtctagtcgccaacgcgatcgagctttgcacaccaacatccgagaaacaagagaagaacaagggcaaccgagggtggcggtctatgagcagcgcggggcttgctcggcagaggacgaagtcgatgcccaactctgagccttttatccccaagagggcaatggctgtcgatctgttccctcacacgccgcattgcgagatggttatgctctttgagagatgaaggaagtgtgtgtctaccaatgcctcagattcttgacctgtgtcgaggaccctatcagtttttcctcatcaccttggcccatccatatgttgtaacttagtgacatctattcgattgagaggccaggacagttggtggtgggatttgccttcttttgatataggatcggctactcttaatcacctgtacgtatttattgtttttgttaaatggatgtaatagtaggattaatttcaaagaaaaaaaaagagaaaatgattcctagagattgagttacagtaggtccaggctgatgaggcatcacattcataaacgtacctgttgctgctgaagttgagaggcatcatcacattcacaaggcaggctcctgcaggcatgaggtttaggtggccagcatgcaattttttttattcattccatttagagcatttattaattaagggctaggtagctgctgcaggacactcccattggctgcaagaccaggtttcttcatccataaattctgagctaacaaccgcttgactgccggtggtggtgttggtgttggtt

SEQ ID NO: 16726 - DNA, 3239 bp, Zea Mays
cgagaattcctttcgttgcgcgttgcaagtgcaagtgcaacccgccgatccgcgcacacagccgaccgccgccgccatggaggacgtcctgacaccgccgccgcagccggaactcgtcggagagaagcgtaagagggatgagacttcgctggatgcgtccattgaagacgctccagccgcccccgcctccaccggcggcgccgaggatgcggccggcagcgacgtcgcccggcacccgatgtggaagacgagcctgtgctcctactttcgccgtcgcggcgccggcgccgaagagtgcagccacggggagtcctgccgttacgcgcacaccgaggaggagctccgcccgcgtcccgacggcacctgggaccccacctctgaccgcgccaagaagctgcgcaaggtcgccgcggaggcccaggaggaggccgaggaggaggtcacggtggatgagcagtcacttgaaaagtgcctcgtcgggctccccatggggtggacggctgataggctcaagcccttcctccaggaccagggaatctcatatgcaatagcaaagaaaaagaagggaatgacagttggttttgtgacttttcagagtgttgaacaactaacaaatgctgttcagatccttaagaagaacccttctggtggaaaggaaataaagatagtagatgccaatcgtaggtctcatcaaaaagcacatgatggagcacttgtatccaatactggaaccacaacagaaaatggtagcagtcctactacacctgcagaggaaacatctgtgcttgaatcggtgtcatcaagtaaaaaaggtgcccgtgatgcagttactccccttgccaatatgacttacattgatcagctagaacacaaaaatcaatctatggcacagatactgaagaaacttactcgcaatgctaggaaagcttgcccacctgccattccccatcctgattgggtttttaaatcaaaggaaatcggtggtcttccttgcaagtttgaaggcattttggagtccccagttgttaatggataccgtaacaagtgtgagttctctgtaggatattccttagagggcaaaaagacagtaggatttatgctcggaaatttcagggaaggtgtgactgctgttgaggaacctgtgaattgtccaaatgtctcagaaatttcctgcaaatacgctcagatgttccaagattttcttcaaccatcaagtttccctttgtggagcaggattgacaactctgggttttggcgccaactcacagtccgtgaaggaagatgtccagctgaagctgttgtttcacagaatgcagaatcacaaatatcagaagtcatgcttattgtgcaggtgtgttcaacaggtgttgatgaagctcttatgaaagaagagtttgacaagctgtctgctatcctgatacaaggagcagcaacatgctcacctcccttgccactgacaactattgtagtgcaagatcataaagggatatcaaatgctgcacctactgattgcccactgatcccactattggtaccaaagggagatcagttggatggcacaacagaagataaaataagaatccatgatcacataagcaacttaaagttctctctatcaccaacagcttttttccaggttaatactcttgctgcggaaaggttgtacacccttgctggtgattgggctaatctcaattcagacacattactttttgatgtgtgttgtgggactggaactattggcctgaccttagcacagcatgttggaatggttgttgggattgaaatgaatgaatcggcagtttcaaatgcttgcagaaatgcccttgtcaatggcataaaaaattgtcgttttgtctgtggtaaggctgaagatgtgatggggccccttctcacagaatatcttggttcaccacagcagcaggctgcagcttctaaaagtaattctgaaatcgatgatgcaagcaaaaatgaggatacaattggctgtgcaagttatgatggtgaaaatatagatagctcaaagcagagaaatgacaatgctgaaggtcagcagcctatgggtgcgtcagttgatcatcctacctgtgcaagcgaggtggatgaaaacaatgtggcttctggtgaacagaattgtggggaagcatcattggttaatgataaacccattgagacagcatcagataatagtttggagcaaggcaaggcatgcaaggatggttcttccagtccaaacaacaatgtccttgctgctaatgcatgccagtttaagaatgtcgttgctattgtagactctccacgtgttggccttcgccctactgtcaggggttgggacaggattattcaagtgttgtccacagttgtccctcaaaattggagggacgagagagaacaccagagtgatcaaggcattgaggacgcatccacgtattcgacgtctagtgtacgtttcctgcaaccctgacagtctagtcgccaacgcgatcgagctttgcacaccaacatccgagaaacaagagaagaacaagggcaaccgagggtggcggtctatgagcagcgcggggcttgctcggcagaggacgaagtcgatgcccaactctgagccttttatccccaagagggcaatggctgtcgatctgttccctcacacgccgcattgcgagatggttatgctctttgagagatgaaggaagtgtgtgtctaccaatgcctcagattcttgacctgtgtcgaggaccctatcagtttttcctcatcaccttggcccatccatatgttgtaacttagtgacatctattcgattgagaggccaggacagttggtggtgggatttgccttcttttgatataggatcggctactcttaatcacctgtacgtatttattgtttttgttaaatggatgtaatagtaggattaatttcaaagaaaaaaaaagagaaaatgattcctagagattgagttacagtaggtccaggctgatgaggcatcacattcataaacgtacctgttgctgctgaagttgagaggcatcatcacattcacaaggcaggctcctgcaggcatgaggtttaggtggccagcatgcaattttttttattcattccatttagagcatttattaattaagggctaggtagctgctgcaggacactcccattggctgcaagaccaggtttcttcatccataaattctgagctaacaaccgcttgactgccggtggtggtgttggtgttggtt

SEQ ID NO: 16727 - DNA, 3350 bp, Zea Mays
cgagaattcctttcgttgcgcgttgcaagtgcaagtgcaacccgccgatccgcgcacacagccgaccgccgccgccatggaggacgtcctgacaccgccgccgcagccggaactcgtcggagagaagcgtaagagggatgagacttcgctggatgcgtccattgaagacgctccagccgcccccgcctccaccggcggcgccgaggatgcggccggcagcgacgtcgcccggcacccgatgtggaagacgagcctgtgctcctactttcgccgtcgcggcgccggcgccgaagagtgcagccacggggagtcctgccgttacgcgcacaccgaggaggagctccgcccgcgtcccgacggcacctgggaccccacctctgaccgcgccaagaagctgcgcaaggtcgccgcggaggcccaggaggaggccgaggaggaggtcacggtggatgagcagtcacttgaaaagtgcctcgtcgggctccccatggggtggacggctgataggctcaagcccttcctccaggaccagggaatctcatatgcaatagcaaagaaaaagaagggaatgacagttggttttgtgacttttcagagtgttgaacaactaacaaatgctgttcagatccttaagaagaacccttctggtggaaaggaaataaagatagtagatgccaatcgtaggtctcatcaaaaagcacatgatggagcacttgtatccaatactggaaccacaacagaaaatggtagcagtcctactacacctgcagaggaaacatctgtgcttgaatcggtgtcatcaagtaaaaaaggtgcccgtgatgcagttactccccttgccaatatgacttacattgatcagctagaacacaaaaatcaatctatggcacagatactgaagaaacttactcgcaatgctaggaaagcttgcccacctgccattccccatcctgattgggtttttaaatcaaaggaaatcggtggtcttccttgcaagtttgaaggcattttggagtccccagttgttaatggataccgtaacaagtgtgagttctctgtaggatattccttagagggcaaaaagacagtaggatttatgctcggaaatttcagggaaggtgtgactgctgttgaggaacctgtgaattgtccaaatgtctcagaaatttcctgcaaatacgctcagatgttccaagattttcttcaaccatcaagtttccctttgtggagcaggattgacaactctgggttttggcgccaactcacagtccgtgaaggaagatgtccagctgaagctgttgtttcacagaatgcagaatcacaaatatcagaagtcatgcttattgtgcaggatgatccatcgtcacctcattcctcacaagccaataactaatactagtatgaggaatggagtcattccatcaaatttgaggaatgatctcatgatgcaacacctcatctggtgtgttcaacaggtgttgatgaagctcttatgaaagaagagtttgacaagctgtctgctatcctgatacaaggagcagcaacatgctcacctcccttgccactgacaactattgtagtgcaagatcataaagggatatcaaatgctgcacctactgattgcccactgatcccactattggtaccaaagggagatcagttggatggcacaacagaagataaaataagaatccatgatcacataagcaacttaaagttctctctatcaccaacagcttttttccaggttaatactcttgctgcggaaaggttgtacacccttgctggtgattgggctaatctcaattcagacacattactttttgatgtgtgttgtgggactggaactattggcctgaccttagcacagcatgttggaatggttgttgggattgaaatgaatgaatcggcagtttcaaatgcttgcagaaatgcccttgtcaatggcataaaaaattgtcgttttgtctgtggtaaggctgaagatgtgatggggccccttctcacagaatatcttggttcaccacagcagcaggctgcagcttctaaaagtaattctgaaatcgatgatgcaagcaaaaatgaggatacaattggctgtgcaagttatgatggtgaaaatatagatagctcaaagcagagaaatgacaatgctgaaggtcagcagcctatgggtgcgtcagttgatcatcctacctgtgcaagcgaggtggatgaaaacaatgtggcttctggtgaacagaattgtggggaagcatcattggttaatgataaacccattgagacagcatcagataatagtttggagcaaggcaaggcatgcaaggatggttcttccagtccaaacaacaatgtccttgctgctaatgcatgccagtttaagaatgtcgttgctattgtagactctccacgtgttggccttcgccctactgtcaggggttgggacaggattattcaagtgttgtccacagttgtccctcaaaattggagggacgagagagaacaccagagtgatcaaggcattgaggacgcatccacgtattcgacgtctagtgtacgtttcctgcaaccctgacagtctagtcgccaacgcgatcgagctttgcacaccaacatccgagaaacaagagaagaacaagggcaaccgagggtggcggtctatgagcagcgcggggcttgctcggcagaggacgaagtcgatgcccaactctgagccttttatccccaagagggcaatggctgtcgatctgttccctcacacgccgcattgcgagatggttatgctctttgagagatgaaggaagtgtgtgtctaccaatgcctcagattcttgacctgtgtcgaggaccctatcagtttttcctcatcaccttggcccatccatatgttgtaacttagtgacatctattcgattgagaggccaggacagttggtggtgggatttgccttcttttgatataggatcggctactcttaatcacctgtacgtatttattgtttttgttaaatggatgtaatagtaggattaatttcaaagaaaaaaaaagagaaaatgattcctagagattgagttacagtaggtccaggctgatgaggcatcacattcataaacgtacctgttgctgctgaagttgagaggcatcatcacattcacaaggcaggctcctgcaggcatgaggtttaggtggccagcatgcaattttttttattcattccatttagagcatttattaattaagggctaggtagctgctgcaggacactcccattggctgcaagaccaggtttcttcatccataaattctgagctaacaaccgcttgactgccggtggtggtgttggtgttggtt

SEQ ID NO: 16728 - DNA, 3239 bp, Zea Mays
cgagaattcctttcgttgcgcgttgcaagtgcaagtgcaacccgccgatccgcgcacacagccgaccgccgccgccatggaggacgtcctgacaccgccgccgcagccggaactcgtcggagagaagcgtaagagggatgagacttcgctggatgcgtccattgaagacgctccagccgcccccgcctccaccggcggcgccgaggatgcggccggcagcgacgtcgcccggcacccgatgtggaagacgagcctgtgctcctactttcgccgtcgcggcgccggcgccgaagagtgcagccacggggagtcctgccgttacgcgcacaccgaggaggagctccgcccgcgtcccgacggcacctgggaccccacctctgaccgcgccaagaagctgcgcaaggtcgccgcggaggcccaggaggaggccgaggaggaggtcacggtggatgagcagtcacttgaaaagtgcctcgtcgggctccccatggggtggacggctgataggctcaagcccttcctccaggaccagggaatctcatatgcaatagcaaagaaaaagaagggaatgacagttggttttgtgacttttcagagtgttgaacaactaacaaatgctgttcagatccttaagaagaacccttctggtggaaaggaaataaagatagtagatgccaatcgtaggtctcatcaaaaagcacatgatggagcacttgtatccaatactggaaccacaacagaaaatggtagcagtcctactacacctgcagaggaaacatctgtgcttgaatcggtgtcatcaagtaaaaaaggtgcccgtgatgcagttactccccttgccaatatgacttacattgatcagctagaacacaaaaatcaatctatggcacagatactgaagaaacttactcgcaatgctaggaaagcttgcccacctgccattccccatcctgattgggtttttaaatcaaaggaaatcggtggtcttccttgcaagtttgaaggcattttggagtccccagttgttaatggataccgtaacaagtggaaggtgtgactgctgttgaggaacctgtgaattgtccaaatgtctcagaaatttcctgcaaatacgctcagatgttccaagattttcttcaaccatcaagtttccctttgtggagcaggattgacaactctgggttttggcgccaactcacagtccgtgaaggaagatgtccagctgaagctgttgtttcacagaatgcagaatcacaaatatcagaagtcatgcttattgtgcaggatgatccatcgtcacctcattcctcacaagccaataactaatactagtatgaggaatggagtcattccatcaaatttgaggaatgatctcatgatgcaacacctcatctggtgtgttcaacaggtgttgatgaagctcttatgaaagaagagtttgacaagctgtctgctatcctgatacaaggagcagcaacatgctcacctcccttgccactgacaactattgtagtgcaagatcataaagggatatcaaatgctgcacctactgattgcccactgatcccactattggtaccaaagggagatcagttggatggcacaacagaagataaaataagaatccatgatcacataagcaacttaaagttctctctatcaccaacagcttttttccaggttaatactcttgctgcggaaaggttgtacacccttgctggtgattgggctaatctcaattcagacacattactttttgatgtgtgttgtgggactggaactattggcctgaccttagcacagcatgttggaatggttgttgggattgaaatgaatgaatcggcagtttcaaatgcttgcagaaatgcccttgtcaatggcataaaaaattgtcgttttgtctgtggtaaggctgaagatgtgatggggccccttctcacagaatatcttggttcaccacagcagcaggctgcagcttctaaaagtaattctgaaatcgatgatgcaagcaaaaatgaggatacaattggctgtgcaagttatgatggtgaaaatatagatagctcaaagcagagaaatgacaatgctgaaggtcagcagcctatgggtgcgtcagttgatcatcctacctgtgcaagcgaggtggatgaaaacaatgtggcttctggtgaacagaattgtggggaagcatcattggttaatgataaacccattgagacagcatcagataatagtttggagcaaggcaaggcatgcaaggatggttcttccagtccaaacaacaatgtccttgctgctaatgcatgccagtttaagaatgtcgttgctattgtagactctccacgtgttggccttcgccctactgtcaggggttgggacaggattattcaagtgttgtccacagttgtccctcaaaattggagggacgagagagaacaccagagtacgtttcctgcaaccctgacagtctagtcgccaacgcgatcgagctttgcacaccaacatccgagaaacaagagaagaacaagggcaaccgagggtggcggtctatgagcagcgcggggcttgctcggcagaggacgaagtcgatgcccaactctgagccttttatccccaagagggcaatggctgtcgatctgttccctcacacgccgcattgcgagatggttatgctctttgagagatgaaggaagtgtgtgtctaccaatgcctcagattcttgacctgtgtcgaggaccctatcagtttttcctcatcaccttggcccatccatatgttgtaacttagtgacatctattcgattgagaggccaggacagttggtggtgggatttgccttcttttgatataggatcggctactcttaatcacctgtacgtatttattgtttttgttaaatggatgtaatagtaggattaatttcaaagaaaaaaaaagagaaaatgattcctagagattgagttacagtaggtccaggctgatgaggcatcacattcataaacgtacctgttgctgctgaagttgagaggcatcatcacattcacaaggcaggctcctgcaggcatgaggtttaggtggccagcatgcaattttttttattcattccatttagagcatttattaattaagggctaggtagctgctgcaggacactcccattggctgcaagaccaggtttcttcatccataaattctgagctaacaaccgcttgactgccggtggtggtgttggtgttggtt

SEQ ID NO: 16729 - DNA, 1296 bp, Zea Mays
cgagaattcctttcgttgcgcgttgcaagtgcaagtgcaacccgccgatccgcgcacacagccgaccgccgccgccatggaggacgtcctgacaccgccgccgcagccggaactcgtcggagagaagcgtaagagggatgagacttcgctggatgcgtccattgaagacgctccagccgcccccgcctccaccggcggcgccgaggatgcggccggcagcgacgtcgcccggcacccgatgtggaagacgagcctgtgctcctactttcgccgtcgcggcgccggcgccgaagagtgcagccacggggagtcctgccgttacgcgcacaccgaggaggagctccgcccgcgtcccgacggcacctgggaccccacctctgaccgcgccaagaagctgcgcaaggtcgccgcggaggcccaggaggaggccgaggaggaggtcacggtggatgagcagtcacttgaaaagtgcctcgtcgggctccccatggggtggacggctgataggctcaagcccttcctccaggaccagaagatttctctggagttgaaaaaactggtgaagctattgcacaatatctcttgaaggctattgatgaaattggaccaggaaatgtccttcaagtggtaacggacaatgctgctaattgcaaagcagctggaaaggaaattgaaaaagctgaaaatataattgctgtcacagagccaatatactccgtattaaggtttagtgatggagaaggtccaaagatgggagaaatctacgagagaatggattgcatggttggtgaaataaaagatataatgacaaaagatgataacctgcataaagatgattttgttgaggttgaaagtatcgttatgcgccgttgggagaagatgaatcttccccttcattgcttagcatatgccttatgccccaaattttatcatcaacaatacctcaacaccccagctcctggtggcaccataaggcaagctcctaatacagataaggaggttatgaccaatgtgcttgaagcttttagtaaaattgcagattctccaagggaacaacaaattttgagggagcaatttaatgcttttattatgaagaagggaatgtttgcgctgccacccgttcaattggatgcatttaccatggagccgattgaatggtgggtaagttatggttctgagactccggatttagctgaggttgcaaaaaagttttatctcaacccatcagcagttcatcgaccgagagaatttggagcacattcaaccatatccataacaccaagcgcaataggatga

SEQ ID NO: 16730 - DNA, 1757 bp, Zea Mays
gctcttggtccacggcgacctcctctggccgagcaaaggaagcagacctgttcccacttcctcgcatctaaacccacgtcaccaaccccgaccgaacctcctcctctctctctctctgctccacctccgttcgtccgactccgaccgcagcccaactcctgctgacttcaacatccattcccccgccattcgcgccaggattactccatctctacttctactacttgttgctgatccctcctccccctcccaccaccaccctccgccgccggaccctcatcagccaacaacaataatggcgtcgatccgccggccgcactcgcccgccaagcagcacctgctgcgccaccaccaccccttcgccacgtcctccccgccctcctcgccgctccgccactcctcgacatcctcctccccacgcacccaccaccacctccaccacccgcaccccttcctcttcttcacgcgccgcccgctcccgcgcttcgccgccttcttcctcctcggctccttcctcggcctcctccacttcctctcccacctcccccaccagaccccgcacctccgcccggcgtcctccagccccgccgtcatcccacgccaccagctccccatcgaccgccttaacaaccaccaccaccaccaccacgacgacgacgacgacgaaagcaacagcaagctgctcgtcgtcgtcacgcccacgcgcgcgcgcgccgcgcaggcgtactacctcagccggctgggccacacgctgcgcctcgtccacccgcccctgctctggctcgtcgtcgaggccggcgaccccacgcccgaggccgccgccgcgctgcgggggaccaccgtcatgcaccgctacgtcggctgctgcgacaagctcaacgcatccgcctccgcctccgacgacgcgctccgcttccgcccgcaccagatgaacgccgcgctcgagctcctcgagaaccaccgcatcgacgccattgtctatttcgccgacgaggagggcgtctactccctcgacctcttcaaacgtctgcgccaagtcaggaggttcggcacatggcctgtgccagtgatctccgagaacagaaaggatggtgttggtgtggtgctggaaggccctgtgtgcaaacagaaccaagtcgtgggatggcacacaagcgagcatgccagcaagctccgtagattccatgttgcaatgtcgggtttcgcattcaacagcaccatgctctgggaccccaggctccgctcccatttggcatggaattcaatccggcatccagacacagcgaaacaaggcctccaagcaacaaccacgttcgtggagcagctagtggaggatgagagccagatggaaggcatacccgctgactgctcccaaataatgaactggcatgtgccggctggatctgagaatctcgcctatcccagaggatggcgagttgcggcgaatctggatgtgatcattcctcttaaatagtattcaacagctatgttcatcaaagcaactgactcctttgacaggcatatactatagaaattaagccatgaagttttggcttatatagcgcagaggaatcccaggttgactacattggagaagcagctcttcagaaggggaggaggctttcagccaaactggacaatcgacgaactcagccaaactggacaaaaaagccatcgacgatctcacaaactgaacatctgcaaatctgaaataacaggaaatggacaatcagaagagaacatggcttggttctttt

SEQ ID NO: 16731 - DNA, 1369 bp, Zea Mays
atgcagattcccaagtggagttgcggcggctggttatcatttatcatcaccttcgcctcacaccttccggccgcccattccgatccgatccccggccggccacctaccaccggtcagccccatcaatctctgaggcagcgtcagccatcacgcctccctcatcgatctccccgccgccgccgctgctaataccagataatggaggccggcgccgccgctgctgccactgccatctaccctctgcaccgatgcaaaaccatacacctggtgaggcatgcccaaggtgtccacaacgtggaaggcgacacggatcacagcgcctacatgaaacccgacttcttcgacgcgagcatcactcccttgggctggaaccaggttgacctcctgcgagagcatgtgaaggaatctgggcttgcagaaaagattgagctggttatttgttctcctttgtcgaggaccatgcagactgcagtgggagtttttggtggcgaaagctgcagtaatggtgtgagtgtgcctccactgatggtggagaatgctggacgtccggcagtttcaagtttgaactgcccaccatttcttgctgttgaggcctgcagggagcgcttgggtgtccatccttgtgacaagaggaggagcatcacagagtaccgtgctctcttccctgccattgatttttcgctgatagagagtgacgaagatgttctctgggtaccagatgtcagagaaacctttgagtcactcgcagaaaggggtatgaagttcattgactggctatggacaagagaagagagagagatagccatcgtcacccatagcggtttattaagccataccttgcgcatgtacagcaaagagtgccatccaacagtagcacaagaactttgcaaactgcgagctccggtccttggtactggttgacaggagtatgcttggttcagatggccccagttacaacaactaccctggcaaaatgaaaatcccagccggacttgatctgcccagcgatgacaagaagcaacctcttcagaaccagagcggctgagcaggcctgtcttggggcttgtttggtgttcaccaccactgattccttttcttttgtcatcctattttgaaacttccctagctgcagtcagtccattttttgtgaactattctgagagtactattctgaactttcccatttgtggttgttgagcaccatttgtggtactgaacacggccggacggtccaacctgcggacggttcgtctatagacgtggacggtccgtgattagattagatcaggcgtaattaacctcttttccgtacatatttatctatctaaactcgcggattctgttggagaacccttagcaacgagtccag

SEQ ID NO: 16732 - DNA, 1441 bp, Zea Mays
gcccgggacctcatctttccctcacagcaatgtcttcccacccaccctcctccacagattcaccagtggtgtgatgtcactgattctgatgataggattcatcgtcgtctcatccgtccgccccttgggatgatctctagcagaatggaacttggcgccaccactgccctctaccctctgcaccgctgcaaaaccatttacctggtcaggcatgcccagggcattcacaatgtcgcgggggagaaggacttcggcgcgtacatgtcacatgaactgttcgatgctcagctcactcctttgggttggaaccaagtcgatggtctgcgggagcatgtgaagaaaagtgggcttgcagaaaagattgaattagttatttcttcccctttactgaggactatgcaaactgcagttggtgtctttggtggtgaaaagtatactgatggtgtaaatgcacctccactaatggtcgaaaatgccagacacagtggccgtccggcagtttcaagtttgaactgccccccatttattgcagtcgaaacctgcagagagcacttgggtgtccatccctgtgacaagaggaggagcataacagaataccggcctctctttcctgcgattgatttttcattatagagaatgatgaagatgttctttgggaaccagatgtgagagaaccaaatgaggctgtcgcattgaggggtatgaagttcatggactggttgtggacaagagaagagaaagagatagctattgtcagtcacagtggtttcttgtttcacaccttaagcatgtacagcaaggagtgccatccaaccataagcgacgaagttagcaagcactttgcaaactgcgagctacggtcgatggtgttggttgacagaagcatgcttgggtcatattcctcaagattcaactatgctggcaagaatccaaccggactagatgtgccaagtgatattgcagataagaagcaggttgacgaagctcagaagaactaaagcaacctcgaaagcataccatatatgacttggattatcaagaaattctgacctttgcgaagcttgtttgctttgaagaggacaagctaagagggcatctacagatagagtttacgcataccattttgttagtcgagttgaactacgcagcaatgtattagcatgtctgctcttttgtctcagcctacattgaggttcagggcattggactaggatcatctatttatgataataataaccggatcacctacattcaccaggtgatgcatggcaaagttctcttggtttccgagctgttctagtctaggggtggctgtacaacgtccacggctccacgcaattccgtctcatggatggtgataaaaccaatcgatgtatggttttggtttctgcagattacatttgatggttgggttcgctgtattatggcttgcgtattttta

SEQ ID NO: 16733 - DNA, 1646 bp, Zea Mays
cttcctcttcctcttctcttcgaatcaactgtaccagtaggggcggagacatgttcccgcccttttccatttcgatctataggagcaatccggacgctggatcccgttcgtttcctcctttggatgaattgttagtctaggtagcatagcaatgcgatccgcagatgtcatcatgtcacgagtggcccccgttccccgcggttccctatctcgcctttctcccgcccgggacctcatctttccctcacagcaatgtcttcccacccaccctcctccacagattcaccagtggtgtgatgtcactgattctgatgataggattcatcgtcgtctcatccgtccgccccttgggatgatctctagcagaatggaacttggcgccaccactgccctctaccctctgcaccgctgcaaaaccatttacctggtcaggcatgcccagggcattcacaatgtcgcgggggagaaggacttcggcgcgtacatgtcacatgaactgttcgatgctcagctcactcctttgggttggaaccaagtcgatggtctgcgggagcatgtgaagaaaagtgggcttgcagaaaagattgaattagttatttcttcccctttactgaggactatgcaaactgcagttggtgtctttggtggtgaaaagtatactgatggtgtaaatgcacctccactaatggtcgaaaatgccagacacagtggccgtccggcagtttcaagtttgaactgccccccatttattgcagtcgaaacctgcagagagcacttgggtgtccatccctgtgacaagaggaggagcataacagaataccggcctctctttcctgcgattgatttttcattgatagagaatgatgaagatgttctttgggaaccagatgtgagagaaccaaatgaggctgtcgcattgaggggttgtggacaagagaagagaaagagatagctattgtcagtcacagtggtttcttgtttcacaccttaagcatgtacagcaaggagtgccatccaaccataagcgacgaagttagcaagcactttgcaaactgcgagctacggtcgatggtgttggttgacagaagcatgcttgggtcatattcctcaagattcaactatgctggcaagaatccaaccggactagatgtgccaagtgatattgcagataagaagcaggttgacgaagctcagaagaactaaagcaacctcgaaagcataccatatatgacttggattatcaagaaattctgacctttgcgaagcttgtttgctttgaagaggacaagctaagagggcatctacagatagagtttacgcataccattttgttagtcgagttgaactacgcagcaatgtattagcatgtctgctcttttgtctcagcctacattgaggttcagggcattggactaggatcatctatttatgataataataaccggatcacctacattcaccaggtgatgcatggcaaagttctcttggtttccgagctgttctagtctaggggtggctgtacaacgtccacggctccacgcaattccgtctcatggatggtgataaaaccaatcgatgtatggttttggtttctgcagattacatttgatggttgggttcgctgtattatggcttgcgtattttta

SEQ ID NO: 16734 - DNA, 1563 bp, Zea Mays
ctccctcttcctcttcctcttcctcttcctcttctcttcgaatcaactgtaccagtaggggcggagacatgttcccgcccttttccatttcgatctataggagcaatccggacgctggatcccgttcgtttcctcctttggatgaattgttagtctaggtagcatagcaatgcgatccgcagatgtcatcatgtcacgagtggcccccgttccccgcggttccctatctcgcctttctcccgcccgggacctcatctttccctcacagcaatgtcttcccacccaccctcctccacagattcaccagtggtgtgatgtcactgattctgatgataggattcatcgtcgtctcatccgtccgccccttgggatgatctctagcagaatggaacttggcgccaccactgccctctaccctctgcaccgctgcaaaaccatttacctggtcaggcatgcccagggcattcacaatgtcgcgggggagaaggacttcggcgcgtacatgtcacatgaactgttcgatgctcagctcactcctttgggttggaaccaagtcgatggtctgcgggagcatgtgaagaaaagtgggcttgcagaaaagattgaattagttatttcttcccctttactgaggactatgcaaactgcagttggtgtctttggtggtgaaaagtatactgatggtgtaaatgcacctccactaatggtcgaaaatgccagacacagtggccgtccggcagtttcaagtttgaactgccccccatttattgcagtcgaaacctgcagagagcacttgggtgtccatccctgtgacaagaggaggagcataacagaataccggcctctctttcctgcgattgatttttcattgatagagaatgatgaagatgttctttgggaaccagatgtgagagaaccaaatgaggctgtcgcattgaggggtatgaagttcatggactgctttgcaaactgcgagctacggtcgatggtgttggttgacagaagcatgcttgggtcatattcctcaagattcaactatgctggcaagaatccaaccggactagatgtgccaagtgatattgcagataagaagcaggttgacgaagctcagaagaactaaagcaacctcgaaagcataccatatatgacttggattatcaagaaattctgacctttgcgaagcttgtttgctttgaagaggacaagctaagagggcatctacagatagagtttacgcataccattttgttagtcgagttgaactacgcagcaatgtattagcatgtctgctcttttgtctcagcctacattgaggttcagggcattggactaggatcatctatttatgataataataaccggatcacctacattcaccaggtgatgcatggcaaagttctcttggtttccgagctgttctagtctaggggtggctgtacaacgtccacggctccacgcaattccgtctcatggatggtgataaaaccaatcgatgtatggttttggtttctgcagattacatttgatggttgggttcgctgtattatggcttgcgtattttta

SEQ ID NO: 16735 - DNA, 1236 bp, Zea Mays
agctacgaaccgaaaggcctggtctccctccaccctcctctgtcagggtcctccgaatccttcctcggccgccgcgccaaatcccgtctcgttgctccggtccgctgcgcatcctcaggtcaggcatgcccagggcattcacaatgtcgcgggggagaaggacttcggcgcgtacatgtcacatgaactgttcgatgctcagctcactcctttgggttggaaccaagtcgatggtctgcgggagcatgtgaagaaaagtgggcttgcagaaaagattgaattagttatttcttcccctttactgaggactatgcaaactgcagttggtgtctttggtggtgaaaagtatactgatggtgtaaatgcacctccactaatggtcgaaaatgccagacacagtggccgtccggcagtttcaagtttgaactgccccccatttattgcagtcgaaacctgcagagagcacttgggtgtccatccctgtgacaagaggaggagcataacagaataccggcctctctttcctgcgattgatttttcattgatagagaatgatgaagatgttctttgggaaccagatgtgagagaaccaaatgaggctgtcgcattgaggggtatgaagttcatggactgctttgcaaactgcgagctacggtcgatggtgttggttgacagaagcatgcttgggtcatattcctcaagattcaactatgctggcaagaatccaaccggactagatgtgccaagtgatattgcagataagaagcaggttgacgaagctcagaagaactaaagcaacctcgaaagcataccatatatgacttggattatcaagaaattctgacctttgcgaagcttgtttgctttgaagaggacaagctaagagggcatctacagatagagtttacgcataccattttgttagtcgagttgaactacgcagcaatgtattagcatgtctgctcttttgtctcagcctacattgaggttcagggcattggactaggatcatctatttatgataataataaccggatcacctacattcaccaggtgatgcatggcaaagttctcttggtttccgagctgttctagtctaggggtggctgtacaacgtccacggctccacgcaattccgtctcatggatggtgataaaaccaatcgatgtatggttttggtttctgcagattacatttgatggttgggttcgctgtattatggcttgcgtattttta

SEQ ID NO: 16736 - DNA, 1356 bp, Zea Mays
agctacgaaccgaaaggcctggtctccctccaccctcctctgtcagggtcctccgaatccttcctcggccgccgcgccaaatcccgtctcgttgctccggtccgctgcgcatcctcaggtcaggcatgcccagggcattcacaatgtcgcgggggagaaggacttcggcgcgtacatgtcacatgaactgttcgatgctcagctcactcctttgggttggaaccaagtcgatggtctgcgggagcatgtgaagaaaagtgggcttgcagaaaagattgaattagttatttcttcccctttactgaggactatgcaaactgcagttggtgtctttggtggtgaaaagtatactgatggtgtaaatgcacctccactaatggtcgaaaatgccagacacagtggccgtccggcagtttcaagtttgaactgccccccatttattgcagtcgaaacctgcagagagcacttgggtgtccatccctgtgacaagaggaggagcataacagaataccggcctctctttcctgcgattgatttttcattgatagagaatgatgaagatgttctttgggaaccagatgtgagagaaccaaatgaggctgtcgcattgaggggtatgaagttcatggactggttgtggacaagagaagagaaagagatagctattgtcagtcacagtggtttcttgtttcacaccttaagcatgtacagcaaggagtgccatccaaccataagcgacgaagttagcaagcactttgcaaactgcgagctacggtcgatggtgttggttgacagaagcatgcttgggtcatattcctcaagattcaactatgctggcaagaatccaaccggactagatgtgccaagtgatattgcagataagaagcaggttgacgaagctcagaagaactaaagcaacctcgaaagcataccatatatgacttggattatcaagaaattctgacctttgcgaagcttgtttgctttgaagaggacaagctaagagggcatctacagatagagtttacgcataccattttgttagtcgagttgaactacgcagcaatgtattagcatgtctgctcttttgtctcagcctacattgaggttcagggcattggactaggatcatctatttatgataataataaccggatcacctacattcaccaggtgatgcatggcaaagttctcttggtttccgagctgttctagtctaggggtggctgtacaacgtccacggctccacgcaattccgtctcatggatggtgataaaaccaatcgatgtatggttttggtttctgcagattacatttgatggttgggttcgctgtattatggcttgcgtattttta

SEQ ID NO: 16737 - DNA, 1368 bp, Zea Mays
agctacgaaccgaaaggcctggtctccctccaccctcctctgtcagggtcctccgaatccttcctcggccgccgcgccaaatcccgtctcgttgctccggtccgctgcgcatcctcaggaatggaacttggcgccaccactgccctctaccctctgcaccgctgcaaaaccatttacctggtcaggcatgcccagggcattcacaatgtcgcgggggagaaggacttcggcgcgtacatgtcacatgaactgttcgatgctcagctcactcctttgggttggaaccaagtcgatggtctgcgggagcatgtgaagaaaagtgggcttgcagaaaagattgaattagttatttcttcccctttactgaggactatgcaaactgcagttggtgtctttggtggtgaaaagtatactgatggtgtaaatgcacctccactaatggtcgaaaatgccagacacagtggccgtccggcagtttcaaggtgtccatccctgtgacaagaggaggagcataacagaataccggcctctctttcctgcgattgatttttcattgatagagaatgatgaagatgttctttgggaaccagatgtgagagaaccaaatgaggctgtcgcattgaggggtatgaagttcatggactggttgtggacaagagaagagaaagagatagctattgtcagtcacagtggtttcttgtttcacaccttaagcatgtacagcaaggagtgccatccaaccataagcgacgaagttagcaagcactttgcaaactgcgagctacggtcgatggtgttggttgacagaagcatgcttgggtcatattcctcaagattcaactatgctggcaagaatccaaccggactagatgtgccaagtgatattgcagataagaagcaggttgacgaagctcagaagaactaaagcaacctcgaaagcataccatatatgacttggattatcaagaaattctgacctttgcgaagcttgtttgctttgaagaggacaagctaagagggcatctacagatagagtttacgcataccattttgttagtcgagttgaactacgcagcaatgtattagcatgtctgctcttttgtctcagcctacattgaggttcagggcattggactaggatcatctatttatgataataataaccggatcacctacattcaccaggtgatgcatggcaaagttctcttggtttccgagctgttctagtctaggggtggctgtacaacgtccacggctccacgcaattccgtctcatggatggtgataaaaccaatcgatgtatggttttggtttctgcagattacatttgatggttgggttcgctgtattatggcttgcgtattttta

SEQ ID NO: 16738 - DNA, 4447 bp, Zea Mays
ttcaaaccagagtacggtaaagttcttgtttccctgttcctgccagtactctctagaaatactacttacttatcgtcctgtgtaggctaggctagtgggaaaagctagcgaatcttgaagctgcaatgcaattctcgaagttggcgcccaataacaatagtgcccggaggggaagatattgggagaagtggggcattgaataataatcaaacaatggatgcggcggagcttgggatccgcccaccaccctccttcacccgggtcccggggtaggagggagcgagcgaggaaggtgataaataatggcagaccgagtcttcgtcgtcccaccagtacttgctagtcgcacacacagagagagagagagaggaggctggctccgaccccccgcgattcccttgccatgccattcccatgtggttgatgctccgacctcccatcctcctcctcctcctgcgtacgagtattattaacagcatcagtgcgtagcagttaagagcgagcgagcgagatcagcgccaccagttgcagttgcaggtcgccacctccctcccttcttccaccttcggctccgcttctcggcctgaccaaccaagaacgaggagaagggatggggacggggtggcggagggcgctgtgcacgtccgtccagcgggacgacgaccccgaccgcgacgccagtaccaagaagcgccggccgcagcaggacgcgccgagcccgcgcggcacagccaccgccaccggcttcttctccgccgtcaagagcgcggccaccggcagcagcagcaacccatccacgccggtcctccgctgccgcaccaggccgctgcagcagccggcggaccccgcccccgtgacgccaccctccgcgccggcgcccgccaggaaccaccgggtgccgctgatgcaggcgctgtcggcgccggcctcgcccagatccccctccagattcgcgctgctcaaggcgtcgctgctcccgtccaaggtggtgctgtccatatttttcacgtttctttttcttcctcccctttcgcttgatccaaagaactgaactgaactgagctacaatgatggagatgggtgtgggggaaaaatagatcgattccttctcatctcctctgatttggttaattgactcttgctgttgttcagcggcgcaagcaaaggcagcccactccaccatgaatctacatctactagtataacttaatcaccagcaacgggcttgtcggccgctcgtgattggtgatcccaaactctcttcacttctctctcactcttttctctagaaagaagaaaccagccagcaatgattgcgaccaccctcccctgttttgtcctaatcctccttttcttcctccttgagattcttcctctccagactcgtgatgattgggcaattattattattatatcgtcgtcgtcctcatcgctcacagcagcagcagcagcagccttttcccctttccaatcaggccaccccgttgatttgcaatgcggcatctccatctcctccatagactgctgccatgcctagatcaccaagcagcattgagcagagttcctcacatccaatctctctttcgtggatgggattctcattctggatctcatccatctcttgccattccttatccctccaaaaaagaaaacaaaaccgtactgccacaacaccttttctagggttcaggacctctgtagcattattgtactacaccttttcgtagcagctgctggcctgctgcacagcgggatgcaaaatccccctgccttttcttttctcctttcgtaggaggaggagaaggtggagcctagagcacaaaaagatggatccaatcagatcacagcagcgtttgcttgtccaaatgcagattttgatctcagtgctccaaatcaatgatcctactgctgcttttagcgcgcaaaaagcacgatccttttttttactcgtgctcttttcttcctttctttccccggtgcggtgtgtgctcgcgtggcgtcaagagcggcggcagctcggcggtgttcacggccgagtgctcccacgccttccacttcccctgcatcgcagcccacgcgcgctcctcctccgccaacggcgtcctgtcctgccccgtctgcgcctcgccgtggcgccaggcgcccttcctcgcctccctccgcctccactgctccttccacgacgacaagcaccgaggaggcggcgacggccgcaagacgtcgccgctcgccaagctttacgacgacgacgagccgctgctggcgcccaaggccacggccaacggcggcggcttcaaccccatcccggaggccgacgaggacgacgaggagcagggcgccgcgtccgagttcaggggcttcttcccgtgcccgaggagtaggaccacctcgggcctggctgtcactgtggcgcccgaggtcgcgctcgtgtcgtcgggccgccgccacggcaagtacgtggtggccgtcaaggtcaaggcgcccgggctgcgttcatcgtcgacggccccgcggcgcgcgtccatcgacctggtcaccgtgctggacgtcagccagggaatgatgggcgagaagctgcagatgctgaagcgagggatgcgcctcgtcgtcgcctccctcggccccaccgaccgcctctccatcgtcgcgttctccggcgccgccaagcgtctgctgccgctgcgccggatgaccaggacggggcagcggtccgcgcggcagatcgtcgaccgccttgtcgtctgcgccgccgcggcgaccacggccacggccacgcaggggcagcaaagcgcgtgcgtgggtgacgcactgcgcaaggcccaccaaggtgcttgaggaccggcgggaccgcaacccggtggccaccgtcatgctgctctccgatacccagcagcagcagtcggcagcaccggaaaactcgtcaaggaagcagtttgggcggccagctgtggccccagcaacgcgcttcactcacgtggagatccccatcggccccggcgacccacctcctcttgtgtccgagtgcgaggaggagcctccccgtggagcacgcgttcgccaagtgccttggcgggctggtgagcgtggtgatgcaagaggtgcagctggagctggcgttcctgacgggggagattacggcggtgtactcgtgcggggccgggcagcaggccgtggcagtctccggtggtgcgggggtgagcgtgcggctgggcgagatgtacgcggaggaggagcgcgagctgctggtggaggtgcgcgcgccgctgggcagccaccccgcactcgctgtcggtgcggtgcacgtaccgcgacccggcatcgcaggaggcggtgcgcggcgcggagcagcctctgctgctgcccgcgctggagggcgagcgggcgtcgtcgtcgtcgcggcggctgcacgacctgttcgtggcgacgcgcgccgtggcggagtcgcggcggctggcggagctgcaggacctggggactgcgatccacctgctgtcgtcggcgcgggcgctggtactgcagtcgccaccgacgcagcagcagcaggagctggtgggcagcctggacacggagctgagcgacatgcggtggcggcgcgccaacagccagcatcaggaggtagtgacgccgacgtcgaggagcggcaggaggaggggagacggggacacgacgacgcccgtggggaccccgcgcggggaggtgctgacgccgacgtcggcgtggcgcgcggcggagcagctggccaaggtggccatcatgcgtaagtccatgaaccgggtcagcgacctgcacggcttcgagaacgcgcgcttctgaggcgtcagacgacctcgtgtctgtctgtaattgagtcgtattgtgtttatgccattttttttcgttttcgtgttggctagtgaaacgatatgagtaccccaacaggagaagaggccgcgaacggtggctagtagaagatgggaagatgaacagaagcagccggagctgctgctgatgttatatgtggattagtagtatcaattaattatgaggacgattaatgaacccagataggatgaagaagataattggtgttatattagctgctgttgtgcttcatgattcattcattcatccatcacttgtcatgctcctctgattccgattccggggcagaccagccgtctccgtcatgcttgaaatctacacaatccacaagccacaaaagggtctgatgatgcctgcaggcgcttagtgatcattcattgcatgcgatcggcagctagcagttggcctatactcccgggcggatccagtcaaaaagcacacagcaagcgcctcctcttcacatgacatgaccgcaaaacgtgcaaacgcaaacacaaccttttgaccagcttaattcaattttcacatatacgtggtcgtggtgtgtgtgtatccctactgtaggctggatcgatcctgggcaaaa

SEQ ID NO: 16739 - DNA, 2150 bp, Zea Mays
cccggggtaggagggagcgagcgaggaagccccggtgcggtgtgtgctcgcgtggcgtcaagagcggcggcagctcggcggtgttcacggccgagtgctcccacgccttccacttcccctgcatcgcagcccacgcgcgctcctcctccgccaacggcgtcctgtcctgccccgtctgcgcctcgccgtggcgccaggcgcccttcctcgcctccctccgcctccactgctccttccacgacgacaagcaccgaggaggcggcgacggccgcaagacgtcgccgctcgccaagctttacgacgacgacgagccgctgctggcgcccaaggccacggccaacggcggcggcttcaaccccatcccggaggccgacgaggacgacgaggagcagggcgccgcgtccgagttcaggggcttcttcccgtgcccgaggagtaggaccacctcgggcctggctgtcactgtggcgcccgaggtcgcgctcgtgtcgtcgggccgccgccacggcaagtacgtggtggccgtcaaggtcaaggcgcccgggctgcgttcatcgtcgacggccccgcggcgcgcgtccatcgacctggtcaccgtgctggacgtcagccagggaatgatgggcgagaagctgcagatgctgaagcgagggatgcgcctcgtcgtcgcctccctcggccccaccgaccgcctctccatcgtcgcgttctccggcgccgccaagcgtctgctgccgctgcgccggatgaccaggacggggcagcggtccgcgcggcagatcgtcgaccgccttgtcgtctgcgccgccgcggcgaccacggccacggccacgcaggggcagcaaagcgcgtgcgtgggtgacgcactgcgcaaggcccaccaaggtgcttgaggaccggcgggaccgcaacccggtggccaccgtcatgctgctctccgatacccagcagcagcagtcggcagcaccggaaaactcgtcaaggaagcagtttgggcggccagctgtggccccagcaacgcgcttcactcacgtggagatccccatcggccccggcgacccacctcctcttgtgtccgagtgcgaggaggagcctccccgtggagcacgcgttcgccaagtgccttggcgggctggtgagcgtggtgatgcaagaggtgcagctggagctggcgttcctgacgggggagattacggcggtgtactcgtgcggggccgggcagcaggccgtggcagtctccggtggtgcgggggtgagcgtgcggctgggcgagatgtacgcggaggaggagcgcgagctgctggtggaggtgcgcgcgccgctgggcagccaccccgcactcgctgtcggtgcggtgcacgtaccgcgacccggcatcgcaggaggcggtgcgcggcgcggagcagcctctgctgctgcccgcgctggagggcgagcgggcgtcgtcgtcgtcgcggcggctgcacgacctgttcgtggcgacgcgcgccgtggcggagtcgcggcggctggcggagctgcaggacctggggactgcgatccacctgctgtcgtcggcgcgggcgctggtactgcagtcgccaccgacgcagcagcagcaggagctggtgggcagcctggacacggagctgagcgacatgcggtggcggcgcgccaacagccagcatcaggaggtagtgacgccgacgtcgaggagcggcaggaggaggggagacggggacacgacgacgcccgtggggaccccgcgcggggaggtgctgacgccgacgtcggcgtggcgcgcggcggagcagctggccaaggtggccatcatgcgtaagtccatgaaccgggtcagcgacctgcacggcttcgagaacgcgcgcttctgaggcgtcagacgacctcgtgtctgtctgtaattgagtcgtattgtgtttatgccattttttttcgttttcgtgttggctagtgaaacgatatgagtaccccaacaggagaagaggccgcgaacggtggctagtagaagatgggaagatgaacagaagcagccggagctgctgctgatgttatatgtggattagtagtatcaattaattatgaggacgattaatgaacccagataggatgaagaagataattggtgttatattagctgctgttgtgcttca

SEQ ID NO: 16740 - DNA, 3720 bp, Zea Mays
cctcacaccatcacttgttctctcttctctctctctcgtcgtgtgcctgggtcgaccagcgacctggctagctagctctccagctgcgcgcgccatggccaacccaacagctaccaagcatgctttcaagcgtattttgacgagcctgcttaagcctggcggtggtgaatacggcaagttcttcagccttccggcgctaaatgatccaaggatcgataagcttccctactctatacgtgttctcctggaatcagctatccgccattgtgataacttccaagttacagagagtgatgttgagaaaatcattgattgggagaacacatctccaaagctggctgagatacctttcaagccagcgagatgcattctaatggacaacactggagtcccagcagttgtagaccttgcagctatgcgtgatatgatgccaaagttgggatgtgatccctacaagattaatccattgattcccgtggatgctgttattgaccacgcagtgcgagtggatgtagcagggacctatgatgcattggatagaaacgaggagctggagttccaacgcaacaaagaaaggtttgcttttcttaaatgggcatccaatgctttccacaacatgcaggttttccctcctggttcgggcactgtacaccaggtaaatcttgagtatcttgcccgagttgtcttcaacgaagatggcattctttacttcgacagcgtggttggcacagactcacacaccactatgattaatagtcttggagttgctgggtggggagtaggcggtattgaagcagtcgttgcaatgcttggccagccaatgggcatggttttgcctggtgtggttggattcaaattgagtgggaagttacgggatggtgtcactactactgacattgttcttaccatgacccaaatgctaaggaagcacggtgctattggcaaattcgttgaattctatggtgttggtgtgggcgagctatctttgcctgctagggccacaattgccaacatgtctccagaatatggagctaccatgggcttcttccctgtagaccaagtagcattggactatctcaaactgacaggccgaagcgatgaaactgtgtcgatgattgaagcatacctgcgagctaacaaaatgtttgtggacaagcatgagcctgagacggaacgcgttttctcttcacatctggagctggaccttagtgaggtggagccttgcgtttcaggccccaaaaggcctcatgatcgtgtccctttgaaggaaatgaagtcagactggcatgcttgcctggacaacgaagttggcttcaagggctatgcggtgccaaaggaacagcaaggcaaagttgtgaaattcgacttccatggaaggccagctgaaatcaagcatggcagtgttgttcttgcagcaatatgtagctccacaaacacatcaaatcccagcgtcatgattggtgctggccttgtggcaaagaaagcctgcgaattaggccttgaggtgaagccatgggtaaagacaagccttacccctggatctgtggttgctaccgagtacttgaaacatagtggccttcaagattatctgaaccagcaagggttccatgtcgctgcgcatggttgcgccacttgtgtgggcaactccggtgacctggatggatctgtatcagctgctatcacagaaaatgatatggttgctgctgcggtgctgtcggccaaccgaaacttcgaggggcgtgtgaaccctctcactcgggctaactaccttgcctcgccgcctctggttgttgcctatgctcttgccggcactgttgacattgactttgagaaagagcccattggagttggaaagggtggtaaggaagttttcttgagggacatatggccttcaaaccaagagatcgatgaggttgtggagtccagcgtgcagactcacctgttcaagaaagtgtacgactcaattatggaacgtaaccctaggtggaaccagctgccggttccaaaggaggcactgtacccatgggaagacaggtccacctacatccgcaagcctacgtacctggagggcatgtccatgacgccgcctgcagccccgcccacggtgacggaggcctactgcctgctcaaccttggggacagcatcaccacggaccacatctcctactcggggaagatccccgagggcacacctgcggccaagtatctgctcgagtatggcgtggagcccaagaacttcagctcctatggtggccgccgcgggaacaacgaggtggtgatgaggggagcgtttgccaatatgaggatcgtgaataagcttcttgatggcaaggctggtccctggacgatccatgttcctaccggggagaagctctatgtttacgacgcggcaatgaagtacaagtcggaaggtcatgacatggtcatcattgctggctccgagtacggcagtggcagctctcgtgactctgctgccaagggaccaatgctactgggtgtcaagtcggtgattgcaaagagcttcgagcggatccaccggagcaacttggtggggatggggatcattcctctctgctttaaagcaggagaggatgccgattcactcggcctcaccggacgtgagcgctacaccatccacctccctaccagcaccgccgagctcagtccaggccaggacgtgaccgtcacaacccacgacggcagatccttcacttgcactcttcgcttggacacacaggtatagtgctgggaattgggccgtgccgggccggcccggcccaagcccatcgtgcttcgtgccaaacgggttcgggccaagaaagcccaaacaatttttgggccgtgccgtgccagcccgaagtgtaaaaacagtggcccagcccggccctaaaccacgccgtgccttcgttgggccgtgccggcccaaacccggcccgtatatttgaccacataaaatcaaaatattattaccatataaagttcatatcttactaaattaaagatattaaacaattatagcatcatttaaccacataaactctaaatataacaacaatataaactcaatatcttactaaattaaagagattaaacagtttgggcttaattgggccgtgccggcccaagcccggcccatctatgcgtgccgtgctgggggcccgacgggtcggaatttgaggcccggcccaggcccgccttcgggccgtgctagcccggcccatattatttcgtgccgggccgtgctttgggctcttattttcgggccgtgctcgtgctggcccgaaaagcccggcccagattcgcagcactacacaggtatatatgtctgcgttttcaaaactaattaaccctccagttctagccagcttcctgtgtaaatgacacacattctactgttcttgcctgccgcgcgcgcagcttgaggtcacatacttcaaccatggaggcatccttccctacatggtccgcaacctggcagcacagatgaaataagttaaaaagcaagctagcttattggcgcggtgggaataaattaaaaaggtactcagtgccccacgtatttgacgtatgtctgtaaataagtggcacattcgagcgctcttcgctctgccattgaggtggatcgaagctgccacatattttctccgcaggacatcggcacgaattttgtcttagcaaaccaaagagcgtgtccaacagatataagtagctgagcatgag

SEQ ID NO: 16741 - DNA, 3097 bp, Zea Mays
accatcacttgttctctcttctctctctctcgtcgtgtgcctgggtcgaccagcgacctggctagctagctctccagctgcgcgcgccatggccaacccaacagctaccaagcatgctttcaagcgtattttgacgagcctgcttaagcctggcggtggtgaatacggcaagttcttcagccttccggcgctaaatgatccaaggatcgataagcttccctactctatacgtgttctcctggaatcagctatccgccattgtgataacttccaagttacagagagtgatgttgagaaaatcattgattgggagaacacatctccaaagctggctgagatacctttcaagccagcgagatgcattctaatggacaacactggagtcccagcagttgtagaccttgcagctatgcgtgatatgatgccaaagttgggatgtgatccctacaagattaatccattgattcccgtggatgctgttattgaccacgcagtgcgagtggatgtagcagggacctatgatgcattggatagaaacgaggagctggagttccaacgcaacaaagaaaggtttgcttttcttaaatgggcatccaatgctttccacaacatgcaggttttccctcctggttcgggcactgtacaccaggtaaatcttgagtatcttgcccgagttgtcttcaacgaagatggcattctttacttcgacagcgtggttggcacagactcacacaccactatgattaatagtcttggagttgctgggtggggagtaggcggtattgaagcagtcgttgcaatgcttggccagccaatgggcatggttttgcctggtgtggttggattcaaattgagtgggaagttacgggatggtgtcactactactgacattgttcttaccatgacccaaatgctaaggaagcacggtgctattggcaaattcgttgaattctatggtgttggtgtgggcgagctatctttgcctgctagggccacaattgccaacatgtctccagaatatggagctaccatgggcttcttccctgtagaccaagtagcattggactatctcaaactgacaggccgaagcgatgaaactgtgtcgatgattgaagcatacctgcgagctaacaaaatgtttgtggacaagcatgagcctgagacggaacgcgttttctcttcacatctggagctggaccttagtgaggtggagccttgcgtttcaggccccaaaaggaaatgaagtcagactggcatgcttgcctggacaacgaagttggcttcaagggctatgcggtgccaaaggaacagcaaggcaaagttgtgaaattcgacttccatggaaggccagctgaaatcaagcatggcagtgttgttcttgcagcaatatgtagctccacaaacacatcaaatcccagcgtcatgattggtgctggccttgtggcaaagaaagcctgcgaattaggccttgaggtgaagccatgggtaaagacaagccttacccctggatctgtggttgctaccgagtacttgaaacatagtggccttcaagattatctgaaccagcaagggttccatgtcgctgcgcatggttgcgccacttgtgtgggcaactccggtgacctggatggatctgtatcagctgctatcacagaaaatgatatggttgctgctgcggtgctgtcggccaaccgaaacttcgaggggcgtgtgaaccctctcactcgggctaactaccttgcctcgccgcctctggttgttgcctatgctcttgccggcactgttgacattgactttgagaaagagcccattggagttggaaagggtggtaaggaagttttcttgagggacatatggccttcaaaccaagagatcgatgaggttgtggagtccagcgtgcagactcacctggagggcatgtccatgacgccgcctgcagccccgcccacggtgacggaggcctactgcctgctcaaccttggggacagcatcaccacggaccacatctcctactcggggaagatccccgagggcacacctgcggccaagtatctgctcgagtatggcgtggagcccaagaacttcagctcctatggtggccgccgcgggaacaacgaggtggtgatgaggggagcgtttgccaatatgaggatcgtgaataagcttcttgatggcaaggctggtccctggacgatccatgttcctaccggggagaagctctatgtttacgacgcggcaatgaagtacaagtcggaaggtcatgacatggtcatcattgctggctccgagtacggcagtggcagctctcgtgactctgctgccaagggaccaatgctactgggtgtcaagtcggtgattgcaaagagcttcgagcggatccaccggagcaacttggtggggatggggatcattcctctctgctttaaagcaggagaggatgccgattcactcggcctcaccggacgtgagcgctacaccatccacctccctaccagcaccgccgagctcagtccaggccaggacgtgaccgtcacaacccacgacggcagatccttcacttgcactcttcgcttggacacacagcttgaggtcacatacttcaaccatggaggcatccttccctacatggtccgcaacctggcagcacagatgaaataagttaaaaagcaagctagcttattggcgcggtgggaataaattaaaaaggtactcagtgccccacgtatttgacgtatgtctgtaaataagtggcacattcgagcgctcttcgctctgccattgaggtggatcgaagctgccacatattttctccgcaggacatcggcacgaattttgtcttagcaaaccagttaattttgtactctttagattctttaattggttccatgctctctttggtacttttcatgtcagtttgctttgcaaacattatcagcgtgcccttgtagatttcgtaatggttatatgtatatgccctattgaaattgtcattttgctttgcaaaaaaatatcagcgtgccgttgtagattttcaaatgtatatgtctgccgtcaaactctctcgtgaatatgtttggttacaataatggaacaggac

SEQ ID NO: 16742 - DNA, 2979 bp, Zea Mays
accatcacttgttctctcttctctctctctcgtcgtgtgcctgggtcgaccagcgacctggctagctagctctccagctgcgcgcgccatggccaacccaacagctaccaagcatgctttcaagcgtattttgacgagcctgcttaagcctggcggtggtgaatacggcaagttcttcagccttccggcgctaaatgatccaaggatcgataagcttccctactctatacgtgttctcctggaatcagctatccgccattgtgataacttccaagttacagagagtgatgttgagaaaatcattgattgggagaacacatctccaaagctggctgagatacctttcaagccagcgagatgcattctaatggacaacactggagtcccagcagttgtagaccttgcagctatgcgtgatatgatgccaaagttgggatgtgatccctacaagattaatccattgattcccgtggatgctgttattgaccacgcagtgcgagtggatgtagcagggacctatgatgcattggatagaaacgaggagctggagttccaacgcaacaaagaaaggtttgcttttcttaaatgggcatccaatgctttccacaacatgcaggttttccctcctggttcgggcactgtacaccaggtaaatcttgagtatcttgcccgagttgtcttcaacgaagatggcattctttacttcgacagcgtggttggcacagactcacacaccactatgattaatagtcttggagttgctgggtggggagtaggcggtattgaagcagtcgttgcaatgcttggccagccaatgggcatggttttgcctggtgtggttggattcaaattgagtgggaagttacgggatggtgtcactactactgacattgttcttaccatgacccaaatgctaaggaagcacggtgctattggcaaattcgttgaattctatggtgtcgatgattgaagcatacctgcgagctaacaaaatgtttgtggacaagcatgagcctgagacggaacgcgttttctcttcacatctggagctggaccttagtgaggtggagccttgcgtttcaggccccaaaaggcctcatgatcgtgtccctttgaaggaaatgaagtcagactggcatgcttgcctggacaacgaagttggcttcaagggctatgcggtgccaaaggaacagcaaggcaaagttgtgaaattcgacttccatggaaggccagctgaaatcaagcatggcagtgttgttcttgcagcaatatgtagctccacaaacacatcaaatcccagcgtcatgattggtgctggccttgtggcaaagaaagcctgcgaattaggccttgaggtgaagccatgggtaaagacaagccttacccctggatctgtggttgctaccgagtacttgaaacatagtggccttcaagattatctgaaccagcaagggttccatgtcgctgcgcatggttgcgccacttgtgtgggcaactccggtgacctggatggatctgtatcagctgctatcacagaaaatgatatggttgctgctgcggtgctgtcggccaaccgaaacttcgaggggcgtgtgaaccctctcactcgggctaactaccttgcctcgccgcctctggttgttgcctatgctcttgccggcactgttgacattgactttgagaaagagcccattggagttggaaagggtggtaaggaagttttcttgagggacatatggccttcaaaccaagagatcgatgaggttgtggagtccagcgtgcagactcacctggagggcatgtccatgacgccgcctgcagccccgcccacggtgacggaggcctactgcctgctcaaccttggggacagcatcaccacggaccacatctcctactcggggaagatccccgagggcacacctgcggccaagtatctgctcgagtatggcgtggagcccaagaacttcagctcctatggtggccgccgcgggaacaacgaggtggtgatgaggggagcgtttgccaatatgaggatcgtgaataagcttcttgatggcaaggctggtccctggacgatccatgttcctaccggggagaagctctatgtttacgacgcggcaatgaagtacaagtcggaaggtcatgacatggtcatcattgctggctccgagtacggcagtggcagctctcgtgactctgctgccaagggaccaatgctactgggtgtcaagtcggtgattgcaaagagcttcgagcggatccaccggagcaacttggtggggatggggatcattcctctctgctttaaagcaggagaggatgccgattcactcggcctcaccggacgtgagcgctacaccatccacctccctaccagcaccgccgagctcagtccaggccaggacgtgaccgtcacaacccacgacggcagatccttcacttgcactcttcgcttggacacacagcttgaggtcacatacttcaaccatggaggcatccttccctacatggtccgcaacctggcagcacagatgaaataagttaaaaagcaagctagcttattggcgcggtgggaataaattaaaaaggtactcagtgccccacgtatttgacgtatgtctgtaaataagtggcacattcgagcgctcttcgctctgccattgaggtggatcgaagctgccacatattttctccgcaggacatcggcacgaattttgtcttagcaaaccagttaattttgtactctttagattctttaattggttccatgctctctttggtacttttcatgtcagtttgctttgcaaacattatcagcgtgcccttgtagatttcgtaatggttatatgtatatgccctattgaaattgtcattttgctttgcaaaaaaatatcagcgtgccgttgtagattttcaaatgtatatgtctgccgtcaaactctctcgtgaatatgtttggttacaataatggaacaggac

SEQ ID NO: 16743 - DNA, 2999 bp, Zea Mays
accatcacttgttctctcttctctctctctcgtcgtgtgcctgggtcgaccagcgacctggctagctagctctccagctgcgcgcgccatggccaacccaacagctaccaagcatgctttcaagcgtattttgacgagcctgcttaagcctggcggtggtgaatacggcaagttcttcagccttccggcgctaaatgatccaaggatcgataagcttccctactctatacgtgttctcctggaatcagctatccgccattgtgataacttccaagttacagagagtgatgttgagaaaatcattgattgggagaacacatctccaaagctggctgagatacctttcaagccagcgagatgcattctaatggacaacactggagtcccagcagttgtagaccttgcagctatgcgtgatatgatgccaaagttgggatgtgatccctacaagattaatccattgattcccgtggatgctgttattgaccacgcagtgcgagtggatgtagcagggacctatgatgcattggatagaaacgaggagctggagttccaacgcaacaaagaaaggtttgcttttcttaaatgggcatccaatgctttccacaacatgcaggttttccctcctggttcgggcactgtacaccaggtaaatcttgagtatcttgcccgagttgtcttcaacgaagatggcattctttacttcgacagcgtggttggcacagactcacacaccactatgattaatagtcttggagttgctgggtggggagtaggcggtattgaagcagtcgttgcaatgcttggccagccaatgggcatggttttgcctggtgtggttggattcaaattgagtgggaagttacgggatggtgtcactactactgacattgttcttaccatgacccaaatgctaaggaagcacggtgctattggcaaattcgttgaattctatggtgttggtgtgggcgagctatctttgcctgctagggccacaattgccaacatgtctccagaatatggagctaccatgggcttcttccctgtagaccaagtagcattggactatctcaaactgacaggccgaagcgatgaaactgtgtcgatgattgaagcatacctgcgagctaacaaaatgtttgtggacaagcatgagcctgagacggaacgcgttttctcttcacatctggagctggaccttagtgaggtggagccttgcgtttcaggccccaaaaggcctcatgatcgtgtccctttgaaggaaatgaagtcagactggcatgcttgcctggacaacgaagttggcttcaagggctatgcggtgccaaaggaacagcaaggcaaagttgtgaaattcgacttccatggaaggccagctgaaatcaagcatggcagtgttgttcttgcagcaatatgtagctccacaaacacatcaaatcccagcgtcatgattggtgctggccttgtggcaaagaaagcctgcgaattaggccttgaggtgaagccatgggtaaagacaagccttacccctggatctgtggttgctaccgagtacttgaaacatagtggccttcaagattatctgaaccagcaagggttccatgtcgctgcgcatggttgcgccacttgtgtgggcaactccggtgacctggatggatctgtatcagctgctatcacagaaaatgatatggttgctgctgcggtgctgtcggccaaccgaaacttcgaggggcgtgtgaaccctctcactcgggctaactaccttgcctcgccgcctctggttgttgcctatgctcttgccggcactgttgacattgactttgagaaagagcccattggagttggaaagggtggtaaggaagttttcttgagggacatatggccttcaaaccaagagatcgatgaggttgtggagtccagcgtgcagactcacctggagggcatgtccatgacgccgcctgcagccccgcccacggtgacggaggcctactgcctgctcaaccttggggacagcatcaccacggaccacatctcctactcggggaagatccccgagggcacacctgcggccaagtatctgctcgagtatggcgtggagcccaagaacttcagctcctatggtggccgccgcgggaacaacgaggtggtgatgaggggagcgtttgccaatatgaggatcgtgaataagcttcttgatggcaaggctggtccctggacgatccatgttcctaccggggagaagctctatgtttacgacgcggcaatgaagtacaagtcggaaggtcatgacatggtcatcattgctggctccgagtacggcagtggcagctctcgtgactctgctgccaagggaccaatgctactgggtgtcaagtcggtgattgcaaagagcttcgagcggatccaccggagcaacttggtggggatggggatcattcctctctgctttaaagcaggagaggatgccgattcactcggcctcaccggacgtgagcgctacaccatccacctccctaccagcaccgccgagctcagtccaggccaggacgtgaccgtcacaacccacgacggcagatccttcacttgcactcttcgcttggacacacaggtactcagtgccccacgtatttgacgtatgtctgtaaataagtggcacattcgagcgctcttcgctctgccattgaggtggatcgaagctgccacatattttctccgcaggacatcggcacgaattttgtcttagcaaaccagttaattttgtactctttagattctttaattggttccatgctctctttggtacttttcatgtcagtttgctttgcaaacattatcagcgtgcccttgtagatttcgtaatggttatatgtatatgccctattgaaattgtcattttgctttgcaaaaaaatatcagcgtgccgttgtagattttcaaatgtatatgtctgccgtcaaactctctcgtgaatatgtttggttacaataatggaacaggac

SEQ ID NO: 16744 - DNA, 2164 bp, Zea Mays
gtcaatctccacatgattcgtgcgttggtgctgcacgtgattggtaaagagagtatctaagatcacagaagatattctgtttgaacaacaagaaaactgtgacagtactgatgataacgaggaaggggctacaatttgtaaaatgctagagcatgccgctgagcctgagtttatacttgcgggcatgactccagagcagttgaagtgtttctcatcttatatagaaaagcaaaagattgttaagcaaaatgaagtatctgagaaggttgagaaggcccttgttgttgctggccttagttcaagggatgttacaccatttttgaaagtgagagtgattggccttgtcaataaacattcagcttccacatccagtaacaaggaagggctaataacaatttggaatccgactgagatgcagaaagataatcttgtggagggacaagcttattctgttatgggattggtaccttcgaactattgcaccgaaatcatgtacttgcatgctagaggatcatctacaacatggaagcccttagcatcagctcagactacagattttaaaccattctttacccctcgtagagcaattgaactcttgaaatttggtgaggtgccgatttcaagtgaatttgatattgcaggtcttattttatatgttggcaatacttatttatgtaacaacaagaaaaagcagtggctttttttaacagatggatctaaatttgtctctgggcaagggtgtgaagagcaagattgtcttctagctgttagcttttcgtccgcaaccactgatgaagactctacattatttagttacactctctctggaaatacagttggttttagtaatctggtcaaacgacagaaagacgagacgaggcaagtatgggtagctgaggcaacagagagctcaagctacactctttccaacgagattcctagaaaatctcacctaaaagaagctgcagttttggctgagagatgggcttctagatcttatcataaaattcaagagctaaaagaaagggttttatgtatagttggcaacgctggtgtctgaattataataaacggtaccacctgctgtttttggaaatggtgcaagattttgcttgggggttgtcttagctacaccattatttctcactgatgttggttggttctggttggagcctttttaacgcaatatgaatggcccttgcaaaaaacttcaagagcagcaagatccttgcacaaacttcaaaaatcaacttgaagatgtacacatttgaagacacgaggcttcagggctgttttctaagtctgtgtataaagcctttttcagagggtcgattaactttgagccgtggaaaaggttatggagatcttgggcgccgcctaaatgcaaaacttttctctggctagccattaggaacaaatgttgaactgcagacagataggagaagagggctttctcacctagaggcctgccccctctgcgatcaagagcaggaaacagctcaacacatcctaacgagttgtgtttttgcaaggcttttttggcacaacattatggctcccttcggtatgggtacctcaccccgagtcagaatgaacttatcctttgcagatttgtggcgaaaagtgagcaacaatgtgcataaagagaagagaacaggaataaacaatgctattatcttggaggcctggtgcatttggcggcaaagaaatcgtacggtttttgaaggagatttgccagctgttagcaaggtgcagcaaagttttctagaagagctaacatgtttggtcttgactggggctcatcaccttagcattttagggataattgatactcttagagcggtcggattgggctctcttgatcatatgtaatttttgtttcagtttcgatgtggtgtgggtgatgatcttgctcagcaagatcctcatcttgtaggattttcttttctctctaatataaaatatgggacgcgttcgagaaaaaaaaacttcaagagctaaaagaaaggcttctatgtatagttggcgaccctggtgtctgaattataataaatggtgctgcccgccattttttttggagatgatgcaagattttgcatgggggttcttgccataactacatgtctacatcaatatttctcagtggtacaattagaagatcaac

SEQ ID NO: 16745 - DNA, 2320 bp, Zea Mays
ctgggcctgtgtcatttcatgaggcaaacatgttggactcccactggcattcaggtgcataaaagtttctggtggtagagttcctaggacactggttggaatcacaaggatatatcctattctctaccgggaaaggttgcctgatggtcgttttgttgtgagatctgaaaggatggaaagaaaggcgctggaactataccaccagagagtatctaagatcacagaagatattctgtttgaacaacaagaaaactgtgacagtactgatgataacgaggaaggggctacaatttgtaaaatgctagagcatgccgctgagcctgagtttatacttgcgggcatgactccagagcagttgaagtgtttctcatcttatatagaaaagcaaaagattgttaagcaaaatgaagtatctgagaaggttgagaaggcccttgttgttgctggccttagttcaagggatgttacaccatttttgaaagtgagagtgattggccttgtcaataaacattcagcttccacatccagtaacaaggaagggctaataacaatttggaatccgactgagatgcagaaagataatcttgtggagggacaagcttattctgttatgggattggtaccttcgaactattgcaccgaaatcatgtacttgcatgctagaggatcatctacaacatggaagcccttagcatcagctcagactacagattttaaaccattctttacccctcgtagagcaattgaactcttgaaatttggtgaggtgccgatttcaagtgaatttgatattgcaggtcttattttatatgttggcaatacttatttatgtaacaacaagaaaaagcagtggctttttttaacagatggatctaaatttgtctctgggcaagggtgtgaagagcaagattgtcttctagctgttagcttttcgtccgcaaccactgatgaagactctacattatttagttacactctctctggaaatacagttggttttagtaatctggtcaaacgacagaaagacgagacgaggcaagtatgggtagctgaggcaacagagagctcaagctacactctttccaacgagattcctagaaaatctcacctaaaagaagctgcagttttggctgagagatgggcttctagatcttatcataaaattcaagagctaaaagaaagggttttatgtatagttggcaacgctggtgtctgaattataataaacggtaccacctgctgtttttggaaatggtgcaagattttgcttgggggttgtcttagctacaccattatttctcactgatgttggttggttctggttggagcctttttaacgcaatatgaatggcccttgcaaaaaacttcaagagcagcaagatccttgcacaaacttcaaaaatcaacttgaagatgtacacatttgaagacacgaggcttcagggctgttttctaagtctgtgtataaagcctttttcagagggtcgattaactttgagccgtggaaaaggttatggagatcttgggcgccgcctaaatgcaaaacttttctctggctagccattaggaacaaatgttgaactgcagacagataggagaagagggctttctcacctagaggcctgccccctctgcgatcaagagcaggaaacagctcaacacatcctaacgagttgtgtttttgcaaggcttttttggcacaacattatggctcccttcggtatgggtacctcaccccgagtcagaatgaacttatcctttgcagatttgtggcgaaaagtgagcaacaatgtgcataaagagaagagaacaggaataaacaatgctattatcttggaggcctggtgcatttggcggcaaagaaatcgtacggtttttgaaggagatttgccagctgttagcaaggtgcagcaaagttttctagaagagctaacatgtttggtcttgactggggctcatcaccttagcattttagggataattgatactcttagagcggtcggattgggctctcttgatcatatgtaatttttgtttcagtttcgatgtggtgtgggtgatgatcttgctcagcaagatcctcatcttgtaggattttcttttctctctaatataaaatatgggacgcgttcgagaaaaaaaaacttcaagagctaaaagaaaggcttctatgtatagttggcgaccctggtgtctgaattataataaatggtgctgcccgccattttttttggagatgatgcaagattttgcatgggggttcttgccataactacatgtctacatcaatatttctcagtggtacaattagaagatcaac

SEQ ID NO: 16746 - DNA, 4503 bp, Zea Mays
agtttcctgtgtctcaagctggttcaggaaatgtggaaggtccaggtagaccggccaatcagtctctgatatttcaaactagttccggaagaccagttttgatcagcaaaagatacgtcgagagatctagggctctgctgatggatgaagatgttaaaaatattcgacaatgggatactggctgccagctcccaattttccaaacaggacttggaaggcctgttgctgtgaaacatagttcaattaaaaaggcaagcacaattttgggggatggagatgttaaaagaagtggtaatggacataccggtgtttgtaccacacctttccaatttgaaacaccaaaatccgttttgatgagtagcagtttgattattaatggcatgacagttacaccagaagaaaatacttcagtgcgagcagaaaaatgtttcaacgatgatggccaattgccgttatttcagactgggtcagggaggtcagtcacagcaagtaagggttcctttaaaagggcaagttctgttctggagccaagaaatattgcaaaggaattggaagatgaatctcatctcaatgatggttatgccacctcaatatttaaaactggacttggaaagtctatcttaccaactgagaactcaagagaaagggcacaatttgtattagaggctaaagaggctgtaaaacaagcagtaattagtgacattggagctggctttggtgaaaatccaatgttccattctggaaaacaacagttttcacctgaaaatgatacttcaagacctagggccagtacccccatggagcaaggcaaatttgcaacaaaaggatatgaagactgtggaagtccattgccaatgtttcaaactggatctggaaaatctgtattggtctgtgaaagctcgatgcaaaaggcaagagccgttcttgaggaagaagagcactacaagttggttaagatggacaaaaaaattgcagcctcagcttcaccgctcaagacaagccatgcaagaacagtaaacatatcttcaactggtgtttctagagctgctaccttattgggcttggaggagaataccctttcaacacaattttttggacatgttcagcactgcaggtggccgatcaatggctatctctgtcgatgcactacaacgtgcgaaaagccttttgggtgattcagatttagtggtttctccaaatggttcaattggtcgctctttggcatcagctatagagaatctaccaaaaccaactatttctccgaaaggagatgtatctaacctatcatatggaactagagcaataggatatgctgtacctgacacccctgtgactaaaacaagtgctaatcagtttcatatgggaagggaatatcgtccagtcaatgaaattccaaaggtccccaagcctccctccagatgtttatctgaaggcgacaatgcgagtaactctaaagacaagacccagtggcaccatatgccagctggaccattggttgacatcactaattacatggctacatgttctggaaatacggactgcttagcaaatggaaagagaattattggggggagaaactccgtatctccattcaaacggccccgttcttccaggttcatcactccaataaaaaacaacaaactatcttctgctggagaatccatagtgccaccaatgcagatcagtccctgtaggacaatgctatctgtacgttatcctttccaacatcaaaggaaaaattataaagaatattttggtggtcctccttgcttcaaatatttgactgaacatgtgactgatgatgtgaagctcatggatgcaagaagagctgagaagtttagatttcagcatatggatactggtgcagaagagtttcagaaaatgctgctcacatgtggtgcttcattgtcatgtgcaacaaaagaatgggtcagtaaccactataaatggattgtgtggaagcttgcttcacttgagaggtgctacccaactagagttgctggtaaattcttgacggttgacaatgttcttgaggagcttaagtaccggtattcacttgatgcatcattggatgtggcacttctggaacaactagagaaaagaaagcttttcgtagggcagaagcttcgggtgtctggtgttgtcaaattagttgtccacataaatggcacctatcgtgcaagatggaatgatgccttaggattctgcaaacatgttggactcccactggcattcaggtgcataaaagtttctggtggtagagttcctaggacactggttggaatcacaaggatatatcctattctctaccgggaaaggttgcctgatggtcgttttgttgtgagatctgaaaggatggaaagaaaggcgctggaactataccaccagagagtatctaagatcacagaagatattctgtttgaacaacaagaaaactgtgacagtactgatgataacgaggaaggggctacaatttgtaaaatgctagagcatgccgctgagcctgagtttatacttgcgggcatgactccagagcagttgaagtgtttctcatcttatatagaaaagcaaaagattgttaagcaaaatgaagtatctgagaaggttgagaaggcccttgttgttgctggccttagttcaagggatgttacaccatttttgaaagtgagagtgattggccttgtcaataaacattcagcttccacatccagtaacaaggaagggctaataacaatttggaatccgactgagatgcagaaagataatcttgtggagggacaagcttattctgttatgggattggtaccttcgaactattgcaccgaaatcatgtacttgcatgctagaggatcatctacaacatggaagcccttagcatcagctcagactacagattttaaaccattctttacccctcgtagagcaattgaactcttgaaatttggtgaggtgccgatttcaagtgaatttgatattgcaggtcttattttatatgttggcaatacttatttatgtaacaacaagaaaaagcagtggctttttttaacagatggatctaaatttgtctctgggcaagggtgtgaagagcaagattgtcttctagctgttagcttttcgtccgcaaccactgatgaagactctacattatttagttacactctctctggaaatacagttggttttagtaatctggtcaaacgacagaaagacgagacgaggcaagtatgggtagctgaggcaacagagagctcaagctacactctttccaacgagattcctagaaaatctcacctaaaagaagctgcagttttggctgagagatgggcttctagatcttatcataaaattcaagagctaaaagaaagggttttatgtatagttggcaacgctggtgtctgaattataataaacggtaccacctgctgtttttggaaatggtgcaagattttgcttgggggttgtcttagctacaccattatttctcactgatgttggttggttctggttggagcctttttaacgcaatatgaatggcccttgcaaaaaacttcaagagcagcaagatccttgcacaaacttcaaaaatcaacttgaagatgtacacatttgaagacacgaggcttcagggctgttttctaagtctgtgtataaagcctttttcagagggtcgattaactttgagccgtggaaaaggttatggagatcttgggcgccgcctaaatgcaaaacttttctctggctagccattaggaacaaatgttgaactgcagacagataggagaagagggctttctcacctagaggcctgccccctctgcgatcaagagcaggaaacagctcaacacatcctaacgagttgtgtttttgcaaggcttttttggcacaacattatggctcccttcggtatgggtacctcaccccgagtcagaatgaacttatcctttgcagatttgtggcgaaaagtgagcaacaatgtgcataaagagaagagaacaggaataaacaatgctattatcttggaggcctggtgcatttggcggcaaagaaatcgtacggtttttgaaggagatttgccagctgttagcaaggtgcagcaaagttttctagaagagctaacatgtttggtcttgactggggctcatcaccttagcattttagggataattgatactcttagagcggtcggattgggctctcttgatcatatgtaatttttgtttcagtttcgatgtggtgtgggtgatgatcttgctcagcaagatcctcatcttgtaggattttcttttctctctaatataaaatatgggacgcgttcgagaaaaaaaaacttcaagagctaaaagaaaggcttctatgtatagttggcgaccctggtgtctgaattataataaatggtgctgcccgccattttttttggagatgatgcaagattttgcatgggggttcttgccataactacatgtctacatcaatatttctcagtggtacaattagaagatcaac

SEQ ID NO: 16747 - DNA, 4358 bp, Zea Mays
agtttcctgtgtctcaagctggttcaggaaatgtggaaggtccaggtagaccggccaatcagtctctgatatttcaaactagttccggaagaccagttttgatcagcaaaagatacgtcgagagatctagggctctgctgatggatgaagatgttaaaaatattcgacaatgggatactggctgccagctcccaattttccaaacaggacttggaaggcctgttgctgtgaaacatagttcaattaaaaaggcaagcacaattttgggggatggagatgttaaaagaagtggtaatggacataccggtgtttgtaccacacctttccaatttgaaacaccaaaatccgttttgatgagtagcagtttgattattaatggcatgacagttacaccagaagaaaatacttcagtgcgagcagaaaaatgtttcaacgatgatggccaattgccgttatttcagactgggtcagggaggtcagtcacagcaagtaagggttcctttaaaagggcaagttctgttctggagccaagaaatattgcaaaggaattggaagatgaatctcatctcaatgatggttatgccacctcaatatttaaaactggacttggaaagtctatcttaccaactgagaactcaagagaaagggcacaatttgtattagaggctaaagaggctgtaaaacaagcagtaattagtgacattggagctggctttggtgaaaatccaatgttccattctggaaaacaacagttttcacctgaaaatgatacttcaagacctagggccagtacccccatggagcaaggcaaatttgcaacaaaaggatatgaagactgtggaagtccattgccaatgtttcaaactggatctggaaaatctgtattggtctgtgaaagctcgatgcaaaaggcaagagccgttcttgaggaagaagagcactacaagttggttaagatggacaaaaaaattgcagcctcagcttcaccgctcaagacaagccatgcaagaacagtaaacatatcttcaactggtgtttctagagctgctaccttattgggcttggaggagaataccctttcaacacaattttttggacatgtgagtgataagttaggtacggagataactgttaagcggggaaatccagaacacatgcttgatgttgcatctgcacatgcaatttctagtggcactcataagggttttatttatccaacagaaaaccccacacatatggataaacatcagcagtttggattttctaaaagttctacctcttacgttggtgagcattctatcaggttcagcactgcaggtggccgatcaatggctatctctgtcgatgcactacaacgtgcgaaaagccttttgggtgattcagatttagtggtttctccaaatggttcaattggtcgctctttggcatcagctatagagaatctaccaaaaccaactatttctccgaaaggagatgtatctaacctatcatatggaactagagcaataggatatgctgtacctgacacccctgtgactaaaacaagtgctaatcagtttcatatgggaagggaatatcgtccagtcaatgaaattccaaaggtccccaagcctccctccagatgtttatctgaaggcgacaatgcgagtaactctaaagacaagacccagtggcaccatatgccagctggttctggaaatacggactgcttagcaaatggaaagagaattattggggggagaaactccgtatctccattcaaacggccccgttcttccagatgggtcagtaaccactataaatggattgtgtggaagcttgcttcacttgagaggtgctacccaactagagttgctggtaaattcttgacggttgacaatgttcttgaggagcttaagtaccggtattcacttgatgcatcattggatgtggcacttctggaacaactagagaaaagaaagcttttcgtagggcagaagcttcgggtgtctggtgttgtcaaattagttgtccacataaatggcacctatcgtgcaagatggaatgatgccttaggattctgcaaacatgttggactcccactggcattcaggtgcataaaagtttctggtggtagagttcctaggacactggttggaatcacaaggatatatcctattctctaccgggaaaggttgcctgatggtcgttttgttgtgagatctgaaaggatggaaagaaaggcgctggaactataccaccagagagtatctaagatcacagaagatattctgtttgaacaacaagaaaactgtgacagtactgatgataacgaggaaggggctacaatttgtaaaatgctagagcatgccgctgagcctgagtttatacttgcgggcatgactccagagcagttgaagtgtttctcatcttatatagaaaagcaaaagattgttaagcaaaatgaagtatctgagaaggttgagaaggcccttgttgttgctggccttagttcaagggatgttacaccatttttgaaagtgagagtgattggccttgtcaataaacattcagcttccacatccagtaacaaggaagggctaataacaatttggaatccgactgagatgcagaaagataatcttgtggagggacaagcttattctgttatgggattggtaccttcgaactattgcaccgaaatcatgtacttgcatgctagaggatcatctacaacatggaagcccttagcatcagctcagactacagattttaaaccattctttacccctcgtagagcaattgaactcttgaaatttggtgaggtgccgatttcaagtgaatttgatattgcaggtcttattttatatgttggcaatacttatttatgtaacaacaagaaaaagcagtggctttttttaacagatggatctaaatttgtctctgggcaagggtgtgaagagcaagattgtcttctagctgttagcttttcgtccgcaaccactgatgaagactctacattatttagttacactctctctggaaatacagttggttttagtaatctggtcaaacgacagaaagacgagacgaggcaagtatgggtagctgaggcaacagagagctcaagctacactctttccaacgagattcctagaaaatctcacctaaaagaagctgcagttttggctgagagatgggcttctagatcttatcataaaattcaagagctaaaagaaagggttttatgtatagttggcaacgctggtgtctgaattataataaacggtaccacctgctgtttttggaaatggtgcaagattttgcttgggggttgtcttagctacaccattatttctcactgatgttggttggttctggttggagcctttttaacgcaatatgaatggcccttgcaaaaaacttcaagagcagcaagatccttgcacaaacttcaaaaatcaacttgaagatgtacacatttgaagacacgaggcttcagggctgttttctaagtctgtgtataaagcctttttcagagggtcgattaactttgagccgtggaaaaggttatggagatcttgggcgccgcctaaatgcaaaacttttctctggctagccattaggaacaaatgttgaactgcagacagataggagaagagggctttctcacctagaggcctgccccctctgcgatcaagagcaggaaacagctcaacacatcctaacgagttgtgtttttgcaaggcttttttggcacaacattatggctcccttcggtatgggtacctcaccccgagtcagaatgaacttatcctttgcagatttgtggcgaaaagtgagcaacaatgtgcataaagagaagagaacaggaataaacaatgctattatcttggaggcctggtgcatttggcggcaaagaaatcgtacggtttttgaaggagatttgccagctgttagcaaggtgcagcaaagttttctagaagagctaacatgtttggtcttgactggggctcatcaccttagcattttagggataattgatactcttagagcggtcggattgggctctcttgatcatatgtaatttttgtttcagtttcgatgtggtgtgggtgatgatcttgctcagcaagatcctcatcttgtaggattttcttttctctctaatataaaatatgggacgcgttcgagaaaaaaaaacttcaagagctaaaagaaaggcttctatgtatagttggcgaccctggtgtctgaattataataaatggtgctgcccgccattttttttggagatgatgcaagattttgcatgggggttcttgccataactacatgtctacatcaatatttctcagtggtacaattagaagatcaac

SEQ ID NO: 16748 - DNA, 5018 bp, Zea Mays
ctggtctggagggtgaactggcaaacttacatgttccatttggaggtggtgtgcataaagataacttcttcccaatgttccaaagtggatctggtaaggcagtcttgctcaacaaggactcaattcagaaggcaagagctgttctagaagaaaatgttgagaatgcagctggtgccaaacagccaatgttccataccagtacgggtagatctgtcctagtcagcaagagctcaatcgataaggcgagagctgttttagggggtcggatgattgcacatgaaggagatgtaggaggtgtggatggtatggaacagtttcctgtgtctcaagctggttcaggaaatgtggaaggtccaggtagaccggccaatcagtctctgatatttcaaactagttccggaagaccagttttgatcagcaaaagatacgtcgagagatctagggctctgctgatggatgaagatgttaaaaatattcgacaatgggatactggctgccagctcccaattttccaaacaggacttggaaggcctgttgctgtgaaacatagttcaattaaaaaggcaagcacaattttgggggatggagatgttaaaagaagtggtaatggacataccggtgtttgtaccacacctttccaatttgaaacaccaaaatccgttttgatgagtagcagtttgattattaatggcatgacagttacaccagaagaaaatacttcagtgcgagcagaaaaatgtttcaacgatgatggccaattgccgttatttcagactgggtcagggaggtcagtcacagcaagtaagggttcctttaaaagggcaagttctgttctggagccaagaaatattgcaaaggaattggaagatgaatctcatctcaatgatggttatgccacctcaatatttaaaactggacttggaaagtctatcttaccaactgagaactcaagagaaagggcacaatttgtattagaggctaaagaggctgtaaaacaagcagtaattagtgacattggagctggctttggtgaaaatccaatgttccattctggaaaacaacagttttcacctgaaaatgatacttcaagacctagggccagtacccccatggagcaaggcaaatttgcaacaaaaggatatgaagactgtggaagtccattgccaatgtttcaaactggatctggaaaatctgtattggtctgtgaaagctcgatgcaaaaggcaagagccgttcttgaggaagaagagcactacaagttggttaagatggacaaaaaaattgcagcctcagcttcaccgctcaagacaagccatgcaagaacagtaaacatatcttcaactggtgtttctagagctgctaccttattgggcttggaggagaataccctttcaacacaattttttggacatgtgagtgataagttaggtacggagataactgttaagcggggaaatccagaacacatgcttgatgttgcatctgcacatgcaatttctagtggcactcataagggttttatttatccaacagaaaaccccacacatatggataaacatcagcagtttggattttctaaaagttctacctcttacgttggtgagcattctatcaggttcagcactgcaggtggccgatcaatggctatctctgtcgatgcactacaacgtgcgaaaagccttttgggtgattcagatttagtggtttctccaaatggttcaattggtcgctctttggcatcagctatagagaatctaccaaaaccaactatttctccgaaaggagatgtatctaacctatcatatggaactagagcaataggatatgctgtacctgacacccctgtgactaaaacaagtgctaatcagtttcatatgggaagggaatatcgtccagtcaatgaaattccaaaggtccccaagcctccctccagatgtttatctgaaggcgacaatgcgagtaactctaaagacaagacccagtggcaccatatgccagctggaccattggttgacatcactaattacatggctacatgttctggaaatacggactgcttagcaaatggaaagagaattattggggggagaaactccgtatctccattcaaacggccccgttcttccaggttcatcactccaataaaaaacaacaaactatcttctgctggagaatccatagtgccaccaatgcagatcagtccctgtaggacaatgctatctgtacgttatcctttccaacatcaaaggaaaaattataaagaatattttggtggtcctccttgcttcaaatatttgactgaacatgtgactgatgatgtgaagctcatggatgcaagaagagctgagaagtttagatttcagcatatggatactggtgcagaagagtttcagaaaatgctgctcacatgtggtgcttcattgtcatgtgcaacaaaagaatgggtcagtaaccactataaatggattgtgtggaagcttgcttcacttgagaggtgctacccaactagagttgctggtaaattcttgacggttgacaatgttcttgaggagcttaagtaccggtattcacttgatgcatcattggatgtggcacttctggaacaactagagaaaagaaagcttttcgtagggcagaagcttcgggtgtctggtgttgtcaaattagttgtccacataaatggcacctatcgtgcaagatggaatgatgccttaggattctgcaaacatgttggactcccactggcattcaggtgcataaaagtttctggtggtagagttcctaggacactggttggaatcacaaggatatatcctattctctaccgggaaaggttgcctgatggtcgttttgttgtgagatctgaaaggatggaaagaaaggcgctggaactataccaccagagagtatctaagatcacagaagatattctgtttgaacaacaagaaaactgtgacagtactgatgataacgaggaaggggctacaatttgtaaaatgctagagcatgccgctgagcctgagtttatacttgcgggcatgactccagagcagttgaagtgtttctcatcttatatagaaaagcaaaagattgttaagcaaaatgaagtatctgagaaggttgagaaggcccttgttgttgctggccttagttcaagggatgttacaccatttttgaaagtgagagtgattggccttgtcaataaacattcagcttccacatccagtaacaaggaagggctaataacaatttggaatccgactgagatgcagaaagataatcttgtggagggacaagcttattctgttatgggattggtaccttcgaactattgcaccgaaatcatgtacttgcatgctagaggatcatctacaacatggaagcccttagcatcagctcagactacagattttaaaccattctttacccctcgtagagcaattgaactcttgaaatttggtgaggtgccgatttcaagtgaatttgatattgcaggtcttattttatatgttggcaatacttatttatgtaacaacaagaaaaagcagtggctttttttaacagatggatctaaatttgtctctgggcaagggtgtgaagagcaagattgtcttctagctgttagcttttcgtccgcaaccactgatgaagactctacattatttagttacactctctctggaaatacagttggttttagtaatctggtcaaacgacagaaagacgagacgaggcaagtatgggtagctgaggcaacagagagctcaagctacactctttccaacgagattcctagaaaatctcacctaaaagaagctgcagttttggctgagagatgggcttctagatcttatcataaaattcaagagctaaaagaaagggttttatgtatagttggcaacgctggtgtctgaattataataaacggtaccacctgctgtttttggaaatggtgcaagattttgcttgggggttgtcttagctacaccattatttctcactgatgttggttggttctggttggagcctttttaacgcaatatgaatggcccttgcaaaaaacttcaagagcagcaagatccttgcacaaacttcaaaaatcaacttgaagatgtacacatttgaagacacgaggcttcagggctgttttctaagtctgtgtataaagcctttttcagagggtcgattaactttgagccgtggaaaaggttatggagatcttgggcgccgcctaaatgcaaaacttttctctggctagccattaggaacaaatgttgaactgcagacagataggagaagagggctttctcacctagaggcctgccccctctgcgatcaagagcaggaaacagctcaacacatcctaacgagttgtgtttttgcaaggcttttttggcacaacattatggctcccttcggtatgggtacctcaccccgagtcagaatgaacttatcctttgcagatttgtggcgaaaagtgagcaacaatgtgcataaagagaagagaacaggaataaacaatgctattatcttggaggcctggtgcatttggcggcaaagaaatcgtacggtttttgaaggagatttgccagctgttagcaaggtgcagcaaagttttctagaagagctaacatgtttggtcttgactggggctcatcaccttagcattttagggataattgatactcttagagcggtcggattgggctctcttgatcatatgtaatttttgtttcagtttcgatgtggtgtgggtgatgatcttgctcagcaagatcctcatcttgtaggattttcttttctctctaatataaaatatgggacgcgttcgagaaaaaaaaacttcaagagctaaaagaaaggcttctatgtatagttggcgaccctggtgtctgaattataataaatggtgctgcccgccattttttttggagatgatgcaagattttgcatgggggttcttgccataactacatgtctacatcaatatttctcagtggtacaattagaagatcaac

SEQ ID NO: 16749 - DNA, 5080 bp, Zea Mays
atttggttgtgatgctggtctggagggtgaactggcaaacttacatgttccatttggaggtggtgtgcataaagataacttcttcccaatgttccaaagtggatctggtaaggcagtcttgctcaacaaggactcaattcagaaggcaagagctgttctagaagaaaatgttgagaatgcagctggtgccaaacagccaatgttccataccagtacgggtagatctgtcctagtcagcaagagctcaatcgataaggcgagagctgttttagggggtcggatgattgcacatgaaggaaatgtggaaggtccaggtagaccggccaatcagtctctgatatttcaaactagttccggaagaccagttttgatcagcaaaagatacgtcgagagatctagggctctgctgatggatgaagatgttaaaaatattcgacaatgggatactggctgccagctcccaattttccaaacaggacttggaaggcctgttgctgtgaaacatagttcaattaaaaaggcaagcacaattttgggggatggagatgttaaaagaagtggtaatggacataccggtgtttgtaccacacctttccaatttgaaacaccaaaatccgttttgatgagtagcagtttgattattaatggcatgacagttacaccagaagaaaatacttcagtgcgagaaaaatgtttcaacgatgatggccaattgccgttatttcagactgggtcagggaggtcagtcacagcaagtaagggttcctttaaaagggcaagttctgttctggagccaagaaatattgcaaaggaattggaagatgaatctcatctcaatgatggttatgccacctcaatatttaaaactggacttggaaagtctatcttaccaactgagaactcaagagaaagggcacaatttgtattagaggctaaagaggctgtaaaacaagtaattagtgacattggagctggctttggtgaaaatccaatgttccattctggaaaacaacagttttcacctgaaaatgatacttcaagacctagggccagtacccccatggagcaaggcaaatttgcaacaaaaggatatgaagactgtggaagtccattgccaatgtttcaaactggatctggaaaatctgtattggtctgtgaaagctcgatgcaaaaggcaagagccgttcttgaggaagaagagcactacaagttggttaagatggacaaaaaaattgcagcctcagcttcaccgctcaagacaagccatgcaagaacagtaaacatatcttcaactggtgtttctagagctgctaccttattgggcttggaggagaataccctttcaacacaattttttggacatgtgagtgataagttaggtacggagataactgttaagcggggaaatccagaacacatgcttgatgttgcatctgcacatgcaatttctagtggcactcataagggttttatttatccaacagaaaaccccacacatatggataaacatcagcagtttggattttctaaaagttctacctcttacgttggtgagcattctatcaggttcagcactgcaggtggccgatcaatggctatctctgtcgatgcactacaacgtgcgaaaagccttttgggtgattcagatttagtggtttctccaaatggttcaattggtcgctctttggcatcagctatagagaatctaccaaaaccaactatttctccgaaaggagatgtatctaacctatcatatggaactagagcaataggatatgctgtacctgacacccctgtgactaaaacaagtgctaatcagtttcatatgggaagggaatatcgtccagtcaatgaaattccaaaggtccccaagcctccctccagatgtttatctgaaggcgacaatgcgagtaactctaaagacaagacccagtggcaccatatgccagctggaccattggttgacatcactaattacatggctacatgttctggaaatacggactgcttagcaaatggaaagagaattattggggggagaaactccgtatctccattcaaacggccccgttcttccaggttcatcactccaataaaaaacaacaaactatcttctgctggagaatccatagtgccaccaatgcagatcagtccctgtaggacaatgctatctgtacgttatcctttccaacatcaaaggaaaaattataaagaatattttggtggtcctccttgcttcaaatatttgactgaacatgtgactgatgatgtgaagctcatggatgcaagaagagctgagaagtttagatttcagcatatggatactggtgcagaagagtttcagaaaatgctgctcacatgtggtgcttcattgtcatgtgcaacaaaagaatgggtcagtaaccactataaatggattgtgtggaagcttgcttcacttgagaggtgctacccaactagagttgctggtaaattcttgacggttgacaatgttcttgaggagcttaagtaccggtattcacttgatgcatcattggatgtggcacttctggaacaactagagaaaagaaagcttttcgtagggcagaagcttcgggtgtctggtgttgtcaaattagttgtccacataaatggcacctatcgtgcaagatggaatgatgccttaggattctgcaaacatgttggactcccactggcattcaggtgcataaaagtttctggtggtagagttcctaggacactggttggaatcacaaggatatatcctattctctaccgggaaaggttgcctgatggtcgttttgttgtgagatctgaaaggatggaaagaaaggcgctggaactataccaccagagagtatctaagatcacagaagatattctgtttgaacaacaagaaaactgtgacagtactgatgataacgaggaaggggctacaatttgtaaaatgctagagcatgccgctgagcctgagtttatacttgcgggcatgactccagagcagttgaagtgtttctcatcttatatagaaaagcaaaagattgttaagcaaaatgaagtatctgagaaggttgagaaggcccttgttgttgctggccttagttcaagggatgttacaccatttttgaaagtgagagtgattggccttgtcaataaacattcagcttccacatccagtaacaaggaagggctaataacaatttggaatccgactgagatgcagaaagataatcttgtggagggacaagcttattctgttatgggattggtaccttcgaactattgcaccgaaatcatgtacttgcatgctagaggatcatctacaacatggaagcccttagcatcagctcagactacagattttaaaccattctttacccctcgtagagcaattgaactcttgaaatttggtgaggtgccgatttcaagtgaatttgatattgcaggtcttattttatatgttggcaatacttatttatgtaacaacaagaaaaagcagtggctttttttaacagatggatctaaatttgtctctgggcaagggtgtgaagagcaagattgtcttctagctgttagcttttcgtccgcaaccactgatgaagactctacattatttagttacactctctctggaaatacagtatgttttattttgattttgtatgttgagtttctgtttcttgttttgaaacctctagatggaacaccagtctgggaaatctactgctagacatttgaagaccatttgaaagttggttttagtaatctggtcaaacgacagaaagacgagacgaggcaagtatgggtagctgaggcaacagagagctcaagctacactctttccaacgagattcctagaaaatctcacctaaaagaagctgcagttttggctgagagatgggcttctagatcttatcataaaattcaagagctaaaagaaagggttttatgtatagttggcaacgctggtgtctgaattataataaacggtaccacctgctgtttttggaaatggtgcaagattttgcttgggggttgtcttagctacaccattatttctcactgatgttggttggttctggttggagcctttttaacgcaatatgaatggcccttgcaaaaaacttcaagagcagcaagatccttgcacaaacttcaaaaatcaacttgaagatgtacacatttgaagacacgaggcttcagggctgttttctaagtctgtgtataaagcctttttcagagggtcgattaactttgagccgtggaaaaggttatggagatcttgggcgccgcctaaatgcaaaacttttctctggctagccattaggaacaaatgttgaactgcagacagataggagaagagggctttctcacctagaggcctgccccctctgcgatcaagagcaggaaacagctcaacacatcctaacgagttgtgtttttgcaaggcttttttggcacaacattatggctcccttcggtatgggtacctcaccccgagtcagaatgaacttatcctttgcagatttgtggcgaaaagtgagcaacaatgtgcataaagagaagagaacaggaataaacaatgctattatcttggaggcctggtgcatttggcggcaaagaaatcgtacggtttttgaaggagatttgccagctgttagcaaggtgcagcaaagttttctagaagagctaacatgtttggtcttgactggggctcatcaccttagcattttagggataattgatactcttagagcggtcggattgggctctcttgatcatatgtaatttttgtttcagtttcgatgtggtgtgggtgatgatcttgctcagcaagatcctcatcttgtaggattttcttttctctctaatataaaatatgggacgcgttcgagaaaaaaaaacttcaagagctaaaagaaaggcttctatgtatagttggcgaccctggtgtctgaattataataaatggtgctgcccgccattttttttggagatgatgcaagattttgcatgggggttcttgccataactacatgtctacatcaatatttctcagtggtacaattagaagatcaac

SEQ ID NO: 16750 - DNA, 4869 bp, Zea Mays
cgggagcagctgattgaaggcgatgcgatggatggattggctcagagtgtcaatacggctggactgttctccaccgggtctgggaggccactggctgtcagccagagagccgtaaggagggccagtgcgttggttggcgaggaagtggacgaggctactgataacaataacaagaagagaaagaaaccatttggttgtgatgctggtctggagggtgaactggcaaacttacatgttccatttggaggtggtgtgcataaagataacttcttcccaatgttccaaagtggatctggtaaggcagtcttgctcaacaaggactcaattcagaaggcaagagctgttctagaagaaaatgttgagaatgcagctggtgccaaacagccaatgttccataccagtacgggtagatctgtcctagtcagcaagagctcaatcgataaggcgagagctgttttagggggtcggatgattgcacatgaaggagatgtaggaggtgtggatggtatggaacagtttcctgtgtctcaagctggttcaggaaatgtggaaggtccaggtagaccggccaatcagtctctgatatttcaaactagttccggaagaccagttttgatcagcaaaagatacgtcgagagatctagggctctgctgatggatgaagatgttaaaaatattcgacaatgggatactggctgccagctcccaattttccaaacaggacttggaaggcctgttgctgtgaaacatagttcaattaaaaaggcaagcacaattttgggggatggagatgttaaaagaagtggtaatggacataccggtgtttgtaccacacctttccaatttgaaacaccaaaatccgttttgatgagtagcagtttgattattaatggcatgacagttacaccagaagaaaatacttcagtgcgagcagaaaaatgtttcaacgatgatggccaattgccgttatttcagactgggtcagggaggtcagtcacagcaagtaagggttcctttaaaagggcaagttctgttctggagccaagaaatattgcaaaggaattggaagatgaatctcatctcaatgatggttatgccacctcaatatttaaaactggacttggaaagtctatcttaccaactgagaactcaagagaaagggcacaatttgtattagaggctaaagaggctgtaaaacaagtaattagtgacattggagctggctttggtgaaaatccaatgttccattctggaaaacaacagttttcacctgaaaatgatacttcaagacctagggccagtacccccatggagcaaggcaaatttgcaacaaaaggatatgaagactgtggaagtccattgccaatgtttcaaactggatctggaaaatctgtattggtctgtgaaagctcgatgcaaaaggcaagagccgttcttgaggaagaagagcactacaagttggttaagatggacaaaaaaattgcagcctcagcttcaccgctcaagacaagccatgcaagaacagtaaacatatcttcaactggtgtttctagagctgctaccttattgggcttggaggagaataccctttcaacacaattttttggacatgtgagtgataagttaggtacggagataactgttaagcggggaaatccagaacacatgcttgatgttgcatctgcacatgcaatttctagtggcactcataagggttttatttatccaacagaaaaccccacacatatggataaacatcagcagtttggattttctaaaagttctacctcttacgttggtgagcattctatcaggttcagcactgcaggtggccgatcaatggctatctctgtcgatgcactacaacgtgcgaaaagccttttgggtgattcagatttagtggtttctccaaatggttcaattggtcgctctttggcatcagctatagagaatctaccaaaaccaactatttctccgaaaggagatgtatctaacctatcatatggaactagagcaataggatatgctgtacctgacacccctgtgactaaaacaagtgctaatcagtttcatatgggaagggaatatcgtccagtcaatgaaattccaaaggtccccaagcctccctccagatgtttatctgaaggcgacaatgcgagtaactctaaagacaagacccagtggcaccatatgccagctggttctggaaatacggactgcttagcaaatggaaagagaattattggggggagaaactccgtatctccattcaaacggccccgttcttccagatgggtcagtaaccactataaatggattgtgtggaagcttgcttcacttgagaggtgctacccaactagagttgctggtaaattcttgacggttgacaatgttcttgaggagcttaagtaccggtattcacttgatgcatcattggatgtggcacttctggaacaactagagaaaagaaagcttttcgtagggcagaagcttcgggtgtctggtgttgtcaaattagttgtccacataaatggcacctatcgtgcaagatggaatgatgccttaggattctgcaaacatgttggactcccactggcattcaggtgcataaaagtttctggtggtagagttcctaggacactggttggaatcacaaggatatatcctattctctaccgggaaaggttgcctgatggtcgttttgttgtgagatctgaaaggatggaaagaaaggcgctggaactataccaccagagagtatctaagatcacagaagatattctgtttgaacaacaagaaaactgtgacagtactgatgataacgaggaaggggctacaatttgtaaaatgctagagcatgccgctgagcctgagtttatacttgcgggcatgactccagagcagttgaagtgtttctcatcttatatagaaaagcaaaagattgttaagcaaaatgaagtatctgagaaggttgagaaggcccttgttgttgctggccttagttcaagggatgttacaccatttttgaaagtgagagtgattggccttgtcaataaacattcagcttccacatccagtaacaaggaagggctaataacaatttggaatccgactgagatgcagaaagataatcttgtggagggacaagcttattctgttatgggattggtaccttcgaactattgcaccgaaatcatgtacttgcatgctagaggatcatctacaacatggaagcccttagcatcagctcagactacagattttaaaccattctttacccctcgtagagcaattgaactcttgaaatttggtgaggtgccgatttcaagtgaatttgatattgcaggtcttattttatatgttggcaatacttatttatgtaacaacaagaaaaagcagtggctttttttaacagatggatctaaatttgtctctgggcaagggtgtgaagagcaagattgtcttctagctgttagcttttcgtccgcaaccactgatgaagactctacattatttagttacactctctctggaaatacagttggttttagtaatctggtcaaacgacagaaagacgagacgaggcaagtatgggtagctgaggcaacagagagctcaagctacactctttccaacgagattcctagaaaatctcacctaaaagaagctgcagttttggctgagagatgggcttctagatcttatcataaaattcaagagctaaaagaaagggttttatgtatagttggcaacgctggtgtctgaattataataaacggtaccacctgctgtttttggaaatggtgcaagattttgcttgggggttgtcttagctacaccattatttctcactgatgttggttggttctggttggagcctttttaacgcaatatgaatggcccttgcaaaaaacttcaagagcagcaagatccttgcacaaacttcaaaaatcaacttgaagatgtacacatttgaagacacgaggcttcagggctgttttctaagtctgtgtataaagcctttttcagagggtcgattaactttgagccgtggaaaaggttatggagatcttgggcgccgcctaaatgcaaaacttttctctggctagccattaggaacaaatgttgaactgcagacagataggagaagagggctttctcacctagaggcctgccccctctgcgatcaagagcaggaaacagctcaacacatcctaacgagttgtgtttttgcaaggcttttttggcacaacattatggctcccttcggtatgggtacctcaccccgagtcagaatgaacttatcctttgcagatttgtggcgaaaagtgagcaacaatgtgcataaagagaagagaacaggaataaacaatgctattatcttggaggcctggtgcatttggcggcaaagaaatcgtacggtttttgaaggagatttgccagctgttagcaaggtgcagcaaagttttctagaagagctaacatgtttggtcttgactggggctcatcaccttagcattttagggataattgatactcttagagcggtcggattgggctctcttgatcatatgtaatttttgtttcagtttcgatgtggtgtgggtgatgatcttgctcagcaagatcctcatcttgtaggattttcttttctctctaatataaaatatgggacgcgttcgagaaaaaaaaacttcaagagctaaaagaaaggcttctatgtatagttggcgaccctggtgtctgaattataataaatggtgctgcccgccattttttttggagatgatgcaagattttgcatgggggttcttgccataactacatgtctacatcaatatttctcagtggtacaattagaagatcaac

SEQ ID NO: 16751 - DNA, 4867 bp, Zea Mays
cgggagcagctgattgaaggcgatgcgatggatggattggctcagagtgtcaatacggctggactgttctccaccgggtctgggaggccactggctgtcagccagagagccgtaaggagggccagtgcgttggttggcgaggaagtggacgaggctactgataacaataacaagaagagaagtggtgtgcataaagataacttcttcccaatgttccaaagtggatctggtaaggcagtcttgctcaacaaggactcaattcagaaggcaagagctgttctagaagaaaatgttgagaatgcagctggtgccaaacagccaatgttccataccagtacgggtagatctgtcctagtcagcaagagctcaatcgataaggcgagagctgttttagggggtcggatgattgcacatgaaggaaatgtggaaggtccaggtagaccggccaatcagtctctgatatttcaaactagttccggaagaccagttttgatcagcaaaagatacgtcgagagatctagggctctgctgatggatgaagatgttaaaaatattcgacaatgggatactggctgccagctcccaattttccaaacaggacttggaaggcctgttgctgtgaaacatagttcaattaaaaaggcaagcacaattttgggggatggagatgttaaaagaagtggtaatggacataccggtgtttgtaccacacctttccaatttgaaacaccaaaatccgttttgatgagtagcagtttgattattaatggcatgacagttacaccagaagaaaatacttcagtgcgagaaaaatgtttcaacgatgatggccaattgccgttatttcagactgggtcagggaggtcagtcacagcaagtaagggttcctttaaaagggcaagttctgttctggagccaagaaatattgcaaaggaattggaagatgaatctcatctcaatgatggttatgccacctcaatatttaaaactggacttggaaagtctatcttaccaactgagaactcaagagaaagggcacaatttgtattagaggctaaagaggctgtaaaacaagcagtaattagtgacattggagctggctttggtgaaaatccaatgttccattctggaaaacaacagttttcacctgaaaatgatacttcaagacctagggccagtacccccatggagcaaggcaaatttgcaacaaaaggatatgaagactgtggaagtccattgccaatgtttcaaactggatctggaaaatctgtattggtctgtgaaagctcgatgcaaaaggcaagagccgttcttgaggaagaagagcactacaagttggttaagatggacaaaaaaattgcagcctcagcttcaccgctcaagacaagccatgcaagaacagtaaacatatcttcaactggtgtttctagagctgctaccttattgggcttggaggagaataccctttcaacacaattttttggacatgtgagtgataagttaggtacggagataactgttaagcggggaaatccagaacacatgcttgatgttgcatctgcacatgcaatttctagtggcactcataagggttttatttatccaacagaaaaccccacacatatggataaacatcagcagtttggattttctaaaagttctacctcttacgttggtgagcattctatcaggttcagcactgcaggtggccgatcaatggctatctctgtcgatgcactacaacgtgcgaaaagccttttgggtgattcagatttagtggtttctccaaatggttcaattggtcgctctttggcatcagctatagagaatctaccaaaaccaactatttctccgaaaggagatgtatctaacctatcatatggaactagagcaataggatatgctgtacctgacacccctgtgactaaaacaagtgctaatcagtttcatatgggaagggaatatcgtccagtcaatgaaattccaaaggtccccaagcctccctccagatgtttatctgaaggcgacaatgcgagtaactctaaagacaagacccagtggcaccatatgccagctggttctggaaatacggactgcttagcaaatggaaagagaattattggggggagaaactccgtatctccattcaaacggccccgttcttccagatgggtcagtaaccactataaatggattgtgtggaagcttgcttcacttgagaggtgctacccaactagagttgctggtaaattcttgacggttgacaatgttcttgaggagcttaagtaccggtattcacttgatgcatcattggatgtggcacttctggaacaactagagaaaagaaagcttttcgtagggcagaagcttcggatatggggagcttctttatgtggttggtctgggcctgtgtcatttcatgaggtgtctggtgttgtcaaattagttgtccacataaatggcacctatcgtgcaagatggaatgatgccttaggattctgcaaacatgttggactcccactggcattcaggtgcataaaagtttctggtggtagagttcctaggacactggttggaatcacaaggatatatcctattctctaccgggaaaggttgcctgatggtcgttttgttgtgagatctgaaaggatggaaagaaaggcgctggaactataccaccagagagtatctaagatcacagaagatattctgtttgaacaacaagaaaactgtgacagtactgatgataacgaggaaggggctacaatttgtaaaatgctagagcatgccgctgagcctgagtttatacttgcgggcatgactccagagcagttgaagtgtttctcatcttatatagaaaagcaaaaggtaagtagcctggcatctgttggttcatatttacatggaaagttacacatgctttgtcgttatgctgcagattgttaagcaaaatgaagtatctgagaaggttgagaaggcccttgttgttgctggccttagttcaagggatgttacaccatttttgaaagtgagagtgattggccttgtcaataaacattcagcttccacatccagtaacaaggaagggctaataacaatttggaatccgactgagatgcagaaagataatcttgtggagggacaagcttattctgttatgggattggtaccttcgaactattgcaccgaaatcatgtacttgcatgctagaggatcatctacaacatggaagcccttagcatcagctcagactacagattttaaaccattctttacccctcgtagagcaattgaactcttgaaatttggtgaggtgccgatttcaagtgaatttgatattgcaggtcttattttatatgttggcaatacttatttatgtaacaacaagaaaaagcagtggctttttttaacagatggatctaaatttgtctctgggcaagggtgtgaagagcaagattgtcttctagctgttagcttttcgtccgcaaccactgatgaagactctacattatttagttacactctctctggaaatacagttggttttagtaatctggtcaaacgacagaaagacgagacgaggcaagtatgggtagctgaggcaacagagagctcaagctacactctttccaacgagattcctagaaaatctcacctaaaagaagctgcagttttggctgagagatgggcttctagatcttatcataaaattcaagagctaaaagaaagggttttatgtatagttggcaacgctggtgtctgaattataataaacggtaccacctgctgtttttggaaatggtgcaagattttgcttgggggttgtcttagctacaccattatttctcactgatgttggttggttctggttggagcctttttaacgcaatatgaatggcccttgcaaaaaacttcaagagcagcaagatccttgcacaaacttcaaaaatcaacttgaagatgtacacatttgaagacacgaggcttcagggctgttttctaagtctgtgtataaagcctttttcagagggtcgattaactttgagccgtggaaaaggttatggagatcttgggcgccgcctaaatgcaaaacttttctctggctagccattaggaacaaatgttgaactgcagacagataggagaagagggctttctcacctagaggcctgccccctctgcgatcaagagcaggaaacagctcaacacatcctaacgagttgtgtttttgcaaggcttttttggcacaacattatggctcccttcggtatgggtacctcaccccgagtcagaatgaacttatcctttgcagatttgtggcgaaaagtgagcaacaatgtgcataaagagaagagaacaggaataaacaatgctattatcttggaggcctggtgcatttggcggcaaagaaatcgtacggtttttgaaggagatttgccagctgttagcaaggtgcagcaaagttttctagaagagctaacatgtttggtcttgactggggctcatcaccttagcattttagggataattgatactcttagagcggtcggattgggctctcttgatcatatgtaatttttgtttcagtttcgatgtggtgtgggtgatgatcttgctcagcaagatcctcatcttgtaggattttcttttctctctaatataaaatatgggacgcgttcgagaaaaaaaaacttcaagagctaaaagaaaggcttctatgtatagttggcgaccctggtgtctgaattataataaatggtgctgcccgccattttttttggagatgatgcaagattttgcatgggggttcttgccataactacatgtctacatcaatatttctcagtggtacaattagaagatcaac

SEQ ID NO: 16752 - DNA, 4833 bp, Zea Mays
cgtatctcttctatggccgacctactccttcaagcgcgggagcagctgattgaaggcgatgcgatggatggattggctcagagtgtcaatacggctggactgttctccaccgggtctgggaggccactggctgtcagccagagagccgtaaggagggccagtgcgttggttggcgaggaagtggacgaggctactgataacaataacaagaagagaagtggtgtgcataaagataacttcttcccaatgttccaaagtggatctggtaaggcagtcttgctcaacaaggactcaattcagaaggcaagagctgttctagaagaaaatgttgagaatgcagctggtgccaaacagccaatgttccataccagtacgggtagatctgtcctagtcagcaagagctcaatcgataaggcgagagctgttttagggggtcggatgattgcacatgaaggaaatgtggaaggtccaggtagaccggccaatcagtctctgatatttcaaactagttccggaagaccagttttgatcagcaaaagatacgtcgagagatctagggctctgctgatggatgaagatgttaaaaatattcgacaatgggatactggctgccagctcccaattttccaaacaggacttggaaggcctgttgctgtgaaacatagttcaattaaaaaggcaagcacaattttgggggatggagatgttaaaagaagtggtaatggacataccggtgtttgtaccacacctttccaatttgaaacaccaaaatccgttttgatgagtagcagtttgattattaatggcatgacagttacaccagaagaaaatacttcagtgcgagcagaaaaatgtttcaacgatgatggccaattgccgttatttcagactgggtcagggaggtcagtcacagcaagtaagggttcctttaaaagggcaagttctgttctggagccaagaaatattgcaaaggaattggaagatgaatctcatctcaatgatggttatgccacctcaatatttaaaactggacttggaaagtctatcttaccaactgagaactcaagagaaagggcacaatttgtattagaggctaaagaggctgtaaaacaagtaattagtgacattggagctggctttggtgaaaatccaatgttccattctggaaaacaacagttttcacctgaaaatgatacttcaagacctagggccagtacccccatggagcaaggcaaatttgcaacaaaaggatatgaagactgtggaagtccattgccaatgtttcaaactggatctggaaaatctgtattggtctgtgaaagctcgatgcaaaaggcaagagccgttcttgaggaagaagagcactacaagttggttaagatggacaaaaaaattgcagcctcagcttcaccgctcaagacaagccatgcaagaacagtaaacatatcttcaactggtgtttctagagctgctaccttattgggcttggaggagaataccctttcaacacaattttttggacatgtgagtgataagttaggtacggagataactgttaagcggggaaatccagaacacatgcttgatgttgcatctgcacatgcaatttctagtggcactcataagggttttatttatccaacagaaaaccccacacatatggataaacatcagcagtttggattttctaaaagttctacctcttacgttggtgagcattctatcaggttcagcactgcaggtggccgatcaatggctatctctgtcgatgcactacaacgtgcgaaaagccttttgggtgattcagatttagtggtttctccaaatggttcaattggtcgctctttggcatcagctatagagaatctaccaaaaccaactatttctccgaaaggagatgtatctaacctatcatatggaactagagcaataggatatgctgtacctgacacccctgtgactaaaacaagtgctaatcagtttcatatgggaagggaatatcgtccagtcaatgaaattccaaaggtccccaagcctccctccagatgtttatctgaaggcgacaatgcgagtaactctaaagacaagacccagtggcaccatatgccagctggttctggaaatacggactgcttagcaaatggaaagagaattattggggggagaaactccgtatctccattcaaacggccccgttcttccagatgggtcagtaaccactataaatggattgtgtggaagcttgcttcacttgagaggtgctacccaactagagttgctggtaaattcttgacggttgacaatgttcttgaggagcttaagtaccggtattcacttgatgcatcattggatgtggcacttctggaacaactagagaaaagaaagcttttcgtagggcagaagcttcggatatggggagcttctttatgtggttggtctgggcctgtgtcatttcatgaggtgtctggtgttgtcaaattagttgtccacataaatggcacctatcgtgcaagatggaatgatgccttaggattctgcaaacatgttggactcccactggcattcaggtgcataaaagtttctggtggtagagttcctaggacactggttggaatcacaaggatatatcctattctctaccgggaaaggttgcctgatggtcgttttgttgtgagatctgaaaggatggaaagaaaggcgctggaactataccaccagagagtatctaagatcacagaagatattctgtttgaacaacaagaaaactgtgacagtactgatgataacgaggaaggggctacaatttgtaaaatgctagagcatgccgctgagcctgagtttatacttgcgggcatgactccagagcagttgaagtgtttctcatcttatatagaaaagcaaaagattgttaagcaaaatgaagtatctgagaaggttgagaaggcccttgttgttgctggccttagttcaagggatgttacaccatttttgaaagtgagagtgattggccttgtcaataaacattcagcttccacatccagtaacaaggaagggctaataacaatttggaatccgactgagatgcagaaagataatcttgtggagggacaagcttattctgttatgggattggtaccttcgaactattgcaccgaaatcatgtacttgcatgctagaggatcatctacaacatggaagcccttagcatcagctcagactacagattttaaaccattctttacccctcgtagagcaattgaactcttgaaatttggtgaggtgccgatttcaagtgaatttgatattgcaggtcttattttatatgttggcaatacttatttatgtaacaacaagaaaaagcagtggctttttttaacagatggatctaaatttgtctctgggcaagggtgtgaagagcaagattgtcttctagctgttagcttttcgtccgcaaccactgatgaagactctacattatttagttacactctctctggaaatacagttggttttagtaatctggtcaaacgacagaaagacgagacgaggcaagtatgggtagctgaggcaacagagagctcaagctacactctttccaacgagattcctagaaaatctcacctaaaagaagctgcagttttggctgagagatgggcttctagatcttatcataaaattcaagagctaaaagaaagggttttatgtatagttggcaacgctggtgtctgaattataataaacggtaccacctgctgtttttggaaatggtgcaagattttgcttgggggttgtcttagctacaccattatttctcactgatgttggttggttctggttggagcctttttaacgcaatatgaatggcccttgcaaaaaacttcaagagcagcaagatccttgcacaaacttcaaaaatcaacttgaagatgtacacatttgaagacacgaggcttcagggctgttttctaagtctgtgtataaagcctttttcagagggtcgattaactttgagccgtggaaaaggttatggagatcttgggcgccgcctaaatgcaaaacttttctctggctagccattaggaacaaatgttgaactgcagacagataggagaagagggctttctcacctagaggcctgccccctctgcgatcaagagcaggaaacagctcaacacatcctaacgagttgtgtttttgcaaggcttttttggcacaacattatggctcccttcggtatgggtacctcaccccgagtcagaatgaacttatcctttgcagatttgtggcgaaaagtgagcaacaatgtgcataaagagaagagaacaggaataaacaatgctattatcttggaggcctggtgcatttggcggcaaagaaatcgtacggtttttgaaggagatttgccagctgttagcaaggtgcagcaaagttttctagaagagctaacatgtttggtcttgactggggctcatcaccttagcattttagggataattgatactcttagagcggtcggattgggctctcttgatcatatgtaatttttgtttcagtttcgatgtggtgtgggtgatgatcttgctcagcaagatcctcatcttgtaggattttcttttctctctaatataaaatatgggacgcgttcgagaaaaaaaaacttcaagagctaaaagaaaggcttctatgtatagttggcgaccctggtgtctgaattataataaatggtgctgcccgccattttttttggagatgatgcaagattttgcatgggggttcttgccataactacatgtctacatcaatatttctcagtggtacaattagaagatcaac

SEQ ID NO: 16753 - DNA, 5199 bp, Zea Mays
cgtatctcttctatggccgacctactccttcaagcgcgggagcagctgattgaaggcgatgcgatggatggattggctcagagtgtcaatacggctggactgttctccaccgggtctgggaggccactggctgtcagccagagagccgtaaggagggccagtgcgttggttggcgaggaagtggacgaggctactgataacaataacaagaagagaagtggtgtgcataaagataacttcttcccaatgttccaaagtggatctggtaaggcagtcttgctcaacaaggactcaattcagaaggcaagagctgttctagaagaaaatgttgagaatgcagctggtgccaaacagccaatgttccataccagtacgggtagatctgtcctagtcagcaagagctcaatcgataaggcgagagctgttttagggggtcggatgattgcacatgaaggagatgtaggaggtgtggatggtatggaacagtttcctgtgtctcaagctggttcaggaaatgtggaaggtccaggtagaccggccaatcagtctctgatatttcaaactagttccggaagaccagttttgatcagcaaaagatacgtcgagagatctagggctctgctgatggatgaagatgttaaaaatattcgacaatgggatactggctgccagctcccaattttccaaacaggacttggaaggcctgttgctgtgaaacatagttcaattaaaaaggcaagcacaattttgggggatggagatgttaaaagaagtggtaatggacataccggtgtttgtaccacacctttccaatttgaaacaccaaaatccgttttgatgagtagcagtttgattattaatggcatgacagttacaccagaagaaaatacttcagtgcgagcagaaaaatgtttcaacgatgatggccaattgccgttatttcagactgggtcagggaggtcagtcacagcaagtaagggttcctttaaaagggcaagttctgttctggagccaagaaatattgcaaaggaattggaagatgaatctcatctcaatgatggttatgccacctcaatatttaaaactggacttggaaagtctatcttaccaactgagaactcaagagaaagggcacaatttgtattagaggctaaagaggctgtaaaacaagctgctaccttattgggcttggaggagaataccctttcaacacaattttttggacatgtgagtgataagttaggtacggagataactgttaagcggggaaatccagaacacatgcttgatgttgcatctgcacatgcaatttctagtggcactcataagggttttatttatccaacagaaaaccccacacatatggataaacatcagcagtttggattttctaaaagttctacctcttacgttggtgagcattctatcaggttcagcactgcaggtggccgatcaatggctatctctgtcgatgcactacaacgtgcgaaaagccttttgggtgattcagatttagtggtttctccaaatggttcaattggtcgctctttggcatcagctatagagaatctaccaaaaccaactatttctccgaaaggagatgtatctaacctatcatatggaactagagcaataggatatgctgtacctgacacccctgtgactaaaacaagtgctaatcagtttcatatgggaagggaatatcgtccagtcaatgaaattccaaaggtccccaagcctccctccagatgtttatctgaaggcgacaatgcgagtaactctaaagacaagacccagtggcaccatatgccagctggaccattggttgacatcactaattacatggctacatgttctggaaatacggactgcttagcaaatggaaagagaattattggggggagaaactccgtatctccattcaaacggccccgttcttccaggttcatcactccaataaaaaacaacaaactatcttctgctggagaatccatagtgccaccaatgcagatcagtccctgtaggacaatgctatctgtacgttatcctttccaacatcaaaggaaaaattataaagaatattttggtggtcctccttgcttcaaatatttgactgaacatgtgactgatgatgtgaagctcatggatgcaagaagagctgagaagtttagatttcagcatatggatactggtgcagaagagtttcagaaaatgctgctcacatgtggtgcttcattgtcatgtgcaacaaaagaatgggtcagtaaccactataaatggattgtgtggaagcttgcttcacttgagaggtgctacccaactagagttgctggtaaattcttgacggttgacaatgttcttgaggagcttaagtaccggtatgacagagaagtgaatcatggtcatcgatcagcaataaagaaaattttagaagggaattcttcaccatctttaatgatggtcttgtgcatttcagctatttactcttgtccttaccaaaataacaataagttggaggttaacaaggtagatactaatgaagacaacagtggcaaccaaagcttctctgccactaatagaaacatgtctgcaaatattgaattaactgatggatggtatgtggttgtgttcaccttattgcattgcattgaaactgaatcacaccaacaagttccatgttggcttcttcacaggtattcacttgatgcatcattggatgtggcacttctggaacaactagagaaaagaaagcttttcgtagggcagaagcttcggatatggggagcttctttatgtggttggtctgggcctgtgtcatttcatgaggtgtctggtgttgtcaaattagttgtccacataaatggcacctatcgtgcaagatggaatgatgccttaggattctgcaaacatgttggactcccactggcattcaggtgcataaaagtttctggtggtagagttcctaggacactggttggaatcacaaggatatatcctattctctaccgggaaaggttgcctgatggtcgttttgttgtgagatctgaaaggatggaaagaaaggcgctggaactataccaccagagagtatctaagatcacagaagatattctgtttgaacaacaagaaaactgtgacagtactgatgataacgaggaaggggctacaatttgtaaaatgctagagcatgccgctgagcctgagtttatacttgcgggcatgactccagagcagttgaagtgtttctcatcttatatagaaaagcaaaagattgttaagcaaaatgaagtatctgagaaggttgagaaggcccttgttgttgctggccttagttcaagggatgttacaccatttttgaaagtgagagtgattggccttgtcaataaacattcagcttccacatccagtaacaaggaagggctaataacaatttggaatccgactgagatgcagaaagataatcttgtggagggacaagcttattctgttatgggattggtaccttcgaactattgcaccgaaatcatgtacttgcatgctagaggatcatctacaacatggaagcccttagcatcagctcagactacagattttaaaccattctttacccctcgtagagcaattgaactcttgaaatttggtgaggtgccgatttcaagtgaatttgatattgcaggtcttattttatatgttggcaatacttatttatgtaacaacaagaaaaagcagtggctttttttaacagatggatctaaatttgtctctgggcaagggtgtgaagagcaagattgtcttctagctgttagcttttcgtccgcaaccactgatgaagactctacattatttagttacactctctctggaaatacagttggttttagtaatctggtcaaacgacagaaagacgagacgaggcaagtatgggtagctgaggcaacagagagctcaagctacactctttccaacgagattcctagaaaatctcacctaaaagaagctgcagttttggctgagagatgggcttctagatcttatcataaaattcaagagctaaaagaaagggttttatgtatagttggcaacgctggtgtctgaattataataaacggtaccacctgctgtttttggaaatggtgcaagattttgcttgggggttgtcttagctacaccattatttctcactgatgttggttggttctggttggagcctttttaacgcaatatgaatggcccttgcaaaaaacttcaagagcagcaagatccttgcacaaacttcaaaaatcaacttgaagatgtacacatttgaagacacgaggcttcagggctgttttctaagtctgtgtataaagcctttttcagagggtcgattaactttgagccgtggaaaaggttatggagatcttgggcgccgcctaaatgcaaaacttttctctggctagccattaggaacaaatgttgaactgcagacagataggagaagagggctttctcacctagaggcctgccccctctgcgatcaagagcaggaaacagctcaacacatcctaacgagttgtgtttttgcaaggcttttttggcacaacattatggctcccttcggtatgggtacctcaccccgagtcagaatgaacttatcctttgcagatttgtggcgaaaagtgagcaacaatgtgcataaagagaagagaacaggaataaacaatgctattatcttggaggcctggtgcatttggcggcaaagaaatcgtacggtttttgaaggagatttgccagctgttagcaaggtgcagcaaagttttctagaagagctaacatgtttggtcttgactggggctcatcaccttagcattttagggataattgatactcttagagcggtcggattgggctctcttgatcatatgtaatttttgtttcagtttcgatgtggtgtgggtgatgatcttgctcagcaagatcctcatcttgtaggattttcttttctctctaatataaaatatgggacgcgttcgagaaaaaaaaacttcaagagctaaaagaaaggcttctatgtatagttggcgaccctggtgtctgaattataataaatggtgctgcccgccattttttttggagatgatgcaagattttgcatgggggttcttgccataactacatgtctacatcaatatttctcagtggtacaattagaagatcaac

SEQ ID NO: 16754 - DNA, 5885 bp, Zea Mays
ggtcactcaatttccaagtaaatccagttctccctcgtctccgtcgctggctcgtcccggccccgcctgtgcgccgcggcccaggaatcatgccgagcaagtggcaggtctggggccagcccgacggcagcatcgtctggctccccgtctccgacgcgcccccaaacccgcctcggccgggtccgcttcgtcccgctcctcgtcatccgccgctgcccgacgaagcgccaatcgaagaaaccctatgcccggacaccgccggcggatgccgtatctcttctatggccgacctactccttcaagcgcgggagcagctgattgaaggcgatgcgatggatggattggctcagagtgtcaatacggctggactgttctccaccgggtctgggaggccactggctgtcagccagagagccgtaaggagggccagtgcgttggttggcgaggaagtggacgaggctactgataacaataacaagaagagaaagaaaccatttggttgtgatgctggtctggagggtgaactggcaaacttacatgttccatttggaggtggtgtgcataaagataacttcttcccaatgttccaaagtggatctggtaaggcagtcttgctcaacaaggactcaattcagaaggcaagagctgttctagaagaaaatgttgagaatgcagctggtgccaaacagccaatgttccataccagtacgggtagatctgtcctagtcagcaagagctcaatcgataaggcgagagctgttttagggggtcggatgattgcacatgaaggagatgtaggaggtgtggatggtatggaacagtttcctgtgtctcaagctggttcaggaaatgtggaaggtccaggtagaccggccaatcagtctctgatatttcaaactagttccggaagaccagttttgatcagcaaaagatacgtcgagagatctagggctctgctgatggatgaagatgttaaaaatattcgacaatgggatactggctgccagctcccaattttccaaacaggacttggaaggcctgttgctgtgaaacatagttcaattaaaaaggcaagcacaattttgggggatggagatgttaaaagaagtggtaatggacataccggtgtttgtaccacacctttccaatttgaaacaccaaaatccgttttgatgagtagcagtttgattattaatggcatgacagttacaccagaagaaaatacttcagtgcgagaaaaatgtttcaacgatgatggccaattgccgttatttcagactgggtcagggaggtcagtcacagcaagtaagggttcctttaaaagggcaagttctgttctggagccaagaaatattgcaaaggaattggaagatgaatctcatctcaatgatggttatgccacctcaatatttaaaactggacttggaaagtctatcttaccaactgagaactcaagagaaagggcacaatttgtattagaggctaaagaggctgtaaaacaagtaattagtgacattggagctggctttggtgaaaatccaatgttccattctggaaaacaacagttttcacctgaaaatgatacttcaagacctagggccagtacccccatggagcaaggcaaatttgcaacaaaaggatatgaagactgtggaagtccattgccaatgtttcaaactggatctggaaaatctgtattggtctgtgaaagctcgatgcaaaaggcaagagccgttcttgaggaagaagagcactacaagttggttaagatggacaaaaaaattgcagcctcagcttcaccgctcaagacaagccatgcaagaacagtaaacatatcttcaactggtgtttctagagctgctaccttattgggcttggaggagaataccctttcaacacaattttttggacatgtgagtgataagttaggtacggagataactgttaagcggggaaatccagaacacatgcttgatgttgcatctgcacatgcaatttctagtggcactcataagggttttatttatccaacagaaaaccccacacatatggataaacatcagcagtttggattttctaaaagttctacctcttacgttggtgagcattctatcaggttcagcactgcaggtggccgatcaatggctatctctgtcgatgcactacaacgtgcgaaaagccttttgggtgattcagatttagtggtttctccaaatggttcaattggtcgctctttggcatcagctatagagaatctaccaaaaccaactatttctccgaaaggagatgtatctaacctatcatatggaactagagcaataggatatgctgtacctgacacccctgtgactaaaacaagtgctaatcagtttcatatgggaagggaatatcgtccagtcaatgaaattccaaaggtccccaagcctccctccagatgtttatctgaaggcgacaatgcgagtaactctaaagacaagacccagtggcaccatatgccagctggaccattggttgacatcactaattacatggctacatgttctggaaatacggactgcttagcaaatggaaagagaattattggggggagaaactccgtatctccattcaaacggccccgttcttccaggttcatcactccaataaaaaacaacaaactatcttctgctggagaatccatagtgccaccaatgcagatcagtccctgtaggacaatgctatctgtacgttatcctttccaacatcaaaggaaaaattataaagaatattttggtggtcctccttgcttcaaatatttgactgaacatgtgactgatgatgtgaagctcatggatgcaagaagagctgagaagtttagatttcagcatatggatactggtgcagaagagtttcagaaaatgctgctcacatgtggtgcttcattgtcatgtgcaacaaaagaatgggtcagtaaccactataaatggattgtgtggaagcttgcttcacttgagaggtgctacccaactagagttgctggtaaattcttgacggttgacaatgttcttgaggagcttaagtaccggtatgacagagaagtgaatcatggtcatcgatcagcaataaagaaaattttagaagggaattcttcaccatctttaatgatggtcttgtgcatttcagctatttactcttgtccttaccaaaataacaataagttggaggttaacaaggtagatactaatgaagacaacagtggcaaccaaagcttctctgccactaatagaaacatgtctgcaaatattgaattaactgatggatggtatgtggttgtgttcaccttattgcattgcattgaaactgaatcacaccaacaagttccatgttggcttcttcacaggtattcacttgatgcatcattggatgtggcacttctggaacaactagagaaaagaaagcttttcgtagggcagaagcttcggatatggggagcttctttatgtggttggtctgggcctgtgtcatttcatgaggtgtctggtgttgtcaaattagttgtccacataaatggcacctatcgtgcaagatggaatgatgccttaggattctgcaaacatgttggactcccactggcattcaggtgcataaaagtttctggtggtagagttcctaggacactggttggaatcacaaggatatatcctattctctaccgggaaaggttgcctgatggtcgttttgttgtgagatctgaaaggatggaaagaaaggcgctggaactataccaccagagagtatctaagatcacagaagatattctgtttgaacaacaagaaaactgtgacagtactgatgataacgaggaaggggctacaatttgtaaaatgctagagcatgccgctgagcctgagtttatacttgcgggcatgactccagagcagttgaagtgtttctcatcttatatagaaaagcaaaagattgttaagcaaaatgaagtatctgagaaggttgagaaggcccttgttgttgctggccttagttcaagggatgttacaccatttttgaaagtgagagtgattggccttgtcaataaacattcagcttccacatccagtaacaaggaagggctaataacaatttggaatccgactgagatgcagaaagataatcttgtggagggacaagcttattctgttatgggattggtaccttcgaactattgcaccgaaatcatgtacttgcatgctagaggatcatctacaacatggaagcccttagcatcagctcagactacagattttaaaccattctttacccctcgtagagcaattgaactcttgaaatttggtgaggtgccgatttcaagtgaatttgatattgcaggtcttattttatatgttggcaatacttatttatgtaacaacaagaaaaagcagtggctttttttaacagatggatctaaatttgtctctgggcaagggtgtgaagagcaagattgtcttctagctgttagcttttcgtccgcaaccactgatgaagactctacattatttagttacactctctctggaaatacagttggttttagtaatctggtcaaacgacagaaagacgagacgaggcaagtatgggtagctgaggcaacagagagctcaagctacactctttccaacgagattcctagaaaatctcacctaaaagaagctgcagttttggctgagagatgggcttctagatcttatcataaaattcaagagctaaaagaaagggttttatgtatagttggcaacgctggtgtctgaattataataaacggtaccacctgctgtttttggaaatggtgcaagattttgcttgggggttgtcttagctacaccattatttctcactgatgttggttggttctggttggagcctttttaacgcaatatgaatggcccttgcaaaaaacttcaagagcagcaagatccttgcacaaacttcaaaaatcaacttgaagatgtacacatttgaagacacgaggcttcagggctgttttctaagtctgtgtataaagcctttttcagagggtcgattaactttgagccgtggaaaaggttatggagatcttgggcgccgcctaaatgcaaaacttttctctggctagccattaggaacaaatgttgaactgcagacagataggagaagagggctttctcacctagaggcctgccccctctgcgatcaagagcaggaaacagctcaacacatcctaacgagttgtgtttttgcaaggcttttttggcacaacattatggctcccttcggtatgggtacctcaccccgagtcagaatgaacttatcctttgcagatttgtggcgaaaagtgagcaacaatgtgcataaagagaagagaacaggaataaacaatgctattatcttggaggcctggtgcatttggcggcaaagaaatcgtacggtttttgaaggagatttgccagctgttagcaaggtgcagcaaagttttctagaagagctaacatgtttggtcttgactggggctcatcaccttagcattttagggataattgatactcttagagcggtcggattgggctctcttgatcatatgtaatttttgtttcagtttcgatgtggtgtgggtgatgatcttgctcagcaagatcctcatcttgtaggattttcttttctctctaatataaaatatgggacgcgttcgagaaaaaaaaacttcaagagctaaaagaaaggcttctatgtatagttggcgaccctggtgtctgaattataataaatggtgctgcccgccattttttttggagatgatgcaagattttgcatgggggttcttgccataactacatgtctacatcaatatttctcagtggtacaattagaagatcaac

SEQ ID NO: 16755 - DNA, 5171 bp, Zea Mays
ggtcactcaatttccaagtaaatccagttctccctcgtctccgtcgctggctcgtcccggccccgcctgtgcgccgcggcccaggaatcatgccgagcaagtggcaggtctggggccagcccgacggcagcatcgtctggctccccgtctccgacgcgcccccaaacccgcctcggccgggtccgcttcgtcccgctcctcgtcatccgccgctgcccgacgaagcgccaatcgaagaaaccctatgcccggacaccgccggcggatgccgtatctcttctatggccgacctactccttcaagcgcgggagcagctgattgaaggcgatgcgatggatggattggctcagagtgtcaatacggctggactgttctccaccgggtctgggaggccactggctgtcagccagagagccgtaaggagggccagtgcgttggttggcgaggaagtggacgaggctactgataacaataacaagaagagaaagaaaccatttggttgtgatgctggtctggagggtgaactggcaaacttacatgttccatttggaggtggtgtgcataaagataacttcttcccaatgttccaaagtggatctggtaaggcagtcttgctcaacaaggactcaattcagaaggcaagagctgttctagaagaaaatgttgagaatgcagctggtgccaaacagccaatgttccataccagtacgggtagatctgtcctagtcagcaagagctcaatcgataaggcgagagctgttttagggggtcggatgattgcacatgaaggaaatgtggaaggtccaggtagaccggccaatcagtctctgatatttcaaactagttccggaagaccagttttgatcagcaaaagatacgtcgagagatctagggctctgctgatggatgaagatgttaaaaatattcgacaatgggatactggctgccagctcccaattttccaaacaggacttggaaggcctgttgctgtgaaacatagttcaattaaaaaggcaagcacaattttgggggatggagatgttaaaagaagtggtaatggacataccggtgtttgtaccacacctttccaatttgaaacaccaaaatccgttttgatgagtagcagtttgattattaatggcatgacagttacaccagaagaaaatacttcagtgcgagcagaaaaatgtttcaacgatgatggccaattgccgttatttcagactgggtcagggaggtcagtcacagcaagtaagggttcctttaaaagggcaagttctgttctggagccaagaaatattgcaaaggaattggaagatgaatctcatctcaatgatggttatgccacctcaatatttaaaactggacttggaaagtctatcttaccaactgagaactcaagagaaagggcacaatttgtattagaggctaaagaggctgtaaaacaagcagtaattagtgacattggagctggctttggtgaaaatccaatgttccattctggaaaacaacagttttcacctgaaaatgatacttcaagacctagggccagtacccccatggagcaaggcaaatttgcaacaaaaggatatgaagactgtggaagtccattgccaatgtttcaaactggatctggaaaatctgtattggtctgtgaaagctcgatgcaaaaggcaagagccgttcttgaggaagaagagcactacaagttggttaagatggacaaaaaaattgcagcctcagcttcaccgctcaagacaagccatgcaagaacagtaaacatatcttcaactggtgtttctagagctgctaccttattgggcttggaggagaataccctttcaacacaattttttggacatgtgagtgataagttaggtacggagataactgttaagcggggaaatccagaacacatgcttgatgttgcatctgcacatgcaatttctagtggcactcataagggttttatttatccaacagaaaaccccacacatatggataaacatcagcagtttggattttctaaaagttctacctcttacgttggtgagcattctatcaggttcagcactgcaggtggccgatcaatggctatctctgtcgatgcactacaacgtgcgaaaagccttttgggtgattcagatttagtggtttctccaaatggttcaattggtcgctctttggcatcagctatagagaatctaccaaaaccaactatttctccgaaaggagatgtatctaacctatcatatggaactagagcaataggatatgctgtacctgacacccctgtgactaaaacaagtgctaatcagtttcatatgggaagggaatatcgtccagtcaatgaaattccaaaggtccccaagcctccctccagatgtttatctgaaggcgacaatgcgagtaactctaaagacaagacccagtggcaccatatgccagctggttctggaaatacggactgcttagcaaatggaaagagaattattggggggagaaactccgtatctccattcaaacggccccgttcttccagatgggtcagtaaccactataaatggattgtgtggaagcttgcttcacttgagaggtgctacccaactagagttgctggtaaattcttgacggttgacaatgttcttgaggagcttaagtaccggtattcacttgatgcatcattggatgtggcacttctggaacaactagagaaaagaaagcttttcgtagggcagaagcttcggatatggggagcttctttatgtggttggtctgggcctgtgtcatttcatgaggtgtctggtgttgtcaaattagttgtccacataaatggcacctatcgtgcaagatggaatgatgccttaggattctgcaaacatgttggactcccactggcattcaggtgcataaaagtttctggtggtagagttcctaggacactggttggaatcacaaggatatatcctattctctaccgggaaaggttgcctgatggtcgttttgttgtgagatctgaaaggatggaaagaaaggcgctggaactataccaccagagagtatctaagatcacagaagatattctgtttgaacaacaagaaaactgtgacagtactgatgataacgaggaaggggctacaatttgtaaaatgctagagcatgccgctgagcctgagtttatacttgcgggcatgactccagagcagttgaagtgtttctcatcttatatagaaaagcaaaagattgttaagcaaaatgaagtatctgagaaggttgagaaggcccttgttgttgctggccttagttcaagggatgttacaccatttttgaaagtgagagtgattggccttgtcaataaacattcagcttccacatccagtaacaaggaagggctaataacaatttggaatccgactgagatgcagaaagataatcttgtggagggacaagcttattctgttatgggattggtaccttcgaactattgcaccgaaatcatgtacttgcatgctagaggatcatctacaacatggaagcccttagcatcagctcagactacagattttaaaccattctttacccctcgtagagcaattgaactcttgaaatttggtgaggtgccgatttcaagtgaatttgatattgcaggtcttattttatatgttggcaatacttatttatgtaacaacaagaaaaagcagtggctttttttaacagatggatctaaatttgtctctgggcaagggtgtgaagagcaagattgtcttctagctgttagcttttcgtccgcaaccactgatgaagactctacattatttagttacactctctctggaaatacagttggttttagtaatctggtcaaacgacagaaagacgagacgaggcaagtatgggtagctgaggcaacagagagctcaagctacactctttccaacgagattcctagaaaatctcacctaaaagaagctgcagttttggctgagagatgggcttctagatcttatcataaaattcaagagctaaaagaaagggttttatgtatagttggcaacgctggtgtctgaattataataaacggtaccacctgctgtttttggaaatggtgcaagattttgcttgggggttgtcttagctacaccattatttctcactgatgttggttggttctggttggagcctttttaacgcaatatgaatggcccttgcaaaaaacttcaagagcagcaagatccttgcacaaacttcaaaaatcaacttgaagatgtacacatttgaagacacgaggcttcagggctgttttctaagtctgtgtataaagcctttttcagagggtcgattaactttgagccgtggaaaaggttatggagatcttgggcgccgcctaaatgcaaaacttttctctggctagccattaggaacaaatgttgaactgcagacagataggagaagagggctttctcacctagaggcctgccccctctgcgatcaagagcaggaaacagctcaacacatcctaacgagttgtgtttttgcaaggcttttttggcacaacattatggctcccttcggtatgggtacctcaccccgagtcagaatgaacttatcctttgcagatttgtggcgaaaagtgagcaacaatgtgcataaagagaagagaacaggaataaacaatgctattatcttggaggcctggtgcatttggcggcaaagaaatcgtacggtttttgaaggagatttgccagctgttagcaaggtgcagcaaagttttctagaagagctaacatgtttggtcttgactggggctcatcaccttagcattttagggataattgatactcttagagcggtcggattgggctctcttgatcatatgtaatttttgtttcagtttcgatgtggtgtgggtgatgatcttgctcagcaagatcctcatcttgtaggattttcttttctctctaatataaaatatgggacgcgttcgagaaaaaaaaacttcaagagctaaaagaaaggcttctatgtatagttggcgaccctggtgtctgaattataataaatggtgctgcccgccattttttttggagatgatgcaagattttgcatgggggttcttgccataactacatgtctacatcaatatttctcagtggtacaattagaagatcaac

SEQ ID NO: 16756 - DNA, 5465 bp, Zea Mays
ggtcactcaatttccaagtaaatccagttctccctcgtctccgtcgctggctcgtcccggccccgcctgtgcgccgcggcccaggaatcatgccgagcaagtggcaggtctggggccagcccgacggcagcatcgtctggctccccgtctccgacgcgcccccaaacccgcctcggccgggtccgcttcgtcccgctcctcgtcatccgccgctgcccgacgaagcgccaatcgaagaaaccctatgcccggacaccgccggcggatgccgtatctcttctatggccgacctactccttcaagcgcgggagcagctgattgaaggcgatgcgatggatggattggctcagagtgtcaatacggctggactgttctccaccgggtctgggaggccactggctgtcagccagagagccgtaaggagggccagtgcgttggttggcgaggaagtggacgaggctactgataacaataacaagaagagaaagaaaccatttggttgtgatgctggtctggagggtgaactggcaaacttacatgttccatttggaggtggtgtgcataaagataacttcttcccaatgttccaaagtggatctggtaaggcagtcttgctcaacaaggactcaattcagaaggcaagagctgttctagaagaaaatgttgagaatgcagctggtgccaaacagccaatgttccataccagtacgggtagatctgtcctagtcagcaagagctcaatcgataaggcgagagctgttttagggggtcggatgattgcacatgaaggaaatgtggaaggtccaggtagaccggccaatcagtctctgatatttcaaactagttccggaagaccagttttgatcagcaaaagatacgtcgagagatctagggctctgctgatggatgaagatgttaaaaatattcgacaatgggatactggctgccagctcccaattttccaaacaggacttggaaggcctgttgctgtgaaacatagttcaattaaaaaggcaagcacaattttgggggatggagatgttaaaagaagtggtaatggacataccggtgtttgtaccacacctttccaatttgaaacaccaaaatccgttttgatgagtagcagtttgattattaatggcatgacagttacaccagaagaaaatacttcagtgcgagcagaaaaatgtttcaacgatgatggccaattgccgttatttcagactgggtcagggaggtcagtcacagcaagtaagggttcctttaaaagggcaagttctgttctggagccaagaaatattgcaaaggaattggaagatgaatctcatctcaatgatggttatgccacctcaatatttaaaactggacttggaaagtctatcttaccaactgagaactcaagagaaagggcacaatttgtattagaggctaaagaggctgtaaaacaagtaattagtgacattggagctggctttggtgaaaatccaatgttccattctggaaaacaacagttttcacctgaaaatgatacttcaagacctagggccagtacccccatggagcaaggcaaatttgcaacaaaaggatatgaagactgtggaagtccattgccaatgtttcaaactggatctggaaaatctgtattggtctgtgaaagctcgatgcaaaaggcaagagccgttcttgaggaagaagagcactacaagttggttaagatggacaaaaaaattgcagcctcagcttcaccgctcaagacaagccatgcaagaacagtaaacatatcttcaactggtgtttctagagctgctaccttattgggcttggaggagaataccctttcaacacaattttttggacatgtgagtgataagttaggtacggagataactgttaagcggggaaatccagaacacatgcttgatgttgcatctgcacatgcaatttctagtggcactcataagggttttatttatccaacagaaaaccccacacatatggataaacatcagcagtttggattttctaaaagttctacctcttacgttggtgagcattctatcaggttcagcactgcaggtggccgatcaatggctatctctgtcgatgcactacaacgtgcgaaaagccttttgggtgattcagatttagtggtttctccaaatggttcaattggtcgctctttggcatcagctatagagaatctaccaaaaccaactatttctccgaaaggagatgtatctaacctatcatatggaactagagcaataggatatgctgtacctgacacccctgtgactaaaacaagtgctaatcagtttcatatgggaagggaatatcgtccagtcaatgaaattccaaaggtccccaagcctccctccagatgtttatctgaaggcgacaatgcgagtaactctaaagacaagacccagtggcaccatatgccagctggaccattggttgacatcactaattacatggctacatgttctggaaatacggactgcttagcaaatggaaagagaattattggggggagaaactccgtatctccattcaaacggccccgttcttccaggttcatcactccaataaaaaacaacaaactatcttctgctggagaatccatagtgccaccaatgcagatcagtccctgtaggacaatgctatctgtacgttatcctttccaacatcaaaggaaaaattataaagaatattttggtggtcctccttgcttcaaatatttgactgaacatgtgactgatgatgtgaagctcatggatgcaagaagagctgagaagtttagatttcagcatatggatactggtgcagaagagtttcagaaaatgctgctcacatgtggtgcttcattgtcatgtgcaacaaaagaatgggtcagtaaccactataaatggattgtgtggaagcttgcttcacttgagaggtgctacccaactagagttgctggtaaattcttgacggttgacaatgttcttgaggagcttaagtaccggtattcacttgatgcatcattggatgtggcacttctggaacaactagagaaaagaaagcttttcgtagggcagaagcttcgggtgtctggtgttgtcaaattagttgtccacataaatggcacctatcgtgcaagatggaatgatgccttaggattctgcaaacatgttggactcccactggcattcaggtgcataaaagtttctggtggtagagttcctaggacactggttggaatcacaaggatatatcctattctctaccgggaaaggttgcctgatggtcgttttgttgtgagatctgaaaggatggaaagaaaggcgctggaactataccaccagagagtatctaagatcacagaagatattctgtttgaacaacaagaaaactgtgacagtactgatgataacgaggaaggggctacaatttgtaaaatgctagagcatgccgctgagcctgagtttatacttgcgggcatgactccagagcagttgaagtgtttctcatcttatatagaaaagcaaaagattgttaagcaaaatgaagtatctgagaaggttgagaaggcccttgttgttgctggccttagttcaagggatgttacaccatttttgaaagtgagagtgattggccttgtcaataaacattcagcttccacatccagtaacaaggaagggctaataacaatttggaatccgactgagatgcagaaagataatcttgtggagggacaagcttattctgttatgggattggtaccttcgaactattgcaccgaaatcatgtacttgcatgctagaggatcatctacaacatggaagcccttagcatcagctcagactacagattttaaaccattctttacccctcgtagagcaattgaactcttgaaatttggtgaggtgccgatttcaagtgaatttgatattgcaggtcttattttatatgttggcaatacttatttatgtaacaacaagaaaaagcagtggctttttttaacagatggatctaaatttgtctctgggcaagggtgtgaagagcaagattgtcttctagctgttagcttttcgtccgcaaccactgatgaagactctacattatttagttacactctctctggaaatacagttggttttagtaatctggtcaaacgacagaaagacgagacgaggcaagtatgggtagctgaggcaacagagagctcaagctacactctttccaacgagattcctagaaaatctcacctaaaagaagctgcagttttggctgagagatgggcttctagatcttatcataaaattcaagagctaaaagaaagggttttatgtatagttggcaacgctggtgtctgaattataataaacggtaccacctgctgtttttggaaatggtgcaagattttgcttgggggttgtcttagctacaccattatttctcactgatgttggttggttctggttggagcctttttaacgcaatatgaatggcccttgcaaaaaacttcaagagcagcaagatccttgcacaaacttcaaaaatcaacttgaagatgtacacatttgaagacacgaggcttcagggctgttttctaagtctgtgtataaagcctttttcagagggtcgattaactttgagccgtggaaaaggttatggagatcttgggcgccgcctaaatgcaaaacttttctctggctagccattaggaacaaatgttgaactgcagacagataggagaagagggctttctcacctagaggcctgccccctctgcgatcaagagcaggaaacagctcaacacatcctaacgagttgtgtttttgcaaggcttttttggcacaacattatggctcccttcggtatgggtacctcaccccgagtcagaatgaacttatcctttgcagatttgtggcgaaaagtgagcaacaatgtgcataaagagaagagaacaggaataaacaatgctattatcttggaggcctggtgcatttggcggcaaagaaatcgtacggtttttgaaggagatttgccagctgttagcaaggtgcagcaaagttttctagaagagctaacatgtttggtcttgactggggctcatcaccttagcattttagggataattgatactcttagagcggtcggattgggctctcttgatcatatgtaatttttgtttcagtttcgatgtggtgtgggtgatgatcttgctcagcaagatcctcatcttgtaggattttcttttctctctaatataaaatatgggacgcgttcgagaaaaaaaaacttcaagagctaaaagaaaggcttctatgtatagttggcgaccctggtgtctgaattataataaatggtgctgcccgccattttttttggagatgatgcaagattttgcatgggggttcttgccataactacatgtctacatcaatatttctcagtggtacaattagaagatcaac

SEQ ID NO: 16757 - DNA, 5120 bp, Zea Mays
ggtcactcaatttccaagtaaatccagttctccctcgtctccgtcgctggctcgtcccggccccgcctgtgcgccgcggcccaggaatcatgccgagcaagtggcaggtctggggccagcccgacggcagcatcgtctggctccccgtctccgacgcgcccccaaacccgcctcggccgggtccgcttcgtcccgctcctcgtcatccgccgctgcccgacgaagcgccaatcgaagaaaccctatgcccggacaccgccggcggatgccgtatctcttctatggccgacctactccttcaagcgcgggagcagctgattgaaggcgatgcgatggatggattggctcagagtgtcaatacggctggactgttctccaccgggtctgggaggccactggctgtcagccagagagccgtaaggagggccagtgcgttggttggcgaggaagtggacgaggctactgataacaataacaagaagagaaagaaaccatttggttgtgatgctggtctggagggtgaactggcaaacttacatgttccatttggaggtggtgtgcataaagataacttcttcccaatgttccaaagtggatctggtaaggcagtcttgctcaacaaggactcaattcagaaggcaagagctgttctagaagaaaatgttgagaatgcagctggtgccaaacagccaatgttccataccagtacgggtagatctgtcctagtcagcaagagctcaatcgataaggcgagagctgttttagggggtcggatgattgcacatgaaggagatgtaggaggtgtggatggtatggaacagtttcctgtgtctcaagctggttcaggaaatgtggaaggtccaggtagaccggccaatcagtctctgatatttcaaactagttccggaagaccagttttgatcagcaaaagatacgtcgagagatctagggctctgctgatggatgaagatgttaaaaatattcgacaatgggatactggctgccagctcccaattttccaaacaggacttggaaggcctgttgctgtgaaacatagttcaattaaaaaggcaagcacaattttgggggatggagatgttaaaagaagtggtaatggacataccggtgtttgtaccacacctttccaatttgaaacaccaaaatccgttttgatgagtagcagtttgattattaatggcatgacagttacaccagaagaaaatacttcagtgcgagcagaaaaatgtttcaacgatgatggccaattgccgttatttcagactgggtcagggaggtcagtcacagcaagtaagggttcctttaaaagggcaagttctgttctggagccaagaaatattgcaaaggaattggaagatgaatctcatctcaatgatggttatgccacctcaatatttaaaactggacttggaaagtctatcttaccaactgagaactcaagagaaagggcacaatttgtattagaggctaaagaggctgtaaaacaagtaattagtgacattggagctggctttggtgaaaatccaatgttccattctggaaaacaacagttttcacctgaaaatgatacttcaagacctagggccagtacccccatggagcaaggcaaatttgcaacaaaaggatatgaagactgtggaagtccattgccaatgtttcaaactggatctggaaaatctgtattggtctgtgaaagctcgatgcaaaaggcaagagccgttcttgaggaagaagagcactacaagttggttaagatggacaaaaaaattgcagcctcagcttcaccgctcaagacaagccatgcaagaacagtaaacatatcttcaactggtgtttctagagctgctaccttattgggcttggaggagaataccctttcaacacaattttttggacatgtgagtgataagttagaaaaccccacacatatggataaacatcagcagtttggattttctaaaagttctacctcttacgttggtgagcattctatcaggttcagcactgcaggtggccgatcaatggctatctctgtcgatgcactacaacgtgcgaaaagccttttgggtgattcagatttagtggtttctccaaatggttcaattggtcgctctttggcatcagctatagagaatctaccaaaaccaactatttctccgaaaggagatgtatctaacctatcatatggaactagagcaataggatatgctgtacctgacacccctgtgactaaaacaagtgctaatcagtttcatatgggaagggaatatcgtccagtcaatgaaattccaaaggtccccaagcctccctccagatgtttatctgaaggcgacaatgcgagtaactctaaagacaagacccagtggcaccatatgccagctggttctggaaatacggactgcttagcaaatggaaagagaattattggggggagaaactccgtatctccattcaaacggccccgttcttccagatgggtcagtaaccactataaatggattgtgtggaagcttgcttcacttgagaggtgctacccaactagagttgctggtaaattcttgacggttgacaatgttcttgaggagcttaagtaccggtattcacttgatgcatcattggatgtggcacttctggaacaactagagaaaagaaagcttttcgtagggcagaagcttcggatatggggagcttctttatgtggttggtctgggcctgtgtcatttcatgaggtgtctggtgttgtcaaattagttgtccacataaatggcacctatcgtgcaagatggaatgatgccttaggattctgcaaacatgttggactcccactggcattcaggtgcataaaagtttctggtggtagagttcctaggacactggttggaatcacaaggatatatcctattctctaccgggaaaggttgcctgatggtcgttttgttgtgagatctgaaaggatggaaagaaaggcgctggaactataccaccagagagtatctaagatcacagaagatattctgtttgaacaacaagaaaactgtgacagtactgatgataacgaggaaggggctacaatttgtaaaatgctagagcatgccgctgagcctgagtttatacttgcgggcatgactccagagcagttgaagtgtttctcatcttatatagaaaagcaaaagattgttaagcaaaatgaagtatctgagaaggttgagaaggcccttgttgttgctggccttagttcaagggatgttacaccatttttgaaagtgagagtgattggccttgtcaataaacattcagcttccacatccagtaacaaggaagggctaataacaatttggaatccgactgagatgcagaaagataatcttgtggagggacaagcttattctgttatgggattggtaccttcgaactattgcaccgaaatcatgtacttgcatgctagaggatcatctacaacatggaagcccttagcatcagctcagactacagattttaaaccattctttacccctcgtagagcaattgaactcttgaaatttggtgaggtgccgatttcaagtgaatttgatattgcaggtcttattttatatgttggcaatacttatttatgtaacaacaagaaaaagcagtggctttttttaacagatggatctaaatttgtctctgggcaagggtgtgaagagcaagattgtcttctagctgttagcttttcgtccgcaaccactgatgaagactctacattatttagttacactctctctggaaatacagttggttttagtaatctggtcaaacgacagaaagacgagacgaggcaagtatgggtagctgaggcaacagagagctcaagctacactctttccaacgagattcctagaaaatctcacctaaaagaagctgcagttttggctgagagatgggcttctagatcttatcataaaattcaagagctaaaagaaagggttttatgtatagttggcaacgctggtgtctgaattataataaacggtaccacctgctgtttttggaaatggtgcaagattttgcttgggggttgtcttagctacaccattatttctcactgatgttggttggttctggttggagcctttttaacgcaatatgaatggcccttgcaaaaaacttcaagagcagcaagatccttgcacaaacttcaaaaatcaacttgaagatgtacacatttgaagacacgaggcttcagggctgttttctaagtctgtgtataaagcctttttcagagggtcgattaactttgagccgtggaaaaggttatggagatcttgggcgccgcctaaatgcaaaacttttctctggctagccattaggaacaaatgttgaactgcagacagataggagaagagggctttctcacctagaggcctgccccctctgcgatcaagagcaggaaacagctcaacacatcctaacgagttgtgtttttgcaaggcttttttggcacaacattatggctcccttcggtatgggtacctcaccccgagtcagaatgaacttatcctttgcagatttgtggcgaaaagtgagcaacaatgtgcataaagagaagagaacaggaataaacaatgctattatcttggaggcctggtgcatttggcggcaaagaaatcgtacggtttttgaaggagatttgccagctgttagcaaggtgcagcaaagttttctagaagagctaacatgtttggtcttgactggggctcatcaccttagcattttagggataattgatactcttagagcggtcggattgggctctcttgatcatatgtaatttttgtttcagtttcgatgtggtgtgggtgatgatcttgctcagcaagatcctcatcttgtaggattttcttttctctctaatataaaatatgggacgcgttcgagaaaaaaaaacttcaagagctaaaagaaaggcttctatgtatagttggcgaccctggtgtctgaattataataaatggtgctgcccgccattttttttggagatgatgcaagattttgcatgggggttcttgccataactacatgtctacatcaatatttctcagtggtacaattagaagatcaac

SEQ ID NO: 16758 - DNA, 5199 bp, Zea Mays
gtcgtgatttcgctccccgcctccgcagcgcggtcactcaatttccaagtaaatccagttctccctcgtctccgtcgctggctcgtcccggccccgcctgtgcgccgcggcccaggaatcatgccgagcaagtggcaggtctggggccagcccgacggcagcatcgtctggctccccgtctccgacgcgcccccaaacccgcctcggccgggtccgcttcgtcccgctcctcgtcatccgccgctgcccgacgaagcgccaatcgaagaaaccctatgcccggacaccgccggcggatgccgtatctcttctatggccgacctactccttcaagcgcgggagcagctgattgaaggcgatgcgatggatggattggctcagagtgtcaatacggctggactgttctccaccgggtctgggaggccactggctgtcagccagagagccgtaaggagggccagtgcgttggttggcgaggaagtggacgaggctactgataacaataacaagaagagaaagaaaccatttggttgtgatgctggtctggagggtgaactggcaaacttacatgttccatttggaggtggtgtgcataaagataacttcttcccaatgttccaaagtggatctggtaaggcagtcttgctcaacaaggactcaattcagaaggcaagagctgttctagaagaaaatgttgagaatgcagctggtgccaaacagccaatgttccataccagtacgggtagatctgtcctagtcagcaagagctcaatcgataaggcgagagctgttttagggggtcggatgattgcacatgaaggaaatgtggaaggtccaggtagaccggccaatcagtctctgatatttcaaactagttccggaagaccagttttgatcagcaaaagatacgtcgagagatctagggctctgctgatggatgaagatgttaaaaatattcgacaatgggatactggctgccagctcccaattttccaaacaggacttggaaggcctgttgctgtgaaacatagttcaattaaaaaggcaagcacaattttgggggatggagatgttaaaagaagtggtaatggacataccggtgtttgtaccacacctttccaatttgaaacaccaaaatccgttttgatgagtagcagtttgattattaatggcatgacagttacaccagaagaaaatacttcagtgcgagcagaaaaatgtttcaacgatgatggccaattgccgttatttcagactgggtcagggaggtcagtcacagcaagtaagggttcctttaaaagggcaagttctgttctggagccaagaaatattgcaaaggaattggaagatgaatctcatctcaatgatggttatgccacctcaatatttaaaactggacttggaaagtctatcttaccaactgagaactcaagagaaagggcacaatttgtattagaggctaaagaggctgtaaaacaagtaattagtgacattggagctggctttggtgaaaatccaatgttccattctggaaaacaacagttttcacctgaaaatgatacttcaagacctagggccagtacccccatggagcaaggcaaatttgcaacaaaaggatatgaagactgtggaagtccattgccaatgtttcaaactggatctggaaaatctgtattggtctgtgaaagctcgatgcaaaaggcaagagccgttcttgaggaagaagagcactacaagttggttaagatggacaaaaaaattgcagcctcagcttcaccgctcaagacaagccatgcaagaacagtaaacatatcttcaactggtgtttctagagctgctaccttattgggcttggaggagaataccctttcaacacaattttttggacatgtgagtgataagttaggtacggagataactgttaagcggggaaatccagaacacatgcttgatgttgcatctgcacatgcaatttctagtggcactcataagggttttatttatccaacagaaaaccccacacatatggataaacatcagcagtttggattttctaaaagttctacctcttacgttggtgagcattctatcaggttcagcactgcaggtggccgatcaatggctatctctgtcgatgcactacaacgtgcgaaaagccttttgggtgattcagatttagtggtttctccaaatggttcaattggtcgctctttggcatcagctatagagaatctaccaaaaccaactatttctccgaaaggagatgtatctaacctatcatatggaactagagcaataggatatgctgtacctgacacccctgtgactaaaacaagtgctaatcagtttcatatgggaagggaatatcgtccagtcaatgaaattccaaaggtccccaagcctccctccagatgtttatctgaaggcgacaatgcgagtaactctaaagacaagacccagtggcaccatatgccagctggttctggaaatacggactgcttagcaaatggaaagagaattattggggggagaaactccgtatctccattcaaacggccccgttcttccagatgggtcagtaaccactataaatggattgtgtggaagcttgcttcacttgagaggtgctacccaactagagttgctggtaaattcttgacggttgacaatgttcttgaggagcttaagtaccggtattcacttgatgcatcattggatgtggcacttctggaacaactagagaaaagaaagcttttcgtagggcagaagcttcggatatggggagcttctttatgtggttggtctgggcctgtgtcatttcatgaggtgtctggtgttgtcaaattagttgtccacataaatggcacctatcgtgcaagatggaatgatgccttaggattctgcaaacatgttggactcccactggcattcaggtgcataaaagtttctggtggtagagttcctaggacactggttggaatcacaaggatatatcctattctctaccgggaaaggttgcctgatggtcgttttgttgtgagatctgaaaggatggaaagaaaggcgctggaactataccaccagagagtatctaagatcacagaagatattctgtttgaacaacaagaaaactgtgacagtactgatgataacgaggaaggggctacaatttgtaaaatgctagagcatgccgctgagcctgagtttatacttgcgggcatgactccagagcagttgaagtgtttctcatcttatatagaaaagcaaaagattgttaagcaaaatgaagtatctgagaaggttgagaaggcccttgttgttgctggccttagttcaagggatgttacaccatttttgaaagtgagagtgattggccttgtcaataaacattcagcttccacatccagtaacaaggaagggctaataacaatttggaatccgactgagatgcagaaagataatcttgtggagggacaagcttattctgttatgggattggtaccttcgaactattgcaccgaaatcatgtacttgcatgctagaggatcatctacaacatggaagcccttagcatcagctcagactacagattttaaaccattctttacccctcgtagagcaattgaactcttgaaatttggtgaggtgccgatttcaagtgaatttgatattgcaggtcttattttatatgttggcaatacttatttatgtaacaacaagaaaaagcagtggctttttttaacagatggatctaaatttgtctctgggcaagggtgtgaagagcaagattgtcttctagctgttagcttttcgtccgcaaccactgatgaagactctacattatttagttacactctctctggaaatacagttggttttagtaatctggtcaaacgacagaaagacgagacgaggcaagtatgggtagctgaggcaacagagagctcaagctacactctttccaacgagattcctagaaaatctcacctaaaagaagctgcagttttggctgagagatgggcttctagatcttatcataaaattcaagagctaaaagaaagggttttatgtatagttggcaacgctggtgtctgaattataataaacggtaccacctgctgtttttggaaatggtgcaagattttgcttgggggttgtcttagctacaccattatttctcactgatgttggttggttctggttggagcctttttaacgcaatatgaatggcccttgcaaaaaacttcaagagcagcaagatccttgcacaaacttcaaaaatcaacttgaagatgtacacatttgaagacacgaggcttcagggctgttttctaagtctgtgtataaagcctttttcagagggtcgattaactttgagccgtggaaaaggttatggagatcttgggcgccgcctaaatgcaaaacttttctctggctagccattaggaacaaatgttgaactgcagacagataggagaagagggctttctcacctagaggcctgccccctctgcgatcaagagcaggaaacagctcaacacatcctaacgagttgtgtttttgcaaggcttttttggcacaacattatggctcccttcggtatgggtacctcaccccgagtcagaatgaacttatcctttgcagatttgtggcgaaaagtgagcaacaatgtgcataaagagaagagaacaggaataaacaatgctattatcttggaggcctggtgcatttggcggcaaagaaatcgtacggtttttgaaggagatttgccagctgttagcaaggtgcagcaaagttttctagaagagctaacatgtttggtcttgactggggctcatcaccttagcattttagggataattgatactcttagagcggtcggattgggctctcttgatcatatgtaatttttgtttcagtttcgatgtggtgtgggtgatgatcttgctcagcaagatcctcatcttgtaggattttcttttctctctaatataaaatatgggacgcgttcgagaaaaaaaaacttcaagagctaaaagaaaggcttctatgtatagttggcgaccctggtgtctgaattataataaatggtgctgcccgccattttttttggagatgatgcaagattttgcatgggggttcttgccataactacatgtctacatcaatatttctcagtggtacaattagaagatcaac

SEQ ID NO: 16759 - DNA, 2455 bp, Zea Mays
gtctggagggtgaactggcaaacttacatgttccatttggaggtggtgtgcataaagataacttcttcccaatgttccaaagtggatctggtaaggcagtcttgctcaacaaggactcaattcagaaggcaagagctgttctagaagaaaatgttgagaatgcagctggtgccaaacagccaatgttccataccagtacgggtagatctgtcctagtcagcaagagctcaatcgataaggcgagagctgttttagggggtcggatgattgcacatgaaggaaatgtggaaggtccaggtagaccggccaatcagtctctgatatttcaaactagttccggaagaccagttttgatcagcaaaagatacgtcgagagatctagggctctgctgatggatgaagatgttaaaaatattctgtttacctctttgtgtgaaggacaatgggatactggctgccagctcccaattttccaaacaggacttggaaggcctgttgctgtgaaacatagttcaattaaaaagactgggtcagggaggtcagtcacagcaagtaagggttcctttaaaagggcaagttctgttctggagccaagaaatattgcaaaggaattggaagatgaatctcatctcaatgatggttatgccacctcaatatttaaaactggacttggaaagtctatcttaccaactgagaactcaagagaaagggcacaatttgtattagaggctaaagaggctgtaaaacaagtaattagtgacattggagctggctttggtgaaaatccaatgttccattctggaaaacaacagttttcacctgaaaatgatacttcaagacctagggccagtacccccatggagcaaggcaaatttgcaacaaaaggatatgaagactgtggaagtccattgccaatgtttcaaactggatctggaaaatctgtattggtctgtgaaagctcgatgcaaaaggcaagagccgttcttgaggaagaagagcactacaagttggttaagatggacaaaaaaattgcagcctcagcttcaccgctcaagacaagccatgcaagaacagtaaacatatcttcaactggtgtttctagagctgctaccttattgggcttggaggagaataccctttcaacacaattttttggacatgtgagtgataagttaggtacggagataactgttaagcggggaaatccagaacacatgcttgatgttgcatctgcacatgcaatttctagtggcactcataagggttttatttatccaacagaaaaccccacacatatggataaacatcagcagtttggattttctaaaagttctacctcttacgttggtgagcattctatcaggttcagcactgcaggtggccgatcaatggctatctctgtcgatgcactacaacgtgcgaaaagccttttgggtgattcagatttagtggtttctccaaatggttcaattggtcgctctttggcatcagctatagagaatctaccaaaaccaactatttctccgaaaggagatgtatctaacctatcatatggaactagagcaataggatatgctgtacctgacacccctgtgactaaaacaagtgctaatcagtttcatatgggaagggaatatcgtccagtcaatgaaattccaaaggtccccaagcctccctccagatgtttatctgaaggcgacaatgcgagtaactctaaagacaagacccagtggcaccatatgccagctggaccattggttgacatcactaattacatggctacatgttctggaaatacggactgcttagcaaatggaaagagaattattggggggagaaactccgtatctccattcaaacggccccgttcttccaggttcatcactccaataaaaaacaacaaactatcttctgctggagaatccatagtgccaccaatgcagatcagtccctgtaggacaatgctatctgtacgttatcctttccaacatcaaaggaaaaattataaagaatattttggtggtcctccttgcttcaaatatttgactgaacatgtgactgatgatgtgaagctcatggatgcaagaagagctgagaagtttagatttcagcatatggatactggtgcagaagagtttcagaaaatgctgctcacatgtggtgcttcattgtcatgtgcaacaaaagattttcctgttttagatgggtcagtaaccactataaatggattgtgtggaagcttgcttcacttgagaggtgctacccaactagagttgctggtaaattcttgacggttgacaatgttcttgaggagcttaagtaccgctatttactcttgtccttaccaaaataacaataagttggaggttaacaaggtagatactaatgaagacaacagtggcaaccaaagcttctctgccactaatagaaacatgtctgcaaatattgaattaac

SEQ ID NO: 16760 - DNA, 3226 bp, Zea Mays
ggtcactcaatttccaagtaaatccagttctccctcgtctccgtcgctggctcgtcccggccccgcctgtgcgccgcggcccaggaatcatgccgagcaagtggcaggtctggggccagcccgacggcagcatcgtctggctccccgtctccgacgcgcccccaaacccgcctcggccgggtccgcttcgtcccgctcctcgtcatccgccgctgcccgacgaagcgccaatcgaagaaaccctatgcccggacaccgccggcggatgccgtatctcttctatggccgacctactccttcaagcgcgggagcagctgattgaaggcgatgcgatggatggattggctcagagtgtcaatacggctggactgttctccaccgggtctgggaggccactggctgtcagccagagagccgtaaggagggccagtgcgttggttggcgaggaagtggacgaggctactgataacaataacaagaagagaagtggtgtgcataaagataacttcttcccaatgttccaaagtggatctggtaaggcagtcttgctcaacaaggactcaattcagaaggcaagagctgttctagaagaaaatgttgagaatgcagctggtgccaaacagccaatgttccataccagtacgggtagatctgtcctagtcagcaagagctcaatcgataaggcgagagctgttttagggggtcggatgattgcacatgaaggagatgtaggaggtgtggatggtatggaacagtttcctgtgtctcaagctggttcaggaaatgtggaaggtccaggtagaccggccaatcagtctctgatatttcaaactagttccggaagaccagttttgatcagcaaaagatacgtcgagagatctagggctctgctgatggatgaagatgttaaaaatattcgacaatgggatactggctgccagctcccaattttccaaacaggacttggaaggcctgttgctgtgaaacatagttcaattaaaaaggcaagcacaattttgggggatggagatgttaaaagaagtggtaatggacataccggtgtttgtaccacacctttccaatttgaaacaccaaaatccgttttgatgagtagcagtttgattattaatggcatgacagttacaccagaagaaaatacttcagtgcgagaaaaatgtttcaacgatgatggccaattgccgttatttcagactgggtcagggaggtcagtcacagcaagtaagggttcctttaaaagggcaagttctgttctggagccaagaaatattgcaaaggaattggaagatgaatctcatctcaatgatggttatgccacctcaatatttaaaactggacttggaaagtctatcttaccaactgagaactcaagagaaagggcacaatttgtattagaggctaaagaggctgtaaaacaagtaattagtgacattggagctggctttggtgaaaatccaatgttccattctggaaaacaacagttttcacctgaaaatgatacttcaagacctagggccagtacccccatggagcaaggcaaatttgcaacaaaaggatatgaagactgtggaagtccattgccaatgtttcaaactggatctggaaaatctgtattggtctgtgaaagctcgatgcaaaaggcaagagccgttcttgaggaagaagagcactacaagttggttaagatggacaaaaaaattgcagcctcagcttcaccgctcaagacaagccatgcaagaacagtaaacatatcttcaactggtgtttctagagctgctaccttattgggcttggaggagaataccctttcaacacaattttttggacatgtgagtgataagttaggtacggagataactgttaagcggggaaatccagaacacatgcttgatgttgcatctgcacatgcaatttctagtggcactcataagggttttatttatccaacagaaaaccccacacatatggataaacatcagcagtttggattttctaaaagttctacctcttacgttggtgagcattctatcaggttcagcactgcaggtggccgatcaatggctatctctgtcgatgcactacaacgtgcgaaaagccttttgggtgattcagatttagtggtttctccaaatggttcaattggtcgctctttggcatcagctatagagaatctaccaaaaccaactatttctccgaaaggagatgtatctaacctatcatatggaactagagcaataggatatgctgtacctgacacccctgtgactaaaacaagtgctaatcagtttcatatgggaagggaatatcgtccagtcaatgaaattccaaaggtccccaagcctccctccagatgtttatctgaaggcgacaatgcgagtaactctaaagacaagacccagtggcaccatatgccagctggaccattggttgacatcactaattacatggctacatgttctggaaatacggactgcttagcaaatggaaagagaattattggggggagaaactccgtatctccattcaaacggccccgttcttccaggttcatcactccaataaaaaacaacaaactatcttctgctggagaatccatagtgccaccaatgcagatcagtccctgtaggacaatgctatctgtacgttatcctttccaacatcaaaggaaaaattataaagaatattttggtggtcctccttgcttcaaatatttgactgaacatgtgactgatgatgtgaagctcatggatgcaagaagagctgagaagtttagatttcagcatatggatactggtgcagaagagtttcagaaaatgctgctcacatgtggtgcttcattgtcatgtgcaacaaaagaatgggtcagtaaccactataaatggattgtgtggaagcttgcttcacttgagaggtgctacccaactagagttgctggtaaattcttgacggttgacaatgttcttgaggagcttaagtaccggtatgacagagaagtgaatcatggtcatcgatcagcaataaagaaaattttagaagggaattcttcaccatctttaatgatggtcttgtgcatttcagctatttactcttgtccttaccaaaataacaataagttggaggttaacaaggtagatactaatgaagacaacagtggcaaccaaagcttctctgccactaatagaaacatgtctgcaaatattgaattaac

SEQ ID NO: 16761 - DNA, 3295 bp, Zea Mays
ggtcactcaatttccaagtaaatccagttctccctcgtctccgtcgctggctcgtcccggccccgcctgtgcgccgcggcccaggaatcatgccgagcaagtggcaggtctggggccagcccgacggcagcatcgtctggctccccgtctccgacgcgcccccaaacccgcctcggccgggtccgcttcgtcccgctcctcgtcatccgccgctgcccgacgaagcgccaatcgaagaaaccctatgcccggacaccgccggcggatgccgtatctcttctatggccgacctactccttcaagcgcgggagcagctgattgaaggcgatgcgatggatggattggctcagagtgtcaatacggctggactgttctccaccgggtctgggaggccactggctgtcagccagagagccgtaaggagggccagtgcgttggttggcgaggaagtggacgaggctactgataacaataacaagaagagaaagaaaccatttggttgtgatgctggtctggagggtgaactggcaaacttacatgttccatttggaggtggtgtgcataaagataacttcttcccaatgttccaaagtggatctggtaaggcagtcttgctcaacaaggactcaattcagaaggcaagagctgttctagaagaaaatgttgagaatgcagctggtgccaaacagccaatgttccataccagtacgggtagatctgtcctagtcagcaagagctcaatcgataaggcgagagctgttttagggggtcggatgattgcacatgaaggagatgtaggaggtgtggatggtatggaacagtttcctgtgtctcaagctggttcaggaaatgtggaaggtccaggtagaccggccaatcagtctctgatatttcaaactagttccggaagaccagttttgatcagcaaaagatacgtcgagagatctagggctctgctgatggatgaagatgttaaaaatattcgacaatgggatactggctgccagctcccaattttccaaacaggacttggaaggcctgttgctgtgaaacatagttcaattaaaaaggcaagcacaattttgggggatggagatgttaaaagaagtggtaatggacataccggtgtttgtaccacacctttccaatttgaaacaccaaaatccgttttgatgagtagcagtttgattattaatggcatgacagttacaccagaagaaaatacttcagtgcgagcagaaaaatgtttcaacgatgatggccaattgccgttatttcagactgggtcagggaggtcagtcacagcaagtaagggttcctttaaaagggcaagttctgttctggagccaagaaatattgcaaaggaattggaagatgaatctcatctcaatgatggttatgccacctcaatatttaaaactggacttggaaagtctatcttaccaactgagaactcaagagaaagggcacaatttgtattagaggctaaagaggctgtaaaacaagcagtaattagtgacattggagctggctttggtgaaaatccaatgttccattctggaaaacaacagttttcacctgaaaatgatacttcaagacctagggccagtacccccatggagcaaggcaaatttgcaacaaaaggatatgaagactgtggaagtccattgccaatgtttcaaactggatctggaaaatctgtattggtctgtgaaagctcgatgcaaaaggcaagagccgttcttgaggaagaagagcactacaagttggttaagatggacaaaaaaattgcagcctcagcttcaccgctcaagacaagccatgcaagaacagtaaacatatcttcaactggtgtttctagagctgctaccttattgggcttggaggagaataccctttcaacacaattttttggacatgtgagtgataagttaggtacggagataactgttaagcggggaaatccagaacacatgcttgatgttgcatctgcacatgcaatttctagtggcactcataagggttttatttatccaacagaaaaccccacacatatggataaacatcagcagtttggattttctaaaagttctacctcttacgttggtgagcattctatcaggttcagcactgcaggtggccgatcaatggctatctctgtcgatgcactacaacgtgcgaaaagccttttgggtgattcagatttagtggtttctccaaatggttcaattggtcgctctttggcatcagctatagagaatctaccaaaaccaactatttctccgaaaggagatgtatctaacctatcatatggaactagagcaataggatatgctgtacctgacacccctgtgactaaaacaagtgctaatcagtttcatatgggaagggaatatcgtccagtcaatgaaattccaaaggtccccaagcctccctccagatgtttatctgaaggcgacaatgcgagtaactctaaagacaagacccagtggcaccatatgccagctggaccattggttgacatcactaattacatggctacatgttctggaaatacggactgcttagcaaatggaaagagaattattggggggagaaactccgtatctccattcaaacggccccgttcttccaggttcatcactccaataaaaaacaacaaactatcttctgctgaatccatagtgccaccaatgcagatcagtccctgtaggacaatgctatctgtacgttatcctttccaacatcaaaggaaaaattataaagaatattttggtggtcctccttgcttcaaatatttgactgaacatgtgactgatgatgtgaagctcatggatgcaagaagagctgagaagtttagatttcagcatatggatactggtgcagaagagtttcagaaaatgctgctcacatgtggtgcttcattgtcatgtgcaacaaaagaatgggtcagtaaccactataaatggattgtgtggaagcttgcttcacttgagaggtgctacccaactagagttgctggtaaattcttgacggttgacaatgttcttgaggagcttaagtaccggtatgacagagaagtgaatcatggtcatcgatcagcaataaagaaaattttagaagggaattcttcaccatctttaatgatggtcttgtgcatttcagctatttactcttgtccttaccaaaataacaataagttggaggttaacaaggtagatactaatgaagacaacagtggcaaccaaagcttctctgccactaatagaaacatgtctgcaaatattgaattaac

SEQ ID NO: 16762 - DNA, 3229 bp, Zea Mays
ggtcactcaatttccaagtaaatccagttctccctcgtctccgtcgctggctcgtcccggccccgcctgtgcgccgcggcccaggaatcatgccgagcaagtggcaggtctggggccagcccgacggcagcatcgtctggctccccgtctccgacgcgcccccaaacccgcctcggccgggtccgcttcgtcccgctcctcgtcatccgccgctgcccgacgaagcgccaatcgaagaaaccctatgcccggacaccgccggcggatgccgtatctcttctatggccgacctactccttcaagcgcgggagcagctgattgaaggcgatgcgatggatggattggctcagagtgtcaatacggctggactgttctccaccgggtctgggaggccactggctgtcagccagagagccgtaaggagggccagtgcgttggttggcgaggaagtggacgaggctactgataacaataacaagaagagaagtggtgtgcataaagataacttcttcccaatgttccaaagtggatctggtaaggcagtcttgctcaacaaggactcaattcagaaggcaagagctgttctagaagaaaatgttgagaatgcagctggtgccaaacagccaatgttccataccagtacgggtagatctgtcctagtcagcaagagctcaatcgataaggcgagagctgttttagggggtcggatgattgcacatgaaggagatgtaggaggtgtggatggtatggaacagtttcctgtgtctcaagctggttcaggaaatgtggaaggtccaggtagaccggccaatcagtctctgatatttcaaactagttccggaagaccagttttgatcagcaaaagatacgtcgagagatctagggctctgctgatggatgaagatgttaaaaatattcgacaatgggatactggctgccagctcccaattttccaaacaggacttggaaggcctgttgctgtgaaacatagttcaattaaaaaggcaagcacaattttgggggatggagatgttaaaagaagtggtaatggacataccggtgtttgtaccacacctttccaatttgaaacaccaaaatccgttttgatgagtagcagtttgattattaatggcatgacagttacaccagaagaaaatacttcagtgcgagaaaaatgtttcaacgatgatggccaattgccgttatttcagactgggtcagggaggtcagtcacagcaagtaagggttcctttaaaagggcaagttctgttctggagccaagaaatattgcaaaggaattggaagatgaatctcatctcaatgatggttatgccacctcaatatttaaaactggacttggaaagtctatcttaccaactgagaactcaagagaaagggcacaatttgtattagaggctaaagaggctgtaaaacaagcagtaattagtgacattggagctggctttggtgaaaatccaatgttccattctggaaaacaacagttttcacctgaaaatgatacttcaagacctagggccagtacccccatggagcaaggcaaatttgcaacaaaaggatatgaagactgtggaagtccattgccaatgtttcaaactggatctggaaaatctgtattggtctgtgaaagctcgatgcaaaaggcaagagccgttcttgaggaagaagagcactacaagttggttaagatggacaaaaaaattgcagcctcagcttcaccgctcaagacaagccatgcaagaacagtaaacatatcttcaactggtgtttctagagctgctaccttattgggcttggaggagaataccctttcaacacaattttttggacatgtgagtgataagttaggtacggagataactgttaagcggggaaatccagaacacatgcttgatgttgcatctgcacatgcaatttctagtggcactcataagggttttatttatccaacagaaaaccccacacatatggataaacatcagcagtttggattttctaaaagttctacctcttacgttggtgagcattctatcaggttcagcactgcaggtggccgatcaatggctatctctgtcgatgcactacaacgtgcgaaaagccttttgggtgattcagatttagtggtttctccaaatggttcaattggtcgctctttggcatcagctatagagaatctaccaaaaccaactatttctccgaaaggagatgtatctaacctatcatatggaactagagcaataggatatgctgtacctgacacccctgtgactaaaacaagtgctaatcagtttcatatgggaagggaatatcgtccagtcaatgaaattccaaaggtccccaagcctccctccagatgtttatctgaaggcgacaatgcgagtaactctaaagacaagacccagtggcaccatatgccagctggaccattggttgacatcactaattacatggctacatgttctggaaatacggactgcttagcaaatggaaagagaattattggggggagaaactccgtatctccattcaaacggccccgttcttccaggttcatcactccaataaaaaacaacaaactatcttctgctggagaatccatagtgccaccaatgcagatcagtccctgtaggacaatgctatctgtacgttatcctttccaacatcaaaggaaaaattataaagaatattttggtggtcctccttgcttcaaatatttgactgaacatgtgactgatgatgtgaagctcatggatgcaagaagagctgagaagtttagatttcagcatatggatactggtgcagaagagtttcagaaaatgctgctcacatgtggtgcttcattgtcatgtgcaacaaaagaatgggtcagtaaccactataaatggattgtgtggaagcttgcttcacttgagaggtgctacccaactagagttgctggtaaattcttgacggttgacaatgttcttgaggagcttaagtaccggtatgacagagaagtgaatcatggtcatcgatcagcaataaagaaaattttagaagggaattcttcaccatctttaatgatggtcttgtgcatttcagctatttactcttgtccttaccaaaataacaataagttggaggttaacaaggtagatactaatgaagacaacagtggcaaccaaagcttctctgccactaatagaaacatgtctgcaaatattgaattaac

SEQ ID NO: 16763 - DNA, 3212 bp, Zea Mays
ctttgtgtcgtgatttcgctccccgcctccgcagcgcggtcactcaatttccaagtaaatccagttctccctcgtctccgtcgctggctcgtcccggccccgcctgtgcgccgcggcccaggaatcatgccgagcaagtggcaggtctggggccagcccgacggcagcatcgtctggctccccgtctccgacgcgcccccaaacccgcctcggccgggtccgcttcgtcccgctcctcgtcatccgccgctgcccgacgaagcgccaatcgaagaaaccctatgcccggacaccgccggcggatgccgtatctcttctatggccgacctactccttcaagcgcgggagcagctgattgaaggcgatgcgatggatggattggctcagagtgtcaatacggctggactgttctccaccgggtctgggaggccactggctgtcagccagagagccgtaaggagggccagtgcgttggttggcgaggaagtggacgaggctactgataacaataacaagaagagaagtggtgtgcataaagataacttcttcccaatgttccaaagtggatctggtaaggcagtcttgctcaacaaggactcaattcagaaggcaagagctgttctagaagaaaatgttgagaatgcagctggtgccaaacagccaatgttccataccagtacgggtagatctgtcctagtcagcaagagctcaatcgataaggcgagagctgttttagggggtcggatgattgcacatgaaggaaatgtggaaggtccaggtagaccggccaatcagtctctgatatttcaaactagttccggaagaccagttttgatcagcaaaagatacgtcgagagatctagggctctgctgatggatgaagatgttaaaaatattcgacaatgggatactggctgccagctcccaattttccaaacaggacttggaaggcctgttgctgtgaaacatagttcaattaaaaaggcaagcacaattttgggggatggagatgttaaaagaagtggtaatggacataccggtgtttgtaccacacctttccaatttgaaacaccaaaatccgttttgatgagtagcagtttgattattaatggcatgacagttacaccagaagaaaatacttcagtgcgagcagaaaaatgtttcaacgatgatggccaattgccgttatttcagactgggtcagggaggtcagtcacagcaagtaagggttcctttaaaagggcaagttctgttctggagccaagaaatattgcaaaggaattggaagatgaatctcatctcaatgatggttatgccacctcaatatttaaaactggacttggaaagtctatcttaccaactgagaactcaagagaaagggcacaatttgtattagaggctaaagaggctgtaaaacaagcagtaattagtgacattggagctggctttggtgaaaatccaatgttccattctggaaaacaacagttttcacctgaaaatgatacttcaagacctagggccagtacccccatggagcaaggcaaatttgcaacaaaaggatatgaagactgtggaagtccattgccaatgtttcaaactggatctggaaaatctgtattggtctgtgaaagctcgatgcaaaaggcaagagccgttcttgaggaagaagagcactacaagttggttaagatggacaaaaaaattgcagcctcagcttcaccgctcaagacaagccatgcaagaacagtaaacatatcttcaactggtgtttctagagctgctaccttattgggcttggaggagaataccctttcaacacaattttttggacatgtgagtgataagttaggtacggagataactgttaagcggggaaatccagaacacatgcttgatgttgcatctgcacatgcaatttctagtggcactcataagggttttatttatccaacagaaaaccccacacatatggataaacatcagcagtttggattttctaaaagttctacctcttacgttggtgagcattctatcaggttcagcactgcaggtggccgatcaatggctatctctgtcgatgcactacaacgtgcgaaaagccttttgggtgattcagatttagtggtttctccaaatggttcaattggtcgctctttggcatcagctatagagaatctaccaaaaccaactatttctccgaaaggagatgtatctaacctatcatatggaactagagcaataggatatgctgtacctgacacccctgtgactaaaacaagtgctaatcagtttcatatgggaagggaatatcgtccagtcaatgaaattccaaaggtccccaagcctccctccagatgtttatctgaaggcgacaatgcgagtaactctaaagacaagacccagtggcaccatatgccagctggaccattggttgacatcactaattacatggctacatgttctggaaatacggactgcttagcaaatggaaagagaattattggggggagaaactccgtatctccattcaaacggccccgttcttccaggttcatcactccaataaaaaacaacaaactatcttctgctggagaatccatagtgccaccaatgcagatcagtccctgtaggacaatgctatctgtacgttatcctttccaacatcaaaggaaaaattataaagaatattttggtggtcctccttgcttcaaatatttgactgaacatgtgactgatgatgtgaagctcatggatgcaagaagagctgagaagtttagatttcagcatatggatactggtgcagaagagtttcagaaaatgctgctcacatgtggtgcttcattgtcatgtgcaacaaaagaatgggtcagtaaccactataaatggattgtgtggaagcttgcttcacttgagaggtgctacccaactagagttgctggtaaattcttgacggttgacaatgttcttgaggagcttaagtaccggtatgacagagaagtgaatcatggtcatcgatcagcaataaagaaaattttagaagggaattcttcaccatctttaatgatggtcttgtgcatttcagctatttactcttgtccttaccaaaataacaataagttggaggttaacaaggtagatactaatgaagacaacagtggcaaccaaagcttctctgccactaatagaaacatgtctgcaaatattgaattaac

SEQ ID NO: 16764 - DNA, 644 bp, Zea Mays
atggaggagagcacctcctcggcctggcgcgcgacccagcggctgaggaggcgcgactcccgcctctgcctgcgcaccgccgacgactcgacctcgccgtattcacgcagaggacgccctggatggtggatccgatgcattccatggcctgccctatggcgtcaaggcgacatgttgcgccgaggtggaggccgggttgaacgccgtgtaccggcgagagatgccgaggggctgtacctcgccagcgatttggacaagcggctattgatctacttccccttcatgcaagtggtcaagctacatttcgtgctattcaaaggccccaaggatgacgcaatggcaatgactatctaccaatggacatcgtggagctatcttccgatcatttgatagaggacaatggttctgatgaggttgtattcaaggccatggggagggctatcaataagactatcatggttgtggaattgatcaagaggaggattgttggcctccatcagaataccaccactggatctactgatattactgatatgtgggagccattggaagaaggcctacttctgcttgagacaacaagacatgtctctatgatcactataactctttcaaagaaggagctggacacatcatctatcggttga

SEQ ID NO: 16765 - DNA, 519 bp, Zea Mays
acacaacattgtttcagtattttgttggctcagtgagatagacagaagttgctcttggcttgatacatgaatactacaaaagtaatgctacgggtcttggtgttttctttagtctttactatgctttcgacacatcaagctttgggaaataaggaaaattgtgacaaggataaagatttcattaagcgccaatgcgaaagcataacactagaagagcagctcacaataagcgtcatgaaggttgtggatgttgcaaaggaatgtggcaacccggtgccacctgggaataaatgtggaacttggactgttccaccacaactgctagcaagggtgcatccgtaagggttcaacaaagcgagcaacaaagggcacatggataagagttcaataatggaagcaatcacaggaaaatcttgagataaatgaatgaatgtatgctcaactggcttttggaaaattagatcaatataatatgaggtgtgatttatttatatggccataaatctactcttaataaac

SEQ ID NO: 16766 - DNA, 2611 bp, Zea Mays
gtaaacgcaaagtcaaaaagtgtggtgatgcatgtcaggcctgctgttgtgttctcaaataactaagcgtccttgttagtctgtccatagccaacaccctaggaagcattcctgcatctaaaaatctctcatggtgaactcatgtgcacctgcagcatttcttcactcttctgcatcctggcaagctttacttgtcttttttatttctgtgactgcagttggtgccgcagatgctggaggccaagatgctggtggccaaggtccgtgtcctcatttctcctgtggtgatcttggcaacatatccaaacctttccgtaggccaggcgacccagaagagtgcggtgtaaaagcatacgagctggtctgtagcaacggcaaggctacaattcgcatcaacacggggacatattttgtcaccagcatcaactataccaatcgttccttctgggttgtggacgccaatttggatatgcacagcagctgccctcttcctcgttgggatcagtttccttacacttctgagggattgttctggagaagtggtaaacatacccatatcgatttgcccactgatgatgcctctttgtgggcatgctttgttaattgttcgagagcagttaggattacgaataacttggggtacaagcccgttacttgcctgagtgggagcagttcctttgtttatatatatgtacagtatggggcttgcacagtcggatctcttgaacctttttgtggatacttggccgagatttcctttggtaccaatccgaagggtactaatgcaagttatgcagatatcatacaagtggtaaagaagggattttctgttggattcccaaaggacgaatatgattatagctaccataatacttcttggatattcaagacatgcctaaataattttaccaggtacttccacgagcaattgtctagcggaggcatcgttggtataactcgtgctttcttttggagtgatgtatttcttctcaagtgcgcagagagttacaatgccacaactgttattttagatttcgatgtgatatccgtagtgactggtgttaaaatcacaacgttacttgtactgttcaggtttgtgttcacagcactagcagtacagatgttccttgcccacaagtactggaaaacaacgatagcaattgacgctgtcgagaaattcctccacatgcaacaaatgcttggtcctactaggtttgcctacactgacatcactgcgatcactggccatttcagagacaagttgggtcaaggaggatacggctccgtatacaagggtgcactactctcaggcaatatgcatgttgccgtcaagatgctgggcaactcgaactgcaatggggacgagttcatcagtgaggtctccaccatcggtaggattcaccacatcaatgtggttcgccttgtgggcttctgtgcagaggaaatgagaagggcactggtctatgagtacatgcccaatggttctcttgacaagtacatattctcggccgaaagaagtttttcttgggatatgctcaacgagattgctttgggcattgcaaggggaatcaactacctgcatctagggtgcgacatgcagatccttcactttgacatcaagccacacaacattcttttggacagcaattttgtcccaaaagtttctgactttggccttgccaagttgtacccgagagacaagagctttgtgccagcaagcgccatgcggggaactattgggtacatagctcctgaaatgatatctcgtagctttggtgccatatcaagcaaatctgatgtttatagttttggtatgctactgctcgagatggcaggagggcgaaggaacgcagaccaaaatgcagccaactcaagccgagcatactacccagcctgggtttatgaccgcctagcggaacaagacgctggcgagatttctgttgcggcagacatgcatgagttggagaggaaactgtgcatcgttgggctacgttgcattcaaatgaagccgcaggatcgtccgaccatgagcgaggttatagagatgctcgagtgtggcactcatggcctgggcctgcaaatgccttctaggccattcttctgtgatgatgatgatcctaatatgcctgcagcagattcttaccatttctcatcggagcttactgcaatatctgaggaagatggttgaagaaataatacatgtctttatgcattcagatgaagccacatgatcgtccaatgatgagtcaagtcgtagggatgcttcagtgatcatatggttcatacagattcttaccatttctcctcagacctgaatgcaattgtaacacccgggtttcggggcaccaagacccaggcgcgaacataatcaccaggtgtgctgggaccaagtctcacacatatgatgaatcatggcacatgatcgaatgtcacatatttactatataataggagttctatacaaaataattaattaattacattataaggagacaacggtccagcaacccaaagttgactgggagacgacggcctagacctctcacgaacacatcaaagcatccttcatgtgcctcatcctgcggtacctgctcttgacgtgtggggggtg

SEQ ID NO: 16767 - DNA, 985 bp, Zea Mays
caaaccactttttcaagctcgttagatagacagtcgagctcggctcgttgaatgagcgagcccagccaagccgaacttggctcgggggctacatgaacaagcacgcatgctcgtccagcaggctagcacagccacttgagatctagaaaatccagatcaacatcacgtacgtcactggtgacgaatggtaggtaaccgaccaaagcacactactgtctgtacccacacatgtggagcacctttatttatgtttatatacacgaagtcgaagccgcagcagctagctagctagcatggccgggaaagagcttacgctgctggggttatgggcgagcccgttcgtgctccgggcgcgcatcgcgctcagcctcaaaggcctcacctacgcttactccgaggagaacctcgacgacaagagcgagcttctcctcagctccaaccccgtgctcaagaaggtgcccgtgctcatccaccacggcaagcccgtctgcgagtcccagatcatcgtgcagtacgtcgacgaggctttccccgccgccgcacctaatttccttccatccgacccctacgaccgcgccattgctcgcttctggagtataccaaggccaggcgggccgtatttggcctgccgccgctccgtccttaggcatagtggacatgtttcttttctttttttaaaaaaaaaaattatatgttctatgtttgtttgaaataaagtactgttatggtgttacacatgtattccaacgtcaactctacgtgctgctatttggtactactctcgttaattgatggtgtgttacataattggaaccaagtctggtttcggttagaaaagtttggccttatacacaacggccgagctccgtaaaaataatgctccggccactctataaatataatgatatacaatttgttttttaattttttgcactatagagacagtaacatttaaaacaattcagtggaactgtgccagataggg

SEQ ID NO: 16768 - DNA, 424 bp, Zea Mays
agacaatctgtggggaatcttttcattctccttgaggtccatacacacaggtccaaaagaagaagatctgggaagctgttcagcctcatcttagaacaacagataactgcattgcggttcttggtgataaacaaatgcgtacctctgcaggcctagttttctgcaaatcgcttcagggtgcaagagtgtcataaatctttatggccaacatctttcttgtatcatggaatcgtgtgtcatgtatcttccctgcaaataataactaactatatgaggagagcagcagggaaagaattttctttccaactactgagataatcactgtactggaaccattcacatttagttctcacttttcagtgttaaaacaacgtgcttcctgggctgacgcaataatcttgatgccttggggcgagttattaca

SEQ ID NO: 16769 - DNA, 2211 bp, Zea Mays
aaacacacgattcgcctcccaacgctactacccctttccttccaacttccgcccgccggcgccagccgcaaccgaacaatccaagcaacgcgtcaggcgccgccatggccacgtggcgcctccgccgcgccggtgccgccctagctgcctcctccaccctcgccgctgtcctcgccgcctcatcggcttccgccaccgacccgtccgccgccgccctagaagcggcaaggcagcgtgttgcgcggtcgggggccacgccgcccctgcgagacgcgcagcgtgcggcgctggcagggtccacccctgctgagcccctagacgtgctcgtcgttggcggcggcgccaccggatgcggcgtcgcgctcgatgccgccacccgcgggctccgtgtaggccttgtggagcgcgaggatttctcttctggaacctcctcccgatccaccaaactcatccatggcggcgtgcgctacttggagaaggcagtgttcaatcttgattatgggcagctgaaacttgtttttcatgcacttaaggaacgcaaacaagtcatcgagaatgctccccatttgtgccatgctttgccatgcatgactccttgctttaactggtttgaggttgtatactactggtttggtttgaagctttatgatcttgttgctggaagaaggctactacatttgtcccgatattattctgtggatgaatcagttgagcttttcccaacccttgcaaaaaacggacataattgtagcctaaaaggaacagttgtgtactatgatggtcaaatgaatgactcacggctgaatgtggggttggcatgcactgctgcagttgttggtgcagctgttctcaattatgctgaagtggtctctctcattaaggatgaatcgggggagagaatcattggtgcacgcgtccgtgacacactatcaggtagaataaagtaaggagtttgaaaccttcgcaaaggtggttgttaatgcagcaggaccattctgtgactctgtgaggaagatggctgacagtaccgtagcacctatgatctgtcctagtagtggtgtgcacattgtacttcctgattactactcccctgaagggatggggctaattgttccaaaaaccaaggatggcagagttgtatttatgttgccatggttaggaaggaccgttgcgggaacaactgattctaacacagcaataacaatgcttcctgaaccacacgaggatgaaatacagttcatattggatgcaatctctgactatcttaatgttcaggtaaggcgttcagatgttctttctgcctggagtggtatacgtcctttggcgatggatccatcagcaaagaataccgagagtatttctcgagatcatgttgtatttgaagactaccccgggttaataacaattaccggtggaaaatggacaacctataggagcagtcatgtctgggaatttgaaaccagccaatggttgtttgactgataatttgcatattgttggtggatatggatgggatcctgcttcttttacggttcttgctcagaattataagcgaatgaagaagacatatggtggcaaggttattccaggtgcaatggacagtgctgtatcgaaacatttatcgcatgcatatggatctttggctgaacaagtggctactattgcccagaacgaaggcttgggaaagcgccttgctcatggatacccatttttggaagctgaagtagcatactgtgctcgttatgagtactgtgaatctgccgtggattttgttgcaaggagatgccggcttgctttccttgacacagatgctgctggtagagcattgccccgaatcattgaaattttagcttcagagcacaagtgggacaaggcaaggaagaaggcggagctgcagaagggtagagagttcttggaaacattcaagtcatctaagaacgcccaattccatgatgggaagcataatggacgttcatgaccgaatatgcagttttctgaataagtgttgattttacacatgcacaagcaggctccgatacaagagtgagcctgcgaatgcagaaaggtttcgtttccacatttctacgcatggctgtgaaaatcggcgtgctggtttccagcagaataagatgtggtcacggcactatgtaattgtaaataccacatcatattagtcgattttgaaataaactggaaccaagaatttgtact

SEQ ID NO: 16770 - DNA, 1101 bp, Zea Mays
cttggagtcatgcatgtgtcttggtggtctcagaaacaaaagacggtgtccctctcaaaagtggatcatgtaaggcgttcagatgttctttctgcctggagtggtatacgtcctttggcgatggatccatcagcaaagaataccgagagtatttctcgagatcatgttgtatttgaagactaccccgggttaataacaattaccggtggaaaatggacaacctataggagtatggctgaagatgctgtaaatgcagcagtcatgtctgggaatttgaaaccagccaatggttgtttgactgataatttgcatattgttggtggatatggatgggatcctgcttcttttacggttcttgctcagaattataagcgaatgaagaagacatatggtggcaaggttattccaggtgcaatggacagtgctgtatcgaaacatttatcgcatgcatatggatctttggctgaacaagtggctactattgcccagaacgaaggcttgggaaagcgccttgctcatggatacccatttttggaagctgaagtagcatactgtgctcgttatgagtactgtgaatctgccgtggattttgttgcaaggagatgccggcttgctttccttgacacagatgctgctggtagagcattgccccgaatcattgaaattttagcttcagagcacaagtgggacaaggcaaggaagaaggcggagctgcagaagggtagagagttcttggaaacattcaagtcatctaagaacgcccaattccatgatgggaagcataatggacgttcatgaccgaatatgcagttttctgaataagtgttgattttacacatgcacaagcaggctccgatacaagagtgagcctgcgaatgcagaaaggtttcgtttccacatttctacgcatggctgtgaaaatcggcgtgctggtttccagcagaataagatgtggtcacggcactatgtaattgtaaataccacatcatattagtcgattttgaaataaactggaaccaagaatttgtacttttaattgttattcttgcatgttatatagttcgaaagaggagcaaaatcgacatggccatttcctttcgt

SEQ ID NO: 16771 - DNA, 2307 bp, Zea Mays
aaacacacgattcgcctcccaacgctactacccctttccttccaacttccgcccgccggcgccagccgcaaccgaacaatccaagcaacgcgtcaggcgccgccatggccacgtggcgcctccgccgcgccggtgccgccctagctgcctcctccaccctcgccgctgtcctcgccgcctcatcggcttccgccaccgacccgtccgccgccgccctagaagcggcaaggcagcgtgttgcgcggtcgggggccacgccgcccctgcgagacgcgcagcgtgcggcgctggcagggtccacccctgctgagcccctagacgtgctcgtcgttggcggcggcgccaccggatgcggcgtcgcgctcgatgccgccacccgcgggctccgtgtaggccttgtggagcgcgaggatttctcttctggaacctcctcccgatccaccaaactcatccatggcggcgtgcgctacttggagaaggcagtgttcaatcttgattatgggcagctgaaacttgtttttcatgcacttaaggaacgcaaacaagtcatcgagaatgctccccatttgtgccatgctttgccatgcatgactccttgctttaactggtttgaggttgtatactactggtttggtttgaagctttatgatcttgttgctggaagaaggctactacatttgtcccgatattattctgtggatgaatcagttgagcttttcccaacccttgcaaaaaacggacataattgtagcctaaaaggaacagttgtgtactatgatggtcaaatgaatgactcacggctgaatgtggggttggcatgcactgctgcagttgttggtgcagctgttctcaattatgctgaagtggtctctctcattaaggatgaatcgggggagagaatcattggtgcacgcgtccgtgacacactatcaggtagaataaagtaaggagtttgaaaccttcgcaaaggtggttgttaatgcagcaggaccattctgtgactctgtgaggaagatggctgacagtaccgtagcacctatgatctgtcctagtagtggtgtgcacattgtacttcctgattactactcccctgaagggatggggctaattgttccaaaaaccaaggatggcagagttgtatttatgttgccatggttaggaaggaccgttgcgggaacaactgattctaacacagcaataacaatgcttcctgaaccacacgaggatgaaatacagttcatattggatgcaatctctgactatcttaatgttcaggtaaggcgttcagatgttctttctgcctggagtggtatacgtcctttggcgatggatccatcagcaaagaataccgagagtatttctcgagatcatgttgtatttgaagactaccccgggttaataacaattaccggtggaaaatggacaacctataggagtatggctgaagatgctgtaaatgcagcagtcatgtctgggaatttgaaaccagccaatggttgtttgactgataatttgcatattgttggtggatatggatgggatcctgcttcttttacggttcttgctcagaattataagcgaatgaagaagacatatggtggcaaggttattccaggtgcaatggacagtgctgtatcgaaacatttatcgcatgcatatggatctttggctgaacaagtggctactattgcccagaacgaaggcttgggaaagcgccttgctcatggatacccatttttggaagctgaagtagcatactgtgctcgttatgagtactgtgaatctgccgtggattttgttgcaaggagatgccggcttgctttccttgacacagatgctgctggtagagcattgccccgaatcattgaaattttagcttcagagcacaagtgggacaaggcaaggaagaaggcggagctgcagaagggtagagagttcttggaaacattcaagtcatctaagaacgcccaattccatgatgggaagcataatggacgttcatgaccgaatatgcagttttctgaataagtgttgattttacacatgcacaagcaggctccgatacaagagtgagcctgcgaatgcagaaaggtttcgtttccacatttctacgcatggctgtgaaaatcggcgtgctggtttccagcagaataagatgtggtcacggcactatgtaattgtaaataccacatcatattagtcgattttgaaataaactggaaccaagaatttgtacttttaattgttattcttgcatgttatatagttcgaaagaggagcaaaatcgacatggccatttcctttcgt

SEQ ID NO: 16772 - DNA, 2164 bp, Zea Mays
accccagaccccagacctttccccttccgtccacggtcggcgccaacgccactccagtgagctgagggcggagacggtcacggtgggcagaatgacacgccgcacgcctctccgccccgctccgctccgctccagattgcgcgcacccacccatggcgctcgccgcttcccaccacggcctcctgcccttcgcccccgctgccacgcctaccccgtcacgggggcacctgcgcttccgcgccgcgcgccctctgccccgccccgcccggagcgcgaggatttctcttctggaacctcctcccgatccaccaaactcatccatggcggcgtgcgctacttggagaaggcagtgttcaatcttgattatgggcagctgaaacttgtttttcatgcacttaaggaacgcaaacaagtcatcgagaatgctccccatttgtgccatgctttgccatgcatgactccttgctttaactggtttgaggttgtatactactggtttggtttgaagctttatgatcttgttgctggaagaaggctactacatttgtcccgatattattctgtggatgaatcagttgagcttttcccaacccttgcaaaaaacggacataattgtagcctaaaaggaacagttgtgtactatgatggtcaaatgaatgactcacggctgaatgtggggttggcatgcactgctgcagttgttggtgcagctgttctcaattatgctgaagtggtctctctcattaaggatgaatcgggggagagaatcattggtgcacgcgtccgtgacacactatcaggtaaggagtttgaaaccttcgcaaaggtggttgttaatgcagcaggaccattctgtgactctgtgaggaagatggctgacagtaccgtagcacctatgatctgtcctagtagtggtgtgcacattgtacttcctgattactactcccctgaagggatggggctaattgttccaaaaaccaaggatggcagagttgtatttatgttgccatggttaggaaggaccgttgcgggaacaactgattctaacacagcaataacaatgcttcctgaaccacacgaggatgaaatacagttcatattggatgcaatctctgactatcttaatgttcaggtaaggcgttcagatgttctttctgcctggagtggtatacgtcctttggcgatggatccatcagcaaagaataccgagagtatttctcgagatcatgttgtatttgaagactaccccgggttaataacaattaccggtggaaaatggacaacctataggagtatggctgaagatgctgtaaatgcagcagtcatgtctgggaatttgaaaccagccaatggttgtttgactgataatttgcatattgttggtggatatggatgggatcctgcttcttttacggttcttgctcagaattataagcgaatgaagaagacatatggtggcaaggttattccaggtgcaatggacagtgctgtatcgaaacatttatcgcatgcatatggatctttggctgaacaagtggctactattgcccagaacgaaggcttgggaaagcgccttgctcatggatacccatttttggaagctgaagtagcatactgtgctcgttatgagtactgtgaatctgccgtggattttgttgcaaggagatgccggcttgctttccttgacacagatgctgctggtagagcattgccccgaatcattgaaattttagcttcagagcacaagtgggacaaggcaaggaagaaggcggagctgcagaagggtagagagttcttggaaacattcaagtcatctaagaacgcccaattccatgatgggaagcataatggacgttcatgaccgaatatgcagttttctgaataagtgttgattttacacatgcacaagcaggctccgatacaagagtgagcctgcgaatgcagaaaggtttcgtttccacatttctacgcatggctgtgaaaatcggcgtgctggtttccagcagaataagatgtggtcacggcactatgtaattgtaaataccacatcatattagtcgattttgaaataaactggaaccaagaatttgtacttttaattgttattcttgcatgttatatagttcgaaagaggagcaaaatcgacatggccatttcctttcgt

SEQ ID NO: 16773 - DNA, 2019 bp, Zea Mays
aagaaatctgaaagtttcttgtgttgggagaggactaatgggttacattagggataaggttaatcaggggcaagttttacttgataatgtggacatcaagacgttgcaattaaagcgacttagagaccagatcggattggtgaatcaggaacctactctttttgcaactacaattcttgagaatattctttttggcaaacctgaggcgacaaaggcagaggttgggtctacgactacttccgcagtagattaaaggagccctagctttcggaggacaacccagatgccttcaaagttcaaaatgacggtgatgaaggcgctgaaccgcgctggtggcaaggctggaaacaagggtgctgaagctgctcttacttccattgagatggcctctctgttccggcatcacttaggctgacactttgcatattctggtttctatacacgaggcaagacatcatttcttcctatcaagagtttcggctaatagagcttttctgccgtggctagtataatttattttcaattctgttggttcggtgctgatttgttgctttctttctatgagatttgaaaagctcacaagacatgtttctaaacctggcacaatgaataattgtcaccatgaggtcatgaataaggttgcacatttcatgaattgtgatatcacccttgactccgtgataactgagaaattaacatactaacacagccgctgctccagcacaactgtcacggcgtgtgctagggcagtggggctgtcgccaaggacatgcagcttgtgaagcagtgctggagccgtccccatcgccgagcagctcgtgagggtaattcaagcacgctaatgcagtctggtcctacaatagcgatccttggtcttcacctacatcttcacctaccgaacatcaggtgttggtccagtgcaacctgctgtcttcgagctctagcagatcgccttgccttgcgtagccgcgaccacgccggcgctgcagcactacagctttacctcaccgggtttagggtcctccgaccaagccgcgccgacctccactccagcttagaccggcggcggatgcatgcctttctgtcctcgcgttcggatctcagtgtcccacgctgtcgtgccgtctcagtcatccctagctcttcctcgtccgtaccgtgtgtcacagcaaactcttcttcggtcctggcgctcgtctcctcgccatcgttttacggattcggcgtcgtcgagtttcacctcgctgttacaacgtcctggtcttttggagcttcggcaaattgttgtcctgctgcattgtcgtgtggtgctccctactccctagtccctacctagtggtgagttggcgttgatcctgatcttcattttgctgtttccaatcaatttagcacatttaccatagttgtgtatgtcgatatggtgctcgacgtgttgtgattgtcctgggattaagagggtttgttgttggccgtcgcaggcaagttttgcctggtgcagcctaccgtgtgggccgagccgggtccaaatcggattaagaagattttttttcatttatctaataaagatataccttgtgaatttttcctagagctacatgaagaagtaacagttgtgaggtaaattctgttaggctcacaaaaatgggttctctaggttaaaatagttttagggattctcaggcaagtccttaattttggataattaaaacttggtttttataggattatatgagttttagttataaaaatagagcactaaaaattgtgtaagcttatcttgagcatgtgaacccttgggtaaagtttggaactgtttggacaagatttgcttagcaaattaattattcctcagtaaaggaaaagagttttaccctagggtatttaggacacctagtgtcttagtaaggaatgaagttgtttagcaagttttggatggttagatgagttctaaggataagtagctccctggtagctattacttatgatgatagtgttggggcgaaggcaaagacgctaccc

SEQ ID NO: 16774 - DNA, 2367 bp, Zea Mays
aaaaaaccgacagcgacagggcaaggagccagggccgctccgctccgctccgctcgtgctctgctcctgctctctctctctctcggcgtcgattgggcgaccgccgccgcctcccccaggtcttcgctgggcccgtcgccggcgccgagcacccaccagggcaagttttacttgataatgtggacatcaagacgttgcaattaaagcgacttagagaccagatcggattggtgaatcaggaacctactctttttgcaactacaattcttgagaatattctttttggcaaacctgaggcgacaaaggcagaggttgggtctacgactacttccgcaggttcattgctcttcttcctagtggccacaacactcatgcgggttctacttctctttatattctaatttctaatgccatttgcacttcatttctgttttgatttcagaatccttcatttcttgttttgtagttttctcctaaacacatttgctctgatgttgtttgtcaccataactgattaaaggagccctagctttcggaggacaacccagatgccttcaaagttcaaaatgacggtgatgaaggcgctgaaccgcgctggtggcaaggctggaaacaagggtgctgaagctgctcttacttccgtaagttacccttccagtcggaaatcctgatttcaaacaaacatagatgcattagcatgtgagaagcccaagttcccctgcagattgagatggcctctctgttccggcatcacttaggctgacactttgcatattctggtttctatacacgaggcaagacatcatttcttcctatcaagagtttcggctaatagagcttttctgccgtggctagtataatttattttcaattctgttggttcggtgctgatttgttgctttctttctatgagatttgaaaagctcacaagacatgtttctaaacctggcacaatgaataattgtcaccatgaggtcatgaataaggttgcacatttcatgaattgtgatatcacccttgactccgtgataactgagaaattaacatactaacacagccgctgctccagcacaactgtcacggcgtgtgctagggcagtggggctgtcgccaaggacatgcagcttgtgaagcagtgctggagccgtccccatcgccgagcagctcgtgagggtaattcaagcacgctaatgcagtctggtcctacaatagcgatccttggtcttcacctacatcttcacctaccgaacatcaggtgttggtccagtgcaacctgctgtcttcgagctctagcagatcgccttgccttgcgtagccgcgaccacgccggcgctgcagcactacagctttacctcaccgggtttagggtcctccgaccaagccgcgccgacctccactccagcttagaccggcggcggatgcatgcctttctgtcctcgcgttcggatctcagtgtcccacgctgtcgtgccgtctcagtcatccctagctcttcctcgtccgtaccgtgtgtcacagcaaactcttcttcggtcctggcgctcgtctcctcgccatcgttttacggattcggcgtcgtcgagtttcacctcgctgttacaacgtcctggtcttttggagcttcggcaaattgttgtcctgctgcattgtcgtgtggtgctccctactccctagtccctacctagtggtgagttggcgttgatcctgatcttcattttgctgtttccaatcaatttagcacatttaccatagttgtgtatgtcgatatggtgctcgacgtgttgtgattgtcctgggattaagagggtttgttgttggccgtcgcaggcaagttttgcctggtgcagcctaccgtgtgggccgagccgggtccaaatcggattaagaagattttttttcatttatctaataaagatataccttgtgaatttttcctagagctacatgaagaagtaacagttgtgaggtaaattctgttaggctcacaaaaatgggttctctaggttaaaatagttttagggattctcaggcaagtccttaattttggataattaaaacttggtttttataggattatatgagttttagttataaaaatagagcactaaaaattgtgtaagcttatcttgagcatgtgaacccttgggtaaagtttggaactgtttggacaagatttgcttagcaaattaattattcctcagtaaaggaaaagagttttaccctagggtatttaggacacctagtgtcttagtaaggaatgaagttgtttagcaagttttggatggttagatgagttctaaggataagtagctccctggtagctattacttatgatgatagtgttggggcgaaggcaaagacgctaccc

SEQ ID NO: 16775 - DNA, 1694 bp, Zea Mays
aaaaaaccgacagcgacagggcaaggagccagggccgctccgctccgctccgctcgtgctctgctcctgctctctctctctctcggcgtcgattgggcgaccgccgccgcctcccccaggtcttcgctgggcccgtcgccggcgccgagcacccaccagggcaagttttacttgataatgtggacatcaagacgttgcaattaaagcgacttagagaccagatcggattggtgaatcaggaacctactctttttgcaactacaattcttgagaatattctttttggcaaacctgaggcgacaaaggcagaggttgggtctacgactacttccgcaggcgctgaaccgcgctggtggcaaggctggaaacaagggtgctgaagctgctcttacttcccacaactgtcacggcgtgtgctagggcagtggggctgtcgccaaggacatgcagcttgtgaagcagtgctggagccgtccccatcgccgagcagctcgtgagggtaattcaagcacgctaatgcagtctggtcctacaatagcgatccttggtcttcacctacatcttcacctaccgaacatcaggtgttggtccagtgcaacctgctgtcttcgagctctagcagatcgccttgccttgcgtagccgcgaccacgccggcgctgcagcactacagctttacctcaccgggtttagggtcctccgaccaagccgcgccgacctccactccagcttagaccggcggcggatgcatgcctttctgtcctcgcgttcggatctcagtgtcccacgctgtcgtgccgtctcagtcatccctagctcttcctcgtccgtaccgtgtgtcacagcaaactcttcttcggtcctggcgctcgtctcctcgccatcgttttacggattcggcgtcgtcgagtttcacctcgctgttacaacgtcctggtcttttggagcttcggcaaattgttgtcctgctgcattgtcgtgtggtgctccctactccctagtccctacctagtggtgagttggcgttgatcctgatcttcattttgctgtttccaatcaatttagcacatttaccatagttgtgtatgtcgatatggtgctcgacgtgttgtgattgtcctgggattaagagggtttgttgttggccgtcgcaggcaagttttgcctggtgcagcctaccgtgtgggccgagccgggtccaaatcggattaagaagattttttttcatttatctaataaagatataccttgtgaatttttcctagagctacatgaagaagtaacagttgtgaggtaaattctgttaggctcacaaaaatgggttctctaggttaaaatagttttagggattctcaggcaagtccttaattttggataattaaaacttggtttttataggattatatgagttttagttataaaaatagagcactaaaaattgtgtaagcttatcttgagcatgtgaacccttgggtaaagtttggaactgtttggacaagatttgcttagcaaattaattattcctcagtaaaggaaaagagttttaccctagggtatttaggacacctagtgtcttagtaaggaatgaagttgtttagcaagttttggatggttagatgagttctaaggataagtagctccctggtagctattacttatgatgatagtgttggggcgaaggcaaagacgctaccc

SEQ ID NO: 16776 - DNA, 2487 bp, Zea Mays
aaaaaaccgacagcgacagggcaaggagccagggccgctccgctccgctccgctcgtgctctgctcctgctctctctctctctcggcgtcgattgggcgaccgccgccgcctcccccaggtcttcgctgggcccgtcgccggcgccgagcacccaccagggcaagttttacttgataatgtggacatcaagacgttgcaattaaagcgacttagagaccagatcggattggtgaatcaggaacctactctttttgcaactacaattcttgagaatattctttttggcaaacctgaggcgacaaaggcagaggttgggtctacgactacttccgcagttttctcctaaacacatttgctctgatgttgtttgtcaccataactggtatgctactcacatccatctcaatcaatccaaccatataaatctgcattatactccccataaacagacttgtggacgttttccattaggccttccaatgtcttcataatcccctaaatagacttgtgaacaatggacaagcatgtctaaattttcatgtctgaacctatgtgctgcttgttctgttcatactactaggcctatgagtattaatttttatttgattggattagatcaagactctcactcccctgttcagattaatactaaattttatttgatttgattagatcggattggttgggtgtgcatttgttgcagctcgagctgtgtgtgtaattgatgcagctggttcgcttaatttactaatgacctcgctcgttacacttgatgctctgcagtagattaaaggagccctagctttcggaggacaacccagatgccttcaaagttcaaaatgacggtgatgaaggcgctgaaccgcgctggtggcaaggctggaaacaagggtgctgaagctgctcttacttccattgagatggcctctctgttccggcatcacttaggctgacactttgcatattctggtttctatacacgaggcaagacatcatttcttcctatcaagagtttcggctaatagagcttttctgccgtggctagtataatttattttcaattctgttggttcggtgctgatttgttgctttctttctatgagatttgaaaagctcacaagacatgtttctaaacctggcacaatgaataattgtcaccatgaggtcatgaataagccgctgctccagcacaactgtcacggcgtgtgctagggcagtggggctgtcgccaaggacatgcagcttgtgaagcagtgctggagccgtccccatcgccgagcagctcgtgagggtaattcaagcacgctaatgcagtctggtcctacaatagcgatccttggtcttcacctacatcttcacctaccgaacatcaggtgttggtccagtgcaacctgctgtcttcgagctctagcagatcgccttgccttgcgtagccgcgaccacgccggcgctgcagcactacagctttacctcaccgggtttagggtcctccgaccaagccgcgccgacctccactccagcttagaccggcggcggatgcatgcctttctgtcctcgcgttcggatctcagtgtcccacgctgtcgtgccgtctcagtcatccctagctcttcctcgtccgtaccgtgtgtcacagcaaactcttcttcggtcctggcgctcgtctcctcgccatcgttttacggattcggcgtcgtcgagtttcacctcgctgttacaacgtcctggtcttttggagcttcggcaaattgttgtcctgctgcattgtcgtgtggtgctccctactccctagtccctacctagtggtgagttggcgttgatcctgatcttcattttgctgtttccaatcaatttagcacatttaccatagttgtgtatgtcgatatggtgctcgacgtgttgtgattgtcctgggattaagagggtttgttgttggccgtcgcaggcaagttttgcctggtgcagcctaccgtgtgggccgagccgggtccaaatcggattaagaagattttttttcatttatctaataaagatataccttgtgaatttttcctagagctacatgaagaagtaacagttgtgaggtaaattctgttaggctcacaaaaatgggttctctaggttaaaatagttttagggattctcaggcaagtccttaattttggataattaaaacttggtttttataggattatatgagttttagttataaaaatagagcactaaaaattgtgtaagcttatcttgagcatgtgaacccttgggtaaagtttggaactgtttggacaagatttgcttagcaaattaattattcctcagtaaaggaaaagagttttaccctagggtatttaggacacctagtgtcttagtaaggaatgaagttgtttagcaagttttggatggttagatgagttctaaggataagtagctccctggtagctattacttatgatgatagtgttggggcgaaggcaaagacgctaccc

SEQ ID NO: 16777 - DNA, 1821 bp, Zea Mays
caaaagagtaaaaaaccgacagcgacagggcaaggagccagggccgctccgctccgctccgctcgtgctctgctcctgctctctctctctctcggcgtcgattgggcgaccgccgccgcctcccccaggtcttcgctgggcccgtcgccggcgccgagcacccaccagggcaagttttacttgataatgtggacatcaagacgttgcaattaaagcgacttagagaccagatcggattggtgaatcaggaacctactctttttgcaactacaattcttgagaatattctttttggcaaacctgaggcgacaaaggcagaggttgggtctacgactacttccgcagttttctcctaaacacatttgctctgatgttgtttgtcaccataactgtagattaaaggagccctagctttcggaggacaacccagatgccttcaaagttcaaaatgacggtgatgaaggcgctgaaccgcgctggtggcaaggctggaaacaagggtgctgaagctgctcttacttcccacaactgtcacggcgtgtgctagggcagtggggctgtcgccaaggacatgcagcttgtgaagcagtgctggagccgtccccatcgccgagcagctcgtgagggtaattcaagcacgctaatgcagtctggtcctacaatagcgatccttggtcttcacctacatcttcacctaccgaacatcaggtgttggtccagtgcaacctgctgtcttcgagctctagcagatcgccttgccttgcgtagccgcgaccacgccggcgctgcagcactacagctttacctcaccgggtttagggtcctccgaccaagccgcgccgacctccactccagcttagaccggcggcggatgcatgcctttctgtcctcgcgttcggatctcagtgtcccacgctgtcgtgccgtctcagtcatccctagctcttcctcgtccgtaccgtgtgtcacagcaaactcttcttcggtcctggcgctcgtctcctcgccatcgttttacggattcggcgtcgtcgagtttcacctcgctgttacaacgtcctggtcttttggagcttcggcaaattgttgtcctgctgcattgtcgtgtggtgctccctactccctagtccctacctagtggtgagttggcgttgatcctgatcttcattttgctgtttccaatcaatttagcacatttaccatagttgtgtatgtcgatatggtgctcgacgtgttgtgattgtcctgggattaagagggtttgttgttggccgtcgcaggcaagttttgcctggtgcagcctaccgtgtgggccgagccgggtccaaatcggattaagaagattttttttcatttatctaataaagatataccttgtgaatttttcctagagctacatgaagaagtaacagttgtgaggtaaattctgttaggctcacaaaaatgggttctctaggttaaaatagttttagggattctcaggcaagtccttaattttggataattaaaacttggtttttataggattatatgagttttagttataaaaatagagcactaaaaattgtgtaagcttatcttgagcatgtgaacccttgggtaaagtttggaactgtttggacaagatttgcttagcaaattaattattcctcagtaaaggaaaagagttttaccctagggtatttaggacacctagtgtcttagtaaggaatgaagttgtttagcaagttttggatggttagatgagttctaaggataagtagctccctggtagctattacttatgatgatagtgttggggcgaaggcaaagacgctaccc

SEQ ID NO: 16778 - DNA, 1838 bp, Zea Mays
ctcaaaagagtaaaaaaccgacagcgacagggcaaggagccagggccgctccgctccgctccgctcgtgctctgctcctgctctctctctctctcggcgtcgattgggcgaccgccgccgcctcccccaggtcttcgctgggcccgtcgccggcgccgagcacccaccagggcaagttttacttgataatgtggacatcaagacgttgcaattaaagcgacttagagaccagatcggattggtgaatcaggaacctactctttttgcaactacaattcttgagaatattctttttggcaaacctgaggcgacaaaggcagaggttgggtctacgactacttccgcaggcgctgaaccgcgctggtggcaaggctggaaacaagggtgctgaagctgctcttacttccattgagatggcctctctgttccggcatcacttaggctgacactttgcatattctggtttctatacacgagctcacaagacatgtttctaaacctggcacaatgaataattgtcaccatgaggtcatgaataagcacaactgtcacggcgtgtgctagggcagtggggctgtcgccaaggacatgcagcttgtgaagcagtgctggagccgtccccatcgccgagcagctcgtgagggtaattcaagcacgctaatgcagtctggtcctacaatagcgatccttggtcttcacctacatcttcacctaccgaacatcaggtgttggtccagtgcaacctgctgtcttcgagctctagcagatcgccttgccttgcgtagccgcgaccacgccggcgctgcagcactacagctttacctcaccgggtttagggtcctccgaccaagccgcgccgacctccactccagcttagaccggcggcggatgcatgcctttctgtcctcgcgttcggatctcagtgtcccacgctgtcgtgccgtctcagtcatccctagctcttcctcgtccgtaccgtgtgtcacagcaaactcttcttcggtcctggcgctcgtctcctcgccatcgttttacggattcggcgtcgtcgagtttcacctcgctgttacaacgtcctggtcttttggagcttcggcaaattgttgtcctgctgcattgtcgtgtggtgctccctactccctagtccctacctagtggtgagttggcgttgatcctgatcttcattttgctgtttccaatcaatttagcacatttaccatagttgtgtatgtcgatatggtgctcgacgtgttgtgattgtcctgggattaagagggtttgttgttggccgtcgcaggcaagttttgcctggtgcagcctaccgtgtgggccgagccgggtccaaatcggattaagaagattttttttcatttatctaataaagatataccttgtgaatttttcctagagctacatgaagaagtaacagttgtgaggtaaattctgttaggctcacaaaaatgggttctctaggttaaaatagttttagggattctcaggcaagtccttaattttggataattaaaacttggtttttataggattatatgagttttagttataaaaatagagcactaaaaattgtgtaagcttatcttgagcatgtgaacccttgggtaaagtttggaactgtttggacaagatttgcttagcaaattaattattcctcagtaaaggaaaagagttttaccctagggtatttaggacacctagtgtcttagtaaggaatgaagttgtttagcaagttttggatggttagatgagttctaaggataagtagctccctggtagctattacttatgatgatagtgttggggcgaaggcaaagacgctaccc

SEQ ID NO: 16779 - DNA, 629 bp, Zea Mays
tttatgtattgtttcttttcaatcaggcaagttttacttgataatgtggacatcaagacgttgcaattaaagcgacttagagaccagatcggattggtgaatcaggaacctactctttttgcaactacaattcttgagaatattctttttggcaaacctgaggcgacaaaggcagaggttgggtctacgactacttccgcagttttctcctaaacacatttgctctgatgttgtttgtcaccataactggcgctgaaccgcgctggtggcaaggctggaaacaagggtgctgaagctgctcttacttccattgagatggcctctctgttccggcatcacttaggctgacactttgcatattctggtttctatacacgagctcacaagacatgtttctaaacctggcacaatgaataattgtcaccatgaggtcatgaataagcacaactgtcacggcgtgtgctagggcagtggggctgtcgccaaggacatgcagcttgtgaagcagtgctggagccgtccccatcgccgagcagctcgtgagggtaattcaagcacgctaatgcagtctggtcctacaatagcgatccttggtcttcacctacatcttcacctaccgaacatcaggt

SEQ ID NO: 16780 - DNA, 535 bp, Zea Mays
gttgctttttgctgggtgagtgatatgcgtggcacatggctttatgtattgtttcttttcaatcaggcaagttttacttgataatgtggacatcaagacgttgcaattaaagcgacttagagaccagatcggattggtgaatcaggaacctactctttttgcaactacaattcttgagaatattctttttggcaaacctgaggcgacaaaggcagaggttgggtctacgactacttccgcaggcgctgaaccgcgctggtggcaaggctggaaacaagggtgctgaagctgctcttacttccattgagatggcctctctgttccggcatcacttaggctgacactttgcatattctggtttctatacacgagggcagtggggctgtcgccaaggacatgcagcttgtgaagcagtgctggagccgtccccatcgccgagcagctcgtgagggtaattcaagcacgctaatgcagtctggtcctacaatagcgatccttggtcttcacctacatcttcacctaccgaacatcaggt

SEQ ID NO: 16781 - DNA, 1751 bp, Zea Mays
cacacaaagttactaattgttttgcctttgtaatggcatgattcagtttaagatattgtgattgtagtacttttgggcaggggataaaacaatttttgttatggctgatctgttagccctaaggaatttgttactgctttttaggaattatatatactagttatagatgagcaaatgaattagcacacctggataatgtatgcttctattgcctaagctgcatctccatacaaagttagtaattagcagacccctatttaatatgtttggttcgaatcttacactggtcttgcattgtcttatgcatggcacatggcagtatgatcagtgactcagttttactttgaaattaagctacttgcaggtacatggtagttgctttttgctgggtgagtgatatgcgtggcacatggctttatgtattgtttcttttcaatcagtgagtgatatttcttgaattctcttaaaacttcattaggatctttgaggtttgatgcaacagctgaagtttagttttctatttataccactggaacttcgtcccgttcagttcctgataagctaagtgcttgtccctgaaatagaatttgtaatcaacaaaccagtcacatgtttgttgcattcttcaggatgaaactgagcccgctatgtattctttttcactgtttataattgttgtttcctaatatactactgtgaatgcttgttctttgtttattttcgtatattgttaattcctaatatacataatttccccaaataacatgataataaatatcggaaaagtggagaactgaacgacaatgtttagcgcaatggtgaacagtgctttatagttggcattaatcttagttcctacatgttgttaatatgtagtctatatactttgattattttttattgattacaaaatattgggaggaccataataattttgaaaaaaatgcttggattgtttctgaggatttgggcttggaaaggcgtaagaaatctgaaagtttcttgtgttgggagaggactaatgggttacattagggataaggttaatcaggggcaagttttacttgataatgtggacatcaagacgttgcaattaaagcgacttagagaccagatcggattggtgaatcaggaacctactctttttgcaactacaattcttgagaatattctttttggcaaacctgaggcgacaaaggcagaggttgggtctacgactacttccgcagaatccttcatttcttgttttgtagttttctcctaaacacatttgctctgatgttgtttgtcaccataactgtagattaaaggagccctagctttcggaggacaacccagatgccttcaaagttcaaaatgacggtgatgaaggcgctgaaccgcgctggtggcaaggctggaaacaagggtgctgaagctgctcttacttccattgagatggcctctctgttccggcatcacttaggctgacactttgcatattctggtttctatacacgagctcacaagacatgtttctaaacctggcacaatgaataattgtcaccatgaggtcatgaataagcacaactgtcacggcgtgtgctagggcagtggggctgtcgccaaggacatgcagcttgtgaagcagtgctggagccgtccccatcgccgagcagctcgtgagggtaattcaagcacgctaatgcagtctggtcctacaatagcgatccttggtcttcacctacatcttcacctaccgaacatcaggt

SEQ ID NO: 16782 - DNA, 727 bp, Zea Mays
agcgacagggcaaggagccagggccgctccgctccgctccgctcgtgctctgctcctgctctctctctctctcggcgtcgattgggcgaccgccgccgcctcccccaggtcttcgctgggcccgtcgccggcgccgagcacccaccagggcaagttttacttgataatgtggacatcaagacgttgcaattaaagcgacttagagaccagatcggattggtgaatcaggaacctactctttttgcaactacaattcttgagaatattctttttggcaaacctgaggcgacaaaggcagagttttctcctaaacacatttgctctgatgttgtttgtcaccataactggcgctgaaccgcgctggtggcaaggctggaaacaagggtgctgaagctgctcttacttccattgagatggcctctctgttccggcatcacttaggctgacactttgcatattctggtttctatacacgagctcacaagacatgtttctaaacctggcacaatgaataattgtcaccatgaggtcatgaataagcacaactgtcacggcgtgtgctagggcagtggggctgtcgccaaggacatgcagcttgtgaagcagtgctggagccgtccccatcgccgagcagctcgtgagggtaattcaagcacgctaatgcagtctggtcctacaatagcgatccttggtcttcacctacatcttcacctaccgaacatcaggt

SEQ ID NO: 16783 - DNA, 1405 bp, Zea Mays
agcgacagggcaaggagccagggccgctccgctccgctccgctcgtgctctgctcctgctctctctctctctcggcgtcgattgggcgaccgccgccgcctcccccaggtcttcgctgggcccgtcgccggcgccgagcacccaccaggtacatggtagttgctttttgctgggtgagtgatatgcgtggcacatggctttatgtattgtttcttttcaatcagtgagtgatatttcttgaattctcttaaaacttcattaggatctttgaggtttgatgcaacagctgaagtttagttttctatttataccactggaacttcgtcccgttcagttcctgataagctaagtgcttgtccctgaaatagaatttgtaatcaacaaaccagtcacatgtttgttgcattcttcaggatgaaactgagcccgctatgtattctttttcactgtttataattgttgtttcctaatatactactgtgaatgcttgttctttgtttattttcgtatattgttaattcctaatatacataatttccccaaataacatgataataaatatcggaaaagtggagaactgaacgacaatgtttagcgcaatggtgaacagtgctttatagttggcattaatcttagttcctacatgttgttaatatgtagtctatatactttgattattttttattgattacaaaatattgggaggaccataataattttgaaaaaaatgcttggattgtttctgaggatttgggcttggaaaggcgtaagaaatctgaaagtttcttgtgttgggagaggactaatgggttacattagggataaggttaatcaggggcaagttttacttgataatgtggacatcaagacgttgcaattaaagcgacttagagaccagatcggattggtgaatcaggaacctactctttttgcaactacaattcttgagaatattctttttggcaaacctgaggcgacaaaggcagaggttgggtctacgactacttccgcaggcgctgaaccgcgctggtggcaaggctggaaacaagggtgctgaagctgctcttacttccattgagatggcctctctgttccggcatcacttaggctgacactttgcatattctggtttctatacacgagctcacaagacatgtttctaaacctggcacaatgaataattgtcaccatgaggtcatgaataagccgctgctccagcacaactgtcacggcgtgtgctagggcagtggggctgtcgccaaggacatgcagcttgtgaagcagtgctggagccgtccccatcgccgagcagctcgtgagggtaattcaagcacgctaatgcagtctggtcctacaatagcgatccttggtcttcacctacatcttcacctaccgaacatcaggt

SEQ ID NO: 16784 - DNA, 689 bp, Zea Mays
agcgacagggcaaggagccagggccgctccgctccgctccgctcgtgctctgctcctgctctctctctctctcggcgtcgattgggcgaccgccgccgcctcccccaggtcttcgctgggcccgtcgccggcgccgagcacccaccagggcaagttttacttgataatgtggacatcaagacgttgcaattaaagcgacttagagaccagatcggattggtgaatcaggaacctactctttttgcaactacaattcttgagaatattctttttggcaaacctgaggcgacaaaggcagaggttgggtctacgactacttccgcagttttctcctaaacacatttgctctgatgttgtttgtcaccataactggcgctgaaccgcgctggtggcaaggctggaaacaagggtgctgaagctgctcttacttccattgagatggcctctctgttccggcatcacttaggctgacactttgcatattctggtttctatacacgagcacaactgtcacggcgtgtgctagggcagtggggctgtcgccaaggacatgcagcttgtgaagcagtgctggagccgtccccatcgccgagcagctcgtgagggtaattcaagcacgctaatgcagtctggtcctacaatagcgatccttggtcttcacctacatcttcacctaccgaacatcaggt

SEQ ID NO: 16785 - DNA, 584 bp, Zea Mays
agcgacagggcaaggagccagggccgctccgctccgctccgctcgtgctctgctcctgctctctctctctctcggcgtcgattgggcgaccgccgccgcctcccccaggtcttcgctgggcccgtcgccggcgccgagcacccaccagggcaagttttacttgataatgtggacatcaagacgttgcaattaaagcgacttagagaccagatcggattggtgaatcaggaacctactctttttgcaactacaattcttgagaatattctttttggcaaacctgaggcgacaaaggcagaggttgggtctacgactacttccgcaggcgctgaaccgcgctggtggcaaggctggaaacaagggtgctgaagctgctcttacttccccgctgctccagcacaactgtcacggcgtgtgctagggcagtggggctgtcgccaaggacatgcagcttgtgaagcagtgctggagccgtccccatcgccgagcagctcgtgagggtaattcaagcacgctaatgcagtctggtcctacaatagcgatccttggtcttcacctacatcttcacctaccgaacatcaggt

SEQ ID NO: 16786 - DNA, 804 bp, Zea Mays
aaaaaaccgacagcgacagggcaaggagccagggccgctccgctccgctccgctcgtgctctgctcctgctctctctctctctcggcgtcgattgggcgaccgccgccgcctcccccaggtcttcgctgggcccgtcgccggcgccgagcacccaccagggcaagttttacttgataatgtggacatcaagacgttgcaattaaagcgacttagagaccagatcggattggtgaatcaggaacctactctttttgcaactacaattcttgagaatattctttttggcaaacctgaggcgacaaaggcagaggttgggtctacgactacttccgcaggttcattgctcttcttcctagtggccacaacactcatgcggttttctcctaaacacatttgctctgatgttgtttgtcaccataactggcgctgaaccgcgctggtggcaaggctggaaacaagggtgctgaagctgctcttacttccattgagatggcctctctgttccggcatcacttaggctgacactttgcatattctggtttctatacacgagctcacaagacatgtttctaaacctggcacaatgaataattgtcaccatgaggtcatgaataagcacaactgtcacggcgtgtgctagggcagtggggctgtcgccaaggacatgcagcttgtgaagcagtgctggagccgtccccatcgccgagcagctcgtgagggtaattcaagcacgctaatgcagtctggtcctacaatagcgatccttggtcttcacctacatcttcacctaccgaacatcaggt

SEQ ID NO: 16787 - DNA, 794 bp, Zea Mays
aaagagtaaaaaaccgacagcgacagggcaaggagccagggccgctccgctccgctccgctcgtgctctgctcctgctctctctctctctcggcgtcgattgggcgaccgccgccgcctcccccaggtcttcgctgggcccgtcgccggcgccgagcacccaccagggcaagttttacttgataatgtggacatcaagacgttgcaattaaagcgacttagagaccagatcggattggtgaatcaggaacctactctttttgcaactacaattcttgagaatattctttttggcaaacctgaggcgacaaaggcagaggttgggtctacgactacttccgcagtagattaaaggagccctagctttcggaggacaacccagatgccttcaaagttcaaaatgacggtgatgaaggcgctgaaccgcgctggtggcaaggctggaaacaagggtgctgaagctgctcttacttccattgagatggcctctctgttccggcatcacttaggctgacactttgcatattctggtttctatacacgagctcacaagacatgtttctaaacctggcacaatgaataattgtcaccatgaggtcatgaataagcacaactgtcacggcgtgtgctagggcagtggggctgtcgccaaggacatgcagcttgtgaagcagtgctggagccgtccccatcgccgagcagctcgtgagggtaattcaagcacgctaatgcagtctggtcctacaatagcgatccttggtcttcacctacatcttcacctaccgaacatcaggt

SEQ ID NO: 16788 - DNA, 650 bp, Zea Mays
aaaagagtaaaaaaccgacagcgacagggcaaggagccagggccgctccgctccgctccgctcgtgctctgctcctgctctctctctctctcggcgtcgattgggcgaccgccgccgcctcccccaggtcttcgctgggcccgtcgccggcgccgagcacccaccagggcaagttttacttgataatgtggacatcaagacgttgcaattaaagcgacttagagaccagatcggattggtgaatcaggaacctactctttttgcaactacaattcttgagaatattctttttggcaaacctgaggcgacaaaggcagaggttgggtctacgactacttccgcagttttctcctaaacacatttgctctgatgttgtttgtcaccataactggcgctgaaccgcgctggtggcaaggctggaaacaagggtgctgaagctgctcttacttccccgctgctccagcacaactgtcacggcgtgtgctagggcagtggggctgtcgccaaggacatgcagcttgtgaagcagtgctggagccgtccccatcgccgagcagctcgtgagggtaattcaagcacgctaatgcagtctggtcctacaatagcgatccttggtcttcacctacatcttcacctaccgaacatcaggt

SEQ ID NO: 16789 - DNA, 667 bp, Zea Mays
ctgaaagtttcttgtgttgggagaggactaatgggttacattagggataaggttaatcaggggcaagttttacttgataatgtggacatcaagacgttgcaattaaagcgacttagagaccagatcggattggtgaatcaggaacctactctttttgcaactacaattcttgagaatattctttttggcaaacctgaggcgacaaaggcagaggttgggtctacgactacttccgcagaatccttcatttcttgttttgtagttttctcctaaacacatttgctctgatgttgtttgtcaccataactgtagattaaaggagccctagctttcggaggacaacccagatgccttcaaagttcaaaatgacggtgatgaaggtggacaagaaacaaaattttggatggttcaaaattttgctataggtcctagcaacgcttatgtgttgctataggggggttattttgtagtgaactcccaggccatatgctagcttactttgaggagtgcccactatttgtgcatgctacaggcgctatcattacatttccatgacctgtaaagtggtgacatctttaaatacagaatggccacattagcgaaccagaggtttcacacgagtattcccttgtgatgagaaagtcccatgtcaataatgtgacttctt

SEQ ID NO: 16790 - DNA, 608 bp, Zea Mays
ctttatgtattgtttcttttcaatcaggcaagttttacttgataatgtggacatcaagacgttgcaattaaagcgacttagagaccagatcggattggtgaatcaggaacctactctttttgcaactacaattcttgagaatattctttttggcaaacctgaggcgacaaaggcagaggttgggtctacgactacttccgcagttttctcctaaacacatttgctctgatgttgtttgtcaccataactgtagattaaaggagccctagctttcggaggacaacccagatgccttcaaagttcaaaatgacggtgatgaaggtggacaagaaacaaaattttggatggttcaaaattttgctataggtcctagcaacgcttatgtgttgctataggggggttattttgtagtgaactcccaggccatatgctagcttactttgaggagtgcccactatttgtgcatgctacaggcgctatcattacatttccatgacctgtaaagtggtgacatctttaaatacagaatggccacattagcgaaccagaggtttcacacgagtattcccttgtgatgagaaagtcccatgtcaataatgtgacttctt

SEQ ID NO: 16791 - DNA, 1610 bp, Zea Mays
cctttgtaatggcatgattcagtttaagatattgtgattgtagtacttttgggcaggggataaaacaatttttgttatggctgatctgttagccctaaggaatttgttactgctttttaggaattatatatactagttatagatgagcaaatgaattagcacacctggataatgtatgcttctattgcctaagctgcatctccatacaaagttagtaattagcagacccctatttaatatgtttggttcgaatcttacactggtcttgcattgtcttatgcatggcacatggcagtatgatcagtgactcagttttactttgaaattaagctacttgcaggtacatggtagttgctttttgctgggtgagtgatatgcgtggcacatggctttatgtattgtttcttttcaatcagtgagtgatatttcttgaattctcttaaaacttcattaggatctttgaggtttgatgcaacagctgaagtttagttttctatttataccactggaacttcgtcccgttcagttcctgataagctaagtgcttgtccctgaaatagaatttgtaatcaacaaaccagtcacatgtttgttgcattcttcaggatgaaactgagcccgctatgtattctttttcactgtttataattgttgtttcctaatatactactgtgaatgcttgttctttgtttattttcgtatattgttaattcctaatatacataatttccccaaataacatgataataaatatcggaaaagtggagaactgaacgacaatgtttagcgcaatggtgaacagtgctttatagttggcattaatcttagttcctacatgttgttaatatgtagtctatatactttgattattttttattgattacaaaatattgggaggaccataataattttgaaaaaaatgcttggattgtttctgaggatttgggcttggaaaggcgtaagaaatctgaaagtttcttgtgttgggagaggactaatgggttacattagggataaggttaatcaggggcaagttttacttgataatgtggacatcaagacgttgcaattaaagcgacttagagaccagatcggattggtgaatcaggaacctactctttttgcaactacaattcttgagaatattctttttggcaaacctgaggcgacaaaggcagaggttgggtctacgactacttccgcagttttctcctaaacacatttgctctgatgttgtttgtcaccataactgtagattaaaggagccctagctttcggaggacaacccagatgccttcaaagttcaaaatgacggtgatgaaggtggacaagaaacaaaattttggatggttcaaaattttgctataggtcctagcaacgcttatgtgttgctataggggggttattttgtagtgaactcccaggccatatgctagcttactttgaggagtgcccactatttgtgcatgctacaggcgctatcattacatttccatgacctgtaaagtggtgacatctttaaatacagaatggccacattagcgaaccagaggtttcacacgagtattcccttgtgatgagaaagtcccatgtcaataatgtgacttctt

SEQ ID NO: 16792 - DNA, 1629 bp, Zea Mays
agcaaacctaggtaacgtgtgatattgcctaagctgcatctccacacaaagttactaattgttttgcctttgtaatggcatgattcagtttaagatattgtgattgtagtacttttgggcaggggataaaacaatttttgttatggctgatctgttagccctaaggaatttgttactgctttttaggaattatatatactagttatagatgagcaaatgaattagcacacctggataatgtatgcttctattgcctaagctgcatctccatacaaagttagtaattagcagacccctatttaatatgtttggttcgaatcttacactggtcttgcattgtcttatgcatggcacatggcagtatgatcagtgactcagttttactttgaaattaagctacttgcaggtacatggtagttgctttttgctgggtgagtgatatgcgtggcacatggctttatgtattgtttcttttcaatcagtgagtgatatttcttgaattctcttaaaacttcattaggatctttgaggtttgatgcaacagctgaagtttagttttctatttataccactggaacttcgtcccgttcagttcctgataagctaagtgcttgtccctgaaatagaatttgtaatcaacaaaccagtcacatgtttgttgcattcttcaggatgaaactgagcccgctatgtattctttttcactgtttataattgttgtttcctaatatactactgtgaatgcttgttctttgtttattttcgtatattgttaattcctaatatacataatttccccaaataacatgataataaatatcggaaaagtggagaactgaacgacaatgtttagcgcaatggtgaacagtgctttatagttggcattaatcttagttcctacatgttgttaatatgtagtctatatactttgattattttttattgattacaaaatattgggaggaccataataattttgaaaaaaatgcttggattgtttctgaggatttgggcttggaaaggcgtaagaaatctgaaagtttcttgtgttgggagaggactaatgggttacattagggataaggttaatcaggggcaagttttacttgataatgtggacatcaagacgttgcaattaaagcgacttagagaccagatcggattggtgaatcaggaacctactctttttgcaactacaattcttgagaatattctttttggcaaacctgaggcgacaaaggcagaggttgggtctacgactacttccgcagtagattaaaggagccctagctttcggaggacaacccagatgccttcaaagttcaaaatgacggtgatgaaggtggacaagaaacaaaattttggatggttcaaaattttgctataggtcctagcaacgcttatgtgttgctataggggggttattttgtagtgaactcccaggccatatgctagcttactttgaggagtgcccactatttgtgcatgctacaggcgctatcattacatttccatgacctgtaaagtggtgacatctttaaatacagaatggccacattagcgaaccagaggtttcacacgagtattcccttgtgatgagaaagtcccatgtcaataatgtgacttctt

SEQ ID NO: 16793 - DNA, 731 bp, Zea Mays
cctgccgccatctccttcccctgtcgtcgtatagatgagcaactgaattagcaaacctaggatttgggcttggaaaggcgtaagaaatctgaaagtttcttgtgttgggagaggactaatgggttacattagggataaggttaatcaggggcaagttttacttgataatgtggacatcaagacgttgcaattaaagcgacttagagaccagatcggattggtgaatcaggaacctactctttttgcaactacaattcttgagaatattctttttggcaaacctgaggcgacaaaggcagaggttgggtctacgactacttccgcagttttctcctaaacacatttgctctgatgttgtttgtcaccataactgtagattaaaggagccctagctttcggaggacaacccagatgccttcaaagttcaaaatgacggtgatgaaggtggacaagaaacaaaattttggatggttcaaaattttgctataggtcctagcaacgcttatgtgttgctataggggggttattttgtagtgaactcccaggccatatgctagcttactttgaggagtgcccactatttgtgcatgctacaggcgctatcattacatttccatgacctgtaaagtggtgacatctttaaatacagaatggccacattagcgaaccagaggtttcacacgagtattcccttgtgatgagaaagtcccatgtcaataatgtgacttctt

SEQ ID NO: 16794 - DNA, 1429 bp, Zea Mays
aaaaaaccgacagcgacagggcaaggagccagggccgctccgctccgctccgctcgtgctctgctcctgctctctctctctctcggcgtcgattgggcgaccgccgccgcctcccccaggtcttcgctgggcccgtcgccggcgccgagcacccaccaggtacatggtagttgctttttgctgggtgagtgatatgcgtggcacatggctttatgtattgtttcttttcaatcagtgagtgatatttcttgaattctcttaaaacttcattaggatctttgaggtttgatgcaacagctgaagtttagttttctatttataccactggaacttcgtcccgttcagttcctgataagctaagtgcttgtccctgaaatagaatttgtaatcaacaaaccagtcacatgtttgttgcattcttcaggatgaaactgagcccgctatgtattctttttcactgtttataattgttgtttcctaatatactactgtgaatgcttgttctttgtttattttcgtatattgttaattcctaatatacataatttccccaaataacatgataataaatatcggaaaagtggagaactgaacgacaatgtttagcgcaatggtgaacagtgctttatagttggcattaatcttagttcctacatgttgttaatatgtagtctatatactttgattattttttattgattacaaaatattgggaggaccataataattttgaaaaaaatgcttggattgtttctgaggatttgggcttggaaaggcgtaagaaatctgaaagtttcttgtgttgggagaggactaatgggttacattagggataaggttaatcaggggcaagttttacttgataatgtggacatcaagacgttgcaattaaagcgacttagagaccagatcggattggtgaatcaggaacctactctttttgcaactacaattcttgagaatattctttttggcaaacctgaggcgacaaaggcagaggttgggtctacgactacttccgcagttttctcctaaacacatttgctctgatgttgtttgtcaccataactgtagattaaaggagccctagctttcggaggacaacccagatgccttcaaagttcaaaatgacggtgatgaaggtggacaagaaacaaaattttggatggttcaaaattttgctataggtcctagcaacgcttatgtgttgctataggggggttattttgtagtgaactcccaggccatatgctagcttactttgaggagtgcccactatttgtgcatgctacaggcgctatcattacatttccatgacctgtaaagtggtgacatctttaaatacagaatggccacattagcgaaccagaggtttcacacgagtattcccttgtgatgagaaagtcccatgtcaataatgtgacttctt

SEQ ID NO: 16795 - DNA, 749 bp, Zea Mays
aaaagagtaaaaaaccgacagcgacagggcaaggagccagggccgctccgctccgctccgctcgtgctctgctcctgctctctctctctctcggcgtcgattgggcgaccgccgccgcctcccccaggtcttcgctgggcccgtcgccggcgccgagcacccaccagggcaagttttacttgataatgtggacatcaagacgttgcaattaaagcgacttagagaccagatcggattggtgaatcaggaacctactctttttgcaactacaattcttgagaatattctttttggcaaacctgaggcgacaaaggcagaggttgggtctacgactacttccgcagttttctcctaaacacatttgctctgatgttgtttgtcaccataactgtagattaaaggagccctagctttcggaggacaacccagatgccttcaaagttcaaaatgacggtgatgaaggtggacaagaaacaaaattttggatggttcaaaattttgctataggtcctagcaacgcttatgtgttgctataggggggttattttgtagtgaactcccaggccatatgctagcttactttgaggagtgcccactatttgtgcatgctacaggcgctatcattacatttccatgacctgtaaagtggtgacatctttaaatacagaatggccacattagcgaaccagaggtttcacacgagtattcccttgtgatgagaaagtcccatgtcaataatgtgacttctt

SEQ ID NO: 16796 - DNA, 765 bp, Zea Mays
gttgatgccgctcgtgccgccgctgttgctgcggcggaggcaagatgcgcggctgtagtggctgagaaggaggctcgagcggcggtccaatctgcgacaattgccgccgataaagttggactagctgtcgaagctgtcaagtatcgaagctttgtcgaagaaaactccatggaacatgttgatttaaagtatcacattagcgtaaagaactcactacggtataccattcaagagatgaggaggcaatcttcactgttacgtaccattaatgggttgtgttgtagtatcccagaagttgaagggggtaaggtaggaaagctagctggccatttgaaggaagtctgcaagggcctcgagaagacttcaagtatatgtcaagaagatctggagaataaatgtcctggttgggaccttcacaatcccccttcagatgttgaagacaacagccacccttctgatgttgaggacgcaatggatggttacgtgtcagaagatccggagttgtggcaaatggtgtttgatgacctgcagtgggaggagaataaagtggctgtctctttggccgagcattgtcgtattatgggctacgactatgaccagatgtttgatcgtactatttgagttgtcaagactattagtatgcagacttttgtgatgtcaagacattctgtttctgtcaagacataatgttatgaacttttaatctggtcatatggcagtgtttatgtaagactctctatgtggttgtaacagattttgtggtca

SEQ ID NO: 16797 - DNA, 1007 bp, Zea Mays
tgagggacttgggtatcctatgacgaccacacctgcgccttcaaaagggtcgagatgcatgtaacctcaaactgcgccagtagcataccataccatagaagctgaagagaccaaggacaaggacgacctgccttgcatggcgcaatcggtgaaaatattgtgtaaggatggcttcaacttgtacgtcaccattcgtggcaataaggccgttcttgcccctgaagatcccgacgacgaaatgcaggaatggttcaaggactactccagggtaagcagtgtgacggatgacaacggtcaaagggtgttcgcgctggtaaacaaggagacgcaacaagccatggtaaacagaagggacgagcaggaggtaataattaatacagggtcgtcatacatgcatggtcgctgtcaggattattttctctaactcagggagtgtttgcttactagagactaatttttagtccctccattatattctactttagtctataaattgtaaaatacggaaactataactctatttttatttccgtatttgacaatttagtaactaaagtggaataaaataaagagactaaaaattagtccctaaaaccaaacaccccatcatttgcttctctgtgttacggatcgaccaggtgcaacttgttccatattacaaagatgacgaccgtgtggatatctccatgctttggacagagctcccagaggaccacggcgacggctttcaccaaattgcagcgctcaagaacacatatgaggccctggacgggctaggcggcaattgcaaagaggggacgatcgttgggatagatcctacgcattattcatatctcggaactgttaataagaatcagctgtggaagatcgttgataaagggaccgctaggcgcttgaccaaagagctaggactaggaggagcgcgtctaaaaaagttggctcccatttctttacgtaactaataaaacttcacaatataataaaatttatgctctgtgttgtgctaa

SEQ ID NO: 16798 - DNA, 672 bp, Zea Mays
tgagggacttgggtatcctatgacgaccacacctgcgccttcaaaagggtcgagatgcatgtaacctcaaactgcgccagtagcataccataccatagaagctgaagagaccaaggacaaggacgacctgccttgcatggcgcaatcggtgaaaatattgtgtaaggatggcttcaacttgtacgtcaccattcgtggcaataaggccgttcttgcccctgaagatcccgacgacgaaatgcaggaatggttcaaggactactccagggtaagcagtgtgacggatgacaacggtcaaagggtgttcgcgctggtaaacaaggagacgcaacaagccatggtaaacagaagggacgagcaggagagctcccagaggaccacggcgacggctttcaccaaattgcagcgctcaagaacacatatgaggccctggacgggctaggcggcaattgcaaagaggggacgatcgttgggatagatcctacgcattattcatatctcggaactgttaataagaatcagctgtggaagatcgttgataaagggaccgctaggcgcttgaccaaagagctaggactaggaggagcgcgtctaaaaaagttggctcccatttctttacgtaactaataaaacttcacaatataataaaatttatgctctgtgttgtgctaa

SEQ ID NO: 16799 - DNA, 1265 bp, Zea Mays
cctggataatgaatttatcaacgtcttgatgctttcattatcccaagcccattttctttttttgtaaaaacatgagtcatagatcaaaaatatgtttcttaatctatcagcaagactaagcatctctagcttttataaaacgggtgacaaggtgtggtaatcaacctttcaaggatggtaatgcatcaagtgtttaatcactcaactcctatcacctaatgcagcatataagtgataaaattttgtaaacacaaggaaggtggcaaatgcaccggggcttgcctggtataacactacgttagtgttgttaaatgatactcgcttgacgagcaccccccatcctggcatttggttgattcatccactttagtttcgtccatcagcatcgtcttatgatcaatccatctcttgtcctccataccatgcgattagttaacgtaccacgactaaactcgactcgactccgcgagatcgacaaccgcatccggttgaagcgattcaccaagcacttggcaagcgcctcgctaaagctttcttctcatctaaatttcctaggatttacctccaccacaaacacacaaacatatacagtaaataatcaaatataggaatcggtggggaataaacaggacacaagcagttggtctcacctgggctatagagatctggcatgttgctgctgcgcctagtattaatcagggaaaggagaggagcgaccatggataagactggagcagggacgcgtgtgagacaaggagcaggggcgtgacgaagggagctcggcacggacaaaatccgagcagcgaccggacaccatggacgagcaggggagggagacgaccgtgggagagagagagagctcggccatcatggaggtgggggctggacaaccatgggacatgctggaggaaacgccggcgagcaccacggagcagggaaccggcgcgccagcaggggagctccacggcgagcgaacagcgcctgcgcgcgatggagggggaggtgagaacgagtgcctgctgtcgtgtggagaaaatacgtgaaggagacgtgtccctggtaacaaaattttgggtacaactagttacgaagggtatggaactggtacagcggtgggatttttttctccacggaagacacatacgataaggataagggaagacatgagctagaatttcaaatatcagacattgactggaacttgtgagaagcaacatagataatggataaagaattggaagagcggtggaaagataagaccaaat

SEQ ID NO: 16800 - DNA, 1797 bp, Zea Mays
tcaactctatccagtttcctgtctctttcgtattgttttcccagaaatggaccggatgtgatttgtattcgttttatccctaaatctgagtttagggggattttttagggaaataatggaggtgctgtaagtatcccttccgtctgtctctccctcactcccttggcgacgactacgcccggtgctcttcttcggccccaggtagctttcgctgccgtcctacggcaggtgcccaagtcttcttcggtcccttcaacgacgacgagcactaccagctcccatgacaaaggatgccgatcctatatatgtgatacaagctataggcattcaaattgcctagataggttcaagaaaatgaaagtgaatgatgaggacagtccttcacagccaagctcgtccatgcctaggggtacaggaaaccaaaatgttgtccagagatctcgttttggtctcactagagagagccccaggctacacatagacatatctgtacccgatgaaacttccgatcatcaagatgccagccatagacctgctgccatagttggagaacaggaagaaaacatctacaatgaaggcccagatttgacattggaaactcacgaggttgggatcaatggttcttcagtgtcaagtgacgtgtcaagcttaaaccaattgttgtgcccactgtgcagaggggcggttagtggctggaagatcatcaaagaagctagacagtatttggatgggaaatccagagcttgctcacgagaagcctgcatgttttctggtaactacagggagatccgtagacatgccagaagggtgcaccccacaacaaggcctgctgatgttgatccctcaagacgtcgtgcgtggcaccacctggagcatcagcgggattatgctgacatagtaagcgcaataaggtccgctatgcctggggcagttgtgcttggtgattatgctattgaaggcggagaaatattttcacatgaccgggaaaccagtgaaccaagtgggtctcttctgacaacattctttctatttcatatgctcagcagtagtccgattagatcaggtgatgagccaagaggcacatcaaggggcctgagaaggcagaggagacgctatctgtggggagagaatttgttaggtctccaatatgatgatgatgatgacgacgacgataacgaaggggaggaggatgaagtggatgctgtggatgaagttcagagaccaaggagtcgtcggaggttcataagatcaagatcagaggagcgggcctaatacattggtacctgtggtaattacattctgtactgctgtgaagttctattaccatgaactcatgatgactccttgcatgatctttgcatgccagtggagatgtggatgatgtgcttccttgcttggttaaaatgctgtgcgcatccctgcaatcaaagaccaaaaggcaaatggacctcaagttcaagtttagatgatttggatgcgtctgacaccatccatgtgccctctttaatctgacgatcataagaaacactcattcttagggcaaagctggactgctctcagaccagaactgacatggaagctagcgtttggagatgctcgctccatcacaacagctggtgccgtcactcattcaccatgcctttttacctttgcactgcgtgtcatctgcatctatagtatattcttcccgtattacgtctcattgagtccatgctgctactgttctggttgatatccttgttcaaaggctataaaatttattatattttcatgtgatgatgttgtaatgctctataa

SEQ ID NO: 16801 - DNA, 4939 bp, Zea Mays
aaatctgtttgggcgactgtggaattcagaaatcaggaggcgactgcgacatacgacgaagccggcacacgcagacgcaccggcctcctcttctcgctcgtctgcttctcttttgctcgttttaaccctcgctcgcgtcgcctcctcctccgccgcacccggctgctgcctctgagcctgcccccgccacctcggcgccctggtcgccgccggagcgccgcctcaacgtctcgatcccggttctacgtgatgcagccgccgatgggtaacgagaggccgccgcctcccggtcgcactgtctcagccttcgtgcccggcgccgctgtcccgcctccaccgtttgccgccggtggcccgttcgccccgccgccgtggcagggagtgccgcctcctcagtctggtgctgcggcgcctcatttcggggctgtgccacccgccgcaatgggtgggttcaggggtccaccgtcgtcacagggcccctttggtgctggcacaccgccccagcgccctttcacttccgcgccaccgcctcagagccctttcacctccgcgccaccgtctcagggcccctttgcctccgctccaccgtcgcaggtcccttttgcctccgctcaaccgtctcagagtccttttacgtctcctccacagtctcagggcccattcgctgctggaccgccgcctacgggcccttttgctgctacaccagcaccttttcgctctccgctgtcatcccttgcgcagccacaatctccaacgcaaggcgctttgcctccaccaccaacatatgcgaggccgctgtcacaaccactacaggcgcaagggtattaccctggtgcaccaccttcgaaccctcaatttccgatgtcaaggccagcatttcaacaacctgtgcagaatatgccacctcctccaatggggtcagctgccacatttggtaaccaggcagcttatcaaagtggcgggcctccagttggaggcacacttcagagtttagtggaggacttccagtcgttgtcactgagttctgtgcctgggtcacttgatcctggtgttgatgtaaaagggctgccaaggccattggatggtgatgaggagccagttaagcttatagagtcatacccatttaattgccacccaaggtacttcaggctgacaacccatgcgattccggcatctcagtcattggtctccaggtggcatttgcctcttggagctgtggtacatcctcttgcagaatcacctgacggggaggaagtgccagttatcaactttgggtccgccggtgtcattcgctgtcgaagatgtaggacgtatataaatccttatgcaacatttgcagatgctggaaggaaatggcgctgcaatctttgtacattgctcaatgacgttcctggagagtacttttgtgctcttgatgctagtggcaggaggtacgatactgatcaaagacctgaactctctaagggaactgtagagtttgttgctccaacagaatatatggtgcggccaccgatgccgccgtcctatttctttcttattgacgtgtcagtgtctgcagttcgaagcggattgcttgagattgttgcaaagaccataaaatcatgcctcgatgaacttccaggctttccgcgaacacagattggattcttaacatttgacagtaccttgcattttcataacttcaagtcttctttgtcacaacctcaaatgatggtggttgctgatttggatgatgtttttctgccattgcctgatgacctcttggttaatttggtcgactcaagacatgttgtggaatcatttcttgatagcttgccaaatatgttccatgacaatgtaaatgtggagtctgctcttggtccagcacttaaagcagctttcatggttatgagtcaaattggggggaagttgcttgtcttccagagtactttgccatctcttggtattggtcgtttgagacttcgaggagatgatgttcgtgcgtatggaacagacaaggagcatactctgagggtacctgaagatcccttctacaaacagatggctgctgaattcacaaaaaatcagatcgcagtggacatattttctttcagtgagaagtactctgatatagcttctttggggtctttggctaagtatactggtggtcaggtgtaccattatccatcattccaggcacctacacatgaagacaaacttaaacttgagcttagtagggaccttacacgagagactgcctgggaatctgttatgcgtatcagatgtggaaaaggagtacggttcacaacctatcatggtcatttcatgctacgatccacagacctgttagcccttccagctgttgactctgataaagcttttgcaatgcaattgtcgctagaggagacattaatgaccacccaaactgtatacttccaagtggcattgctatacacatcatcctctggtgaaaggcgtatcagggtccacacagcagctgcacctgtggtcacagatcttagtgaaatgtaccgtcaagcagatacgggtgccattgtgtcattgttgggtagaattgcggttgaaaattcactgtctgataagctggacagtgtccggcagcagttacagttaaagcttgtcagaagtttgaaggaataccgcaatttatatgttgtacaacaccggataggcgggagactgatttttcctgaatccctaaagtttttgccattatacatcctggctatctgcaaaactcttgctcttcgtggaggttatgccgatgtttctcttgatgaacgatgtgctgctggttttagcatgatgatattgcctgtaaaaaggctgctcaattttatctatccttctttgtacagagtcgatgaagtattaacaatggtatgttgttccttcccactaagctgacttagttgctgttagccaatgttgtttgtggatttcccacgcccaaaccacccaaaccaagtctgagacagaaaaaaaggatttccagtatgttcacttgcacaagatctgtttattctgttgaaatagtttcacaagtcatatcacgcttttaaaatgaatttcttttatagtttaaaatgtgataatcagacatttttagcttaattgcactatgatatatcatttgatcagctatattcctggtatgtttaagtgtatccttttttttggtttaagcaaatttaccacacactaatcaaaagattcaaaacgatcttttgtgttttgcaggaaccaaataagattgatggttggttgaaacgcttgccattaacgtttcagtgtttagatacgggaggtttgtacctccttgatgatggcttcactttcttagtgtggttaggaaggatgctcccacctgaacttgtgaacaacattcttggagtgagcttggcaaacttccctgacctatctaagattctattgagagagtgtgacaatgagttatcaagaaatttcatgaaaatactaagatacctgcgggagaaggatccttcttatcaccagctatcccttgtggtgcgacagggtgaacagccaagagaaagctatctgcttctatctaaccttgttgaggaccagatggctggaacaagtagttacgttgattggatacagcaaattcaccgtcaaacacaaagctaatgacgaaataccaacaggaagctatgcctgaaatttttgcctactgtaagctgctgcagggcgtagattcagttgctgccagttccaagtcaatctcgcaaccccttggagatcttattcacaacccagctgtccagtatgccaccatagtgggaatacagctgttgtattggaataagtaggcagcaaatgcggtgggtatattatacaactggggtcgtgtagtgtggcctgtgcgttctttcctgatgaattctagtcgggttcagttacatggcatttgggttataaaaagttcatcgtgtaaactaatttttggctattttagtctgtttgtaatgggagatctcatttaatttaatgtcattccgttattaaagttacttccgtatactgaatttttagaccgcatgatccttcatttgtggtttatataaccagtaaaacttgtagttttggtgaatattcatttctatgcatcttaagttctgaaattaattttcaagataaataatctgtgtaattgttatggactgccatgggacgggggaattgtagagggtgttgtagttgtaggaatggcggtcgggggtctcttcctaaggccgggcaagaaggcggtttgtttctaattattgcttatttttaactgatacaatagaggctattgacttatctttatccaattaactaaatctgatctaattattatccatccctaactaatcaaatttttatcaacaaatttgatctaattcttatctctttcctaactaatctgatccaaatctaatctaatctcggtattgttcacgagctatagtaaccgcgtgaacaatgtctttctgacactacaccctacttggacatacagctcgacctcgagctgcaacctaacaatgactctgctagacataaacctaacacctaaaaataagccttttatatcttggtttattttattatttcgaacttgaattagacaatgactctttatttttttgactccttaagataaggcgaacacccttcatgcatatgatctacacgtgtgcagccatctggatcccgtggacgctatctggacgaaaggggagcacgtggatgaccacttgaaataggtcgcaacaaagaccaacggaagcaccctcgtggtggccgatagtagaatgtggtggtgctaggtagtgcgccctcgcagattacaaggaggggagcgacttccctgtcgtcgttgccgtagagttggaattcatcgcccacaggacaccatgctcacgcttgg

SEQ ID NO: 16802 - DNA, 3570 bp, Zea Mays
aaatctgtttgggcgactgtggaattcagaaatcaggaggcgactgcgacatacgacgaagccggcacacgcagacgcaccggcctcctcttctcgctcgtctgcttctcttttgctcgttttaaccctcgctcgcgtcgcctcctcctccgccgcacccggctgctgcctctgagcctgcccccgccacctcggcgccctggtcgccgccggagcgccgcctcaacgtctcgatcccggaggaagtgccagttatcaactttgggtccgccggtgtcattcgctgtcgaagatgtaggacgtatataaatccttatgcaacatttgcagatgctggaaggaaatggcgctgcaatctttgtacattgctcaatgacgttcctggagagtacttttgtgctcttgatgctagtggcaggaggtacgatactgatcaaagacctgaactctctaagggaactgtagagtttgttgctccaacagaatatatggtgcggccaccgatgccgccgtcctatttctttcttattgacgtgtcagtgtctgcagttcgaagcggattgcttgagattgttgcaaagaccataaaatcatgcctcgatgaacttccaggctttccgcgaacacagattggattcttaacatttgacagtaccttgcattttcataacttcaagtcttctttgtcacaacctcaaatgatggtggttgctgatttggatgatgtttttctgccattgcctgatgacctcttggttaatttggtcgactcaagacatgttgtggaatcatttcttgatagcttgccaaatatgttccatgacaatgtaaatgtggagtctgctcttggtccagcacttaaagcagctttcatggttatgagtcaaattggggggaagttgcttgtcttccagagtactttgccatctcttggtattggtcgtttgagacttcgaggagatgatgttcgtgcgtatggaacagacaaggagcatactctgagggtacctgaagatcccttctacaaacagatggctgctgaattcacaaaaaatcagatcgcagtggacatattttctttcagtgagaagtactctgatatagcttctttggggtctttggctaagtatactggtggtcaggtgtaccattatccatcattccaggcacctacacatgaagacaaacttaaacttgagcttagtagggaccttacacgagagactgcctgggaatctgttatgcgtatcagatgtggaaaaggagtacggttcacaacctatcatggtcatttcatgctacgatccacagacctgttagcccttccagctgttgactctgataaagcttttgcaatgcaattgtcgctagaggagacattaatgaccacccaaactgtatacttccaagtggcattgctatacacatcatcctctggtgaaaggcgtatcagggtccacacagcagctgcacctgtggtcacagatcttagtgaaatgtaccgtcaagcagatacgggtgccattgtgtcattgttgggtagaattgcggttgaaaattcactgtctgataagctggacagtgtccggcagcagttacagttaaagcttgtcagaagtttgaaggaataccgcaatttatatgttgtacaacaccggataggcgggagactgatttttcctgaatccctaaagtttttgccattatacatcctggctatctgcaaaactcttgctcttcgtggaggttatgccgatgtttctcttgatgaacgatgtgctgctggttttagcatgatgatattgcctgtaaaaaggctgctcaattttatctatccttctttgtacagagtcgatgaagtattaacaatggaaccaaataagattgatggttggttgaaacgcttgccattaacgtttcagtgtttagatacgggaggtttgtacctccttgatgatggcttcactttcttagtgtggttaggaaggatgctcccacctgaacttgtgaacaacattcttggagtgagcttggcaaacttccctgacctatctaagattctattgagagagtgtgacaatgagttatcaagaaatttcatgaaaatactaagatacctgcgggagaaggatccttcttatcaccagctatcccttgtggtgcgacagggtgaacagccaagagaaagctatctgcttctatctaaccttgttgaggaccagatggctggaacaagtagttacgttgattggatacagcaaattcaccgtcaaacacaaagctaatgacgaaataccaacaggaagctatgcctgaaatttttgcctactgtaagctgctgcagggcgtagattcagttgctgccagttccaagtcaatctcgcaaccccttggagatcttattcacaacccagctgtccagtatgccaccatagtgggaatacagctgttgtattggaataagtaggcagcaaatgcggtgggtatattatacaactggggtcgtgtagtgtggcctgtgcgttctttcctgatgaattctagtcgggttcagttacatggcatttgggttataaaaagttcatcgtgtaaactaatttttggctattttagtctgtttgtaatgggagatctcatttaatttaatgtcattccgttattaaagttacttccgtatactgaatttttagaccgcatgatccttcatttgtggtttatataaccagtaaaacttgtagttttggtgaatattcatttctatgcatcttaagttctgaaattaattttcaagataaataatctgtgtaattgttatggactgccatgggacgggggaattgtagagggtgttgtagttgtaggaatggcggtcgggggtctcttcctaaggccgggcaagaaggcggtttgtttctaattattgcttatttttaactgatacaatagaggctattgacttatctttatccaattaactaaatctgatctaattattatccatccctaactaatcaaatttttatcaacaaatttgatctaattcttatctctttcctaactaatctgatccaaatctaatctaatctcggtattgttcacgagctatagtaaccgcgtgaacaatgtctttctgacactacaccctacttggacatacagctcgacctcgagctgcaacctaacaatgactctgctagacataaacctaacacctaaaaataagccttttatatcttggtttattttattatttcgaacttgaattagacaatgactctttatttttttgactccttaagataaggcgaacacccttcatgcatatgatctacacgtgtgcagccatctggatcccgtggacgctatctggacgaaaggggagcacgtggatgaccacttgaaataggtcgcaacaaagaccaacggaagcaccctcgtggtggccgatagtagaatgtggtggtgctaggtagtgcgccctcgcagattacaaggaggggagcgacttccctgtcgtcgttgccgtagagttggaattcatcgcccacaggacaccatgctcacgcttgg

SEQ ID NO: 16803 - DNA, 2287 bp, Zea Mays
cttcgcccgcgcccgcggatcccctcgcctcgcgatcgccaccacagaccacaccaacaatcccctcccttctccccggggccgggcttgtcttcttcctcccgattcgttttctttttcttttcttccgctgctgcaaaatctcgcgctggcgcggcccgaggccagaggactccgatccttatccctcacgcatctcccgcctcgcctccgccacacgttccgcgcctctacagctctcgacctcgtctggatttttttccccgacccgattttcgcatcagctccttctgcccaccgggctcgtctcctcccctggtttctttttcgtcacttgtcaccgctagttcctttagagaaggtgtacccccattattccattagcggcctcactgacgagagagattttggcgtgactatccagagtctccaatcttttacacccaaaactcttctcagctaccggtgcggcatatcgcccctgtcggcggcgaacatttgagttctcgcgacgtgtctcgaggattctgtggtggaagatcggatcttttgctgcggattccagttgccaaccaagatgtcggctctcctcgatctactgatggggatctttcgccagcagaccctcggcggcgccgccctggagctcgccgcgctggcggcgccgctctcgctcgccgcgctcgtcggccttctcatcgggtgggcgtggcgcccgaggtgggcgggggtcgtcacggtcgacaacgcccaacagatggcgcagctccccgcggcggcgcctcctccggaccgcgccaccgccaccgcggtggtctctcgcaacgaggcggccgccgtcgtaccgaggatttgctgcgccggtgtctgcagaactgtggtggctcatgcggcggccgaggacgagcagcagcagctggcggtcaacaccggtgacttgctgcacctctggcggctcgtcgacgagaaggacggtggcccgtcgtggattcacatgatggaccgcaccttaccaaccatgaggtaccaagcctggcggagagacccaccgagtggtccaccacagtaccgcagcagcacaatcttcgaggacgcgtcaccggaggttgtgagagatttcttctgggacgatgagttccggatgaagaacagctgggacgacatgcttcttcagcacgagacgctggaggagtgcaccgagactggaaccatggtggtccggtgggtcaggaagttcccgttcttctgcagcgacagggagtacatcataggccgcaggatatgggcgtctgggaagacattttactgtgtgaccaagggtgttcctcgtccctccgttccaagacaaaacaaacctcgccgtgtggacttgtactactctagctggtgcatccgtccagttgagtcgagaaaaggcgacggtgcaatgagtgcatgcgaggtgctcttgttccaccacgaagacatggggattccatgggagatcgcgaagcttggcgtccggcaggggatgtggggctgcgtcaagaggatagagcctggccttcgggcgtaccaggtcgggaggaccgccggagaggctgtttccaagtgtgctgccatggcacaggtcaccaccaggttcagtgccgacgagctcgtcatcgcagggccgggcaacacggaggccagttcttcttcgtccggcgacggcgcagaggttggcaaggtgacgaagcactgggcgaacagcatacccaaggttctcatggtcggtggcgctgtggccctggcctgctgcaccttcgacggtgggttgttgaccaaggccgtcatcttcggcactgccaggaggtttgcaggagggccaggaaggcggtaggtacggtgtaacggtggacggaaagatccagcggcacaacacaaaacaagtgttgctgcactgcagcccgctgcgggttaataggttagaaatatagcatttgttacgaggacacatatagaagtattatggaagaaaaccgctgttagataagaaatacactgctgtgtattagtagttaataacaagaattcttggtttttgtatgtaaccatattgtggatcggatccattgttcttccccatggacactactactaccagatcgatgttgaccttgtggcagttgctgcagtttttttttgacagagtgtgcttagaataagaaaatttttctccaaagtaggcaaagatttgaacgtatttattcattcattcatcgtgtcgccttctccatacaacatggcaggaaggtaggtacttggc

SEQ ID NO: 16804 - DNA, 2526 bp, Zea Mays
ctcgtgcccagccgtcacgcgctccgccggtccggggtcatccgtgtggaaccatcgctttccctgaccactccactccggctccggcagcaaggaaaacgagcgagtggagctgacgaaaccgagccgcggacggagaggagcccggaccagtgacctccgtccaccgcagaaaaaacacgaggacctcgcgcctccgcccgcagccacagtccagcagctccaggcccgcctgagtacctgaccagagagagctatatctacttcgcccgcgcccgcggatcccctcgcctcgcgatcgccaccacagaccacaccaacaatcccctcccttctccccggggccgggcttgtcttcttcctcccgattcgttttctttttcttttcttccgctgctgcaaaatctcgcgctggcgcggcccgaggccagaggactccgatccttatccctcacgcatctcccgcctcgcctccgccacacgttccgcgcctctacagctctcgacctcgtctggatttttttccccgacccgattttcgcatcagctccttctgcccaccgggctcgtctcctcccctggtttctttttcgtcacttgtcaccgctagttcctttagagaaggtgtacccccattattccattagcggcctcactgacgagagagattttggcgtgactatccagagtctccaatcttttacacccaaaactcttctcagctaccggtgcggcatatcgcccctgtcggcggcgaacatttgagttctcgcgacgtgtctcgaggattctgtggtggaagatcggatcttttgctgcggattccagttgccaaccaagatgtcggctctcctcgatctactgatggggatctttcgccagcagaccctcggcggcgccgccctggagctcgccgcgctggcggcgccgctctcgctcgccgcgctcgtcggccttctcatcgggtgggcgtggcgcccgaggtgggcgggggtcgtcacggtcgacaacgcccaacagatggcgcagctccccgcggcggcgcctcctccggaccgcgccaccgccaccgcggtggtctctcgcaacgaggcggccgccgtcgtaccgagaactgtggtggctcatgcggcggccgaggacgagcagcagcagctggcggtcaacaccggtgacttgctgcacctctggcggctcgtcgacgagaaggacggtggcccgtcgtggattcacatgatggaccgcaccttaccaaccatgaggtaccaagcctggcggagagacccaccgagtggtccaccacagtaccgcagcagcacaatcttcgaggacgcgtcaccggaggttgtgagagatttcttctgggacgatgagttccggatgaagaacagctgggacgacatgcttcttcagcacgagacgctggaggagtgcaccgagactggaaccatggtggtccggtgggtcaggaagttcccgttcttctgcagcgacagggagtacatcataggccgcaggatatgggcgtctgggaagacattttactgtgtgaccaagggtgttcctcgtccctccgttccaagacaaaacaaacctcgccgtgtggacttgtactactctagctggtgcatccgtccagttgagtcgagaaaaggcgacggtgcaatgagtgcatgcgaggtgctcttgttccaccacgaagacatggggattccatgggagatcgcgaagcttggcgtccggcaggggatgtggggctgcgtcaagaggatagagcctggccttcgggcgtaccaggtcgggaggaccgccggagaggctgtttccaagtgtgctgccatggcacaggtcaccaccaggttcagtgccgacgagctcgtcatcgcagggccgggcaacacggaggccagttcttcttcgtccggcgacggcgcagaggttggcaaggtgacgaagcactgggcgaacagcatacccaaggttctcatggtcggtggcgctgtggccctggcctgctgcaccttcgacggtgggttgttgaccaaggccgtcatcttcggcactgccaggaggtttgcaggagggccaggaaggcggtaggtacggtgtaacggtggacggaaagatccagcggcacaacacaaaacaagtgttgctgcactgcagcccgctgcgggttaataggttagaaatatagcatttgttacgaggacacatatagaagtattatggaagaaaaccgctgttagataagaaatacactgctgtgtattagtagttaataacaagaattcttggtttttgtatgtaaccatattgtggatcggatccattgttcttccccatggacactactactaccagatcgatgttgaccttgtggcagttgctgcagtttttttttgacagagtgtgcttagaataagaaaatttttctccaaagtaggcaaagatttgaacgtatttattcattcattcatcgtgtcgccttctccatacaacatggcaggaaggtaggtacttggc

SEQ ID NO: 16805 - DNA, 4261 bp, Zea Mays
atgaaattcatctgcctacgcccgccggtcgccagagcctggatccctgagggagaggcggagaagcagcagaccaggggctcagcttcatcatttcccaaaatccccaagctagtagacgaagagggtctcattggacgcttcggttcttcaaacaagaggaacatcaccatacttaagaatgtcaatggtatcctgaagccatccaggatgacgcttcttcttgggcctccatcctcagggaagagcacactaatgcgagcactcgctggcaaacttgacaaaaatctcaaggtctctggcagcattacgtattgtggccatccaatttcagaattctatcctgagaggactagcgcgtatgttggtcaatatgatctccacaatgccgagatgactgtaagggagacacttgatttctctaggcggtgcctaggcattggtgccagatatgagatgattacagaacttgctagaagggagcgggatgccggcattaagccagatcctgagattgatgctttcatgaaagctactgcagtacaaggacaggagactaatattataacagatctcactctcaaggtgcttgggctggacatttgtgctgatgttattattggtgatgagatgatcagaggaatttctggcgggcaaaagaaacgtgtgacaactggggagatgctaacagggccagcaacggctttatttatggacgaaatatccactggtttggatagctcgagcacatttcagattgtaaagtttatgaggcatttggtccatgtaatgaatgaaactgtcatgatctctctgctccagccaccgccagagacctacaatctttttgatgacataatcctgctatcagaaggatacatagtgtaccatgggccacgcgagaatatcctggaattctttgagtctgtcggtttccggtgccctgacaggaaaggtgtcgcagactttcttcaagaggttacttccaagaaagaccagcaacaatattggtatcttgatcaggagcaatatcattatgtatctgtacccgactttgcagaacgtttcaaatcattccatgcatgccaacagatgcagaaggagttgcaaataccttttgaaaagtccaaaacccatcctgctgcgttgaccaccaaaaaatatgggctttctagctgggaatcactcaaggcagtgatgtcaagggagcagctattgatgaagcgcaactctttcatctatattttcaaggtcacagtgttgatcatccttgcattcgtgtccatgactgtgtttctcagaacaaagatgccccatgggcaaattgctgatggcaccaaattctttggggccctgacttttggtttaataacgatcatgttcaatgggttcgctgagctacaattgaccataaagaagctaccagttttctacaaacatagggatttcttattcttccctgcatggacctttggagtggcaaacatactcttaaaagttcctatctcgctcgtggaatcagtagtatgggttgttctcacatactatgtgatgggctttgcacctgctgcaggaaggttctttcgtcagtttatagctttctttgccacacaccaaatggcaatggctttatttcggtttcttggtgctgttttgaaaacaatggttgtggccaatacttttgggatgtttgtgctgctcattattttcatttttggaggatttgtcatccgtagaaatgacattaaaccttggtggatctggggttattgggcatcacctatgatgtatagccaaaatgcaatatctatcaacgaattccttgctagtaggtgggctattccaaacaatgacacgactattgatgcaccaacagtaggcaaagcaattcttaaatccaaaggcttgtttactgaagaatggggattttggctttccattggagcccttataggattcattattttgttcaacagtctctacctttgggcccttacatatttaagtcctagtagtggctccaatgccctagtttcagaaggtgaagatgatgtaaatgaaatagcattgaaagaaagaagcagagatgcaagaagcgaagatgaaatatcccaagttgtatacggggatctaggtgcaaacacatgcactaatggagcaacaaacacactagttcagtcacgagtcactttgcctttccagcctctttcactttgctttaaccatgtaaactattacgtcgacatgcctgcggaaatgaaggaacaaggattcacagaaagccgtttacaactgctctctgatatcagtggtgcttttaggccaggggttctaacagcattagttggtgtgagtggagctggaaagaccactttaatggatgtcctggcaggaaggaaaactagtggagccattgaaggagatattaccctgtccggataccccaaaaaacaagaaacttttgcccggattagtggttattgtgaacaaaccgatatccattctccgaatgttactgtatttgaatccatcacgtactctgcatggttgcgtctttcctcggatattgatgatggtacgaaaaagatgtttgtggaggaagtgatggcccttgtagagcttgatgtgttgtgcgacgctcttgtgggtctccctggagttagtgggttatcaactgagcaaagaaaaaggctgacaattgctgtggagctggtagcaaacccttcgatcatcttcatggatgagccaacttctggtcttgatgctcgagctgctgcgattgtcatgcgtacagtaagaaatacggttaacactggacgtactgtggtctgcacaatccatcagccaagcatcgacatatttgagtcttttgatgagctactgcttttgaaacgtggaggtcaggttatttatgctggtgaacttggtcgccactctcacaaattagttgaatattttgaggcgattccaggtgttcaaaagatcacagaaggatataatcctgcaacatgggcgctggaagttagctctcctctatccgaggctcgattgaacatgaattttgctgaaatttatgctaactctgtgctttataggaaaaatcaagagctcatcaaggagttgagtgttccctcaccagactaccaggacctgtcattccctacaaaatattcgcagaatttctacaaccaatgcgccgcgaacttttggaagcaataccgttcctattggaagaatccgccctacaatgctatgcgctacctgatgacatttctcttcggccttgtatttggtacagtgttctggcaaaaaggaaagaacatagattcacagcaagatttatataatctactcggagccacttacgctgctaccttctttctgggggcttcaaatagcatcacggttcagcctgttgtatcaattgagcgagcagtgttctaccgtgagaaggcagcggggatgtactctccattatcctacgcatttgctcagacgtgcgtggaggtgatctacaccatcttacaggggatactgtacacagtcatcatatatgcgacgatcggatacgactggaaagcggataagttcttgtacttcctgtttttcatgaccgcgtgcttcaactacttcgggttgttcggcatgatgttggtagcgtgcactccctccgcattgctcgccaacattctcatcacgtttgctctgcctctttggaacctcttcgctggattcctcatcgttagaccggcaataccaatttggtggaggtggtactactgggcgaaccccgtgtcgtggaccatctacggcgttgttgcgtctcagttcggcgagaaccaaggcgagctttcagttcccggtgggaagcccgtggtggtgaagcagttcttgaaggataatctcggcatccagcatgacttactcggctatgtcgtgctagtccatttcgcctacatcattgcgttcttcttcgttttcggttattccatcaagttcttcaacttccagaaacgttagctgcacctctactctctgctgtctcacacggacggtcatttgtaatctactttctcgtacgtcgaagcaaatgcttgtttgggaagcctgtttgcaagtagccaagtactagtatattctcctctagcatgttccttcaatggaaaatgttaaaaaaagatgacgaatacataaagtgacatctttgtttagatatcggtgtcgtatctgttgtaccgtaataaaaaaattgttgggactg

SEQ ID NO: 16806 - DNA, 4617 bp, Zea Mays
atcgtgcgtcgatagacgatgatgccggagtcgcatccgcatccccacgcgggggcggtgctggcgtcgacgtctagccgtcggagcctcagcttggggtcctccatctcgcagtcgttccggcagatggacacggaggaccccttcgcgcggtcgcagtcggagcatgagcaccgcgacgacgaggagaacctgcgctgggccgcgctcgagaagctgcccacctacgaccgcatgcgccagggtatcctacgccgggcgctcgaccaacaacaagagagcggcggcggcggcgtcgagatcgtcgacatccacaagctggccgccggcgacgggggccgtgcgctcctggagcgcctcttccaggacgacagcgagcgattcctgcgccggctcagggaccgaatcgacatggttggcatcgagctccccacagtggaagttcggtacgagcagttgacggtggaggctgacgtgattaccgccgggagggccctcccgacgctgtggaacgccgccaccaattttcttcagggtctcattggacgcttcggttcttcaaacaagaggaacatcaccatacttaagaatgtcaatggtatcctgaagccatccaggatgacgcttcttcttgggcctccatcctcagggaagagcacactaatgcgagcactcgctggcaaacttgacaaaaatctcaagaattctatcctgagaggactagcgcgtatgttggtcaatatgatctccacaatgccgagatgactgtaagggagacacttgatttctctaggcggtgcctaggcattggtgccagatatgagatgattacagaacttgctagaagggagcgggatgccggcattaagccagatcctgagattgatgctttcatgaaagctactgcagtacaaggacaggagactaatattataacagatctcactctcaaggtgcttgggctggacatttgtgctgatgttattattggtgatgagatgatcagaggaatttctggcgggcaaaagaaacgtgtgacaactggggagatgctaacagggccagcaacggctttatttatggacgaaatatccactggtttggatagctcgagcacatttcagattgtaaagtttatgaggcatttggtccatgtaatgaatgaaactgtcatgatctctctgctccagccaccgccagagacctacaatctttttgatgacataatcctgctatcagaaggatacatagtgtaccatgggccacgcgagaatatcctggaattctttgagtctgtcggtttccggtgccctgacaggaaaggtgtcgcagactttcttcaagaggttacttccaagaaagaccagcaacaatattggtatcttgatcaggagcaatatcattatgtatctgtacccgactttgcagaacgtttcaaatcattccatgcatgccaacagatgcagaaggagttgcaaataccttttgaaaagtccaaaacccatcctgctgcgttgaccaccaaaaaatatgggctttctagctgggaatcactcaaggcagtgatgtcaagggagcagctattgatgaagcgcaactctttcatctatattttcaaggtcacagtgttgatcatccttgcattcgtgtccatgactgtgtttctcagaacaaagatgccccatgggcaaattgctgatggcaccaaattctttggggccctgacttttggtttaataacgatcatgttcaatgggttcgctgagctacaattgaccataaagaagctaccagttttctacaaacatagggatttcttattcttccctgcatggacctttggagtggcaaacatactcttaaaagttcctatctcgctcgtggaatcagtagtatgggttgttctcacatactatgtgatgggctttgcacctgctgcaggaaggttctttcgtcagtttatagctttctttgccacacaccaaatggcaatggctttatttcggtttcttggtgctgttttgaaaacaatggttgtggccaatacttttgggatgtttgtgctgctcattattttcatttttggaggatttgtcatccgtagaaatgacattaaaccttggtggatctggggttattgggcatcacctatgatgtatagccaaaatgcaatatctatcaacgaattccttgctagtaggtgggctattccaaacaatgacacgactattgatgcaccaacagtaggcaaagcaattcttaaatccaaaggcttgtttactgaagaatggggattttggctttccattggagcccttataggattcattattttgttcaacagtctctacctttgggcccttacatatttaagtcctagtagtggctccaatgccctagtttcagaaggtgaagatgatgtaaatgaaatagcattgaaagaaagaagcagagatgcaagaagcgaagatgaaatatcccaagttgtatacggggatctaggcactaatggagcaacaaacacactagttcagtcacgagtcactttgcctttccagcctctttcactttgctttaaccatgtaaactattacgtcgacatgcctgcggaaatgaaggaacaaggattcacagaaagccgtttacaactgctctctgatatcagtggtgcttttaggccaggggttctaacagcattagttggtgtgagtggagctggaaagaccactttaatggatgtcctggcaggaaggaaaactagtggagccattgaaggagatattaccctgtccggataccccaaaaaacaagaaacttttgcccggattagtggttattgtgaacaaaccgatatccattctccgaatgttactgtatttgaatccatcacgtactctgcatggttgcgtctttcctcggatattgatgatggtacgaaaaagatgtttgtggaggaagtgatggcccttgtagagcttgatgtgttgtgcgacgctcttgtgggtctccctggagttagtgggttatcaactgagcaaagaaaaaggctgacaattgctgtggagctggtagcaaacccttcgatcatcttcatggatgagccaacttctggtcttgatgctcgagctgctgcgattgtcatgcgtacagtaagaaatacggttaacactggacgtactgtggtctgcacaatccatcagccaagcatcgacatatttgagtcttttgatgagctactgcttttgaaacgtggaggtcaggttatttatgctggtgaacttggtcgccactctcacaaattagttgaatattttgaggcgattccaggtgttcaaaagatcacagaaggatataatcctgcaacatgggcgctggaagttagctctcctctatccgaggctcgattgaacatgaattttgctgaaatttatgctaactctgtgctttataggaaaaatcaagagctcatcaaggagttgagtgttccctcaccagactaccaggacctgtcattccctacaaaatattcgcagaatttctacaaccaatgcgccgcgaacttttggaagcaataccgttcctattggaagaatccgccctacaatgctatgcgctacctgatgacatttctcttcggccttgtatttggtacagtgttctggcaaaaaggaaagaacatagattcacagcaagatttatataatctactcggagccacttacgctgctaccttctttctgggggcttcaaatagcatcacggttcagcctgttgtatcaattgagcgagcagtgttctaccgtgagaaggcagcggggatgtactctccattatcctacgcatttgctcagacgtgcgtggaggtgatctacaccatcttacaggggatactgtacacagtcatcatatatgcgacgatcggatacgactggaaagcggataagttcttgtacttcctgtttttcatgaccgcgtgcttcaactacttcgggttgttcggcatgatgttggtagcgtgcactccctccgcattgctcgccaacattctcatcacgtttgctctgcctctttggaacctcttcgctggattcctcatcgttagaccggcaataccaatttggtggaggtggtactactgggcgaaccccgtgtcgtggaccatctacggcgttgttgcgtctcagttcggcgagaaccaaggcgagctttcagttcccggtgggaagcccgtggtggtgaagcagttcttgaaggataatctcggcatccagcatgacttactcggctatgtcgtgctagtccatttcgcctacatcattgcgttcttcttcgttttcggttattccatcaagttcttcaacttccagaaacgttagctgcacctctactctctgctgtctcacacggacggtcatttgtaatctactttctcgtacgtcgaagcaaatgcttgtttgggaagcctgtttgcaagtagccaagtactagtatattctcctctagcatgttccttcaatggaaaatgttaaaaaaagatgacgaatacataaagtgacatctttgtttagatatcggtgtcgtatctgttgtaccgtaataaaaaaattgttgggactg

SEQ ID NO: 16807 - DNA, 4737 bp, Zea Mays
cccctctatgtatatataaatacaatggttcgttaccaggaccgccggagtagtagcaaagcaattgcatatcatcacccatcgtgcgtcgatagacgatgatgccggagtcgcatccgcatccccacgcgggggcggtgctggcgtcgacgtctagccgtcggagcctcagcttggggtcctccatctcgcagtcgttccggcagatggacacggaggaccccttcgcgcggtcgcagtcggagcatgagcaccgcgacgacgaggagaacctgcgctgggccgcgctcgagaagctgcccacctacgaccgcatgcgccagggtatcctacgccgggcgctcgaccaacaacaagagagcggcggcggcggcgtcgagatcgtcgacatccacaagctggccgccggcgacgggggccgtgcgctcctggagcgcctcttccaggacgacagcgagcgattcctgcgccggctcagggaccgaatcgacatggttggcatcgagctccccacagtggaagttcggtacgagcagttgacggtggaggctgacgtgattaccgccgggagggccctcccgacgctgtggaacgccgccaccaattttcttcagggtctcattggacgcttcggttcttcaaacaagaggaacatcaccatacttaagaatgtcaatggtatcctgaagccatccaggatgacgcttcttcttgggcctccatcctcagggaagagcacactaatgcgagcactcgctggcaaacttgacaaaaatctcaaggtctctggcagcattacgtattgtggccatccaatttcagaattctatcctgagaggactagcgcgtatgttggtcaatatgatctccacaatgccgagatgactgtaagggagacacttgatttctctaggcggtgcctaggcattggtgccagatatgagatgattacagaacttgctagaagggagcgggatgccggcattaagccagatcctgagattgatgctttcatgaaagctactgcagtacaaggacaggagactaatattataacagatctcactctcaaggtgcttgggctggacatttgtgctgatgttattattggtgatgagatgatcagaggaatttctggcgggcaaaagaaacgtgtgacaactggggagatgctaacagggccagcaacggctttatttatggacgaaatatccactggtttggatagctcgagcacatttcagattgtaaagtttatgaggcatttggtccatgtaatgaatgaaactgtcatgatctctctgctccagccaccgccagagacctacaatctttttgatgacataatcctgctatcagaaggatacatagtgtaccatgggccacgcgagaatatcctggaattctttgagtctgtcggtttccggtgccctgacaggaaaggtgtcgcagactttcttcaagaggttacttccaagaaagaccagcaacaatattggtatcttgatcaggagcaatatcattatgtatctgtacccgactttgcagaacgtttcaaatcattccatgcatgccaacagatgcagaaggagttgcaaataccttttgaaaagtccaaaacccatcctgctgcgttgaccaccaaaaaatatgggctttctagctgggaatcactcaaggcagtgatgtcaagggagcagctattgatgaagcgcaactctttcatctatattttcaaggtcacagtgttgatcatccttgcattcgtgtccatgactgtgtttctcagaacaaagatgccccatgggcaaattgctgatggcaccaaattctttggggccctgacttttggtttaataacgatcatgttcaatgggttcgctgagctacaattgaccataaagaagctaccagttttctacaaacatagggatttcttattcttccctgcatggacctttggagtggcaaacatactcttaaaagttcctatctcgctcgtggaatcagtagtatgggttgttctcacatactatgtgatgggctttgcacctgctgcaggaaggttctttcgtcagtttatagctttctttgccacacaccaaatggcaatggctttatttcggtttcttggtgctgttttgaaaacaatggttgtggccaatacttttgggatgtttgtgctgctcattattttcatttttggaggatttgtcatccgtagaaatgacattaaaccttggtggatctggggttattgggcatcacctatgatgtatagccaaaatgcaatatctatcaacgaattccttgctagtaggtgggctattccaaacaatgacacgactattgatgcaccaacagtaggcaaagcaattcttaaatccaaaggcttgtttactgaagaatggggattttggctttccattggagcccttataggattcattattttgttcaacagtctctacctttgggcccttacatatttaagtcctagtagtggctccaatgccctagtttcagaaggtgaagatgatgtaaatgaaatagcattgaaagaaagaagcagagatgcaagaagcgaagatgaaatatcccaagttgtatacggggatctaggcactaatggagcaacaaacacactagttcagtcacgagtcactttgcctttccagcctctttcactttgctttaaccatgtaaactattacgtcgacatgcctgcggaaatgaaggaacaaggattcacagaaagccgtttacaactgctctctgatatcagtggtgcttttaggccaggggttctaacagcattagttggtgtgagtggagctggaaagaccactttaatggatgtcctggcaggaaggaaaactagtggagccattgaaggagatattaccctgtccggataccccaaaaaacaagaaacttttgcccggattagtggttattgtgaacaaaccgatatccattctccgaatgttactgtatttgaatccatcacgtactctgcatggttgcgtctttcctcggatattgatgatggtacgaaaaagatgtttgtggaggaagtgatggcccttgtagagcttgatgtgttgtgcgacgctcttgtgggtctccctggagttagtgggttatcaactgagcaaagaaaaaggctgacaattgctgtggagctggtagcaaacccttcgatcatcttcatggatgagccaacttctggtcttgatgctcgagctgctgcgattgtcatgcgtacagtaagaaatacggttaacactggacgtactgtggtctgcacaatccatcagccaagcatcgacatatttgagtcttttgatgagctactgcttttgaaacgtggaggtcaggttatttatgctggtgaacttggtcgccactctcacaaattagttgaatattttgaggcgattccaggtgttcaaaagatcacagaaggatataatcctgcaacatgggcgctggaagttagctctcctctatccgaggctcgattgaacatgaattttgctgaaatttatgctaactctgtgctttataggaaaaatcaagagctcatcaaggagttgagtgttccctcaccagactaccaggacctgtcattccctacaaaatattcgcagaatttctacaaccaatgcgccgcgaacttttggaagcaataccgttcctattggaagaatccgccctacaatgctatgcgctacctgatgacatttctcttcggccttgtatttggtacagtgttctggcaaaaaggaaagaacatagattcacagcaagatttatataatctactcggagccacttacgctgctaccttctttctgggggcttcaaatagcatcacggttcagcctgttgtatcaattgagcgagcagtgttctaccgtgagaaggcagcggggatgtactctccattatcctacgcatttgctcagacgtgcgtggaggtgatctacaccatcttacaggggatactgtacacagtcatcatatatgcgacgatcggatacgactggaaagcggataagttcttgtacttcctgtttttcatgaccgcgtgcttcaactacttcgggttgttcggcatgatgttggtagcgtgcactccctccgcattgctcgccaacattctcatcacgtttgctctgcctctttggaacctcttcgctggattcctcatcgttagaccggcaataccaatttggtggaggtggtactactgggcgaaccccgtgtcgtggaccatctacggcgttgttgcgtctcagttcggcgagaaccaaggcgagctttcagttcccggtgggaagcccgtggtggtgaagcagttcttgaaggataatctcggcatccagcatgacttactcggctatgtcgtgctagtccatttcgcctacatcattgcgttcttcttcgttttcggttattccatcaagttcttcaacttccagaaacgttagctgcacctctactctctgctgtctcacacggacggtcatttgtaatctactttctcgtacgtcgaagcaaatgcttgtttgggaagcctgtttgcaagtagccaagtactagtatattctcctctagcatgttccttcaatggaaaatgttaaaaaaagatgacgaatacataaagtgacatctttgtttagatatcggtgtcgtatctgttgtaccgtaataaaaaaattgttgggactg

SEQ ID NO: 16808 - DNA, 1536 bp, Zea Mays
attgaaactatcaaagttcatattacattgataccttcgacttgcttgaaggcaatgacgagaatacaattacaatcccgcgtgaataatacggaggcactgttcatctatttataggcaaacgtacagcttcgtacgatattacattcatatcatcaaaaattacatacaaggtttacaaatgtcacaatgacagtattgtcattttcgtttaacaacttgagcaacaccttctccctacgttgtcttcctgcttcgtcgtacttccattgttgtatgtcgaagcttttctcgtaatgaagctcctataatacttaataatatgctgaaaacaaatggttagtcatgtttttgaggaccttgggaagtcgaatgccctaacagagaattaactagtgaaaattatatggcaaattgactatgaaagtgtatactatataaattcatataaaataactcagatgtagcgattaaaccaaactctatggaattagattaattattaattaattgattgatcctaccataaaacatgggtcacattttagttgattttttctttcttaaaggaaatgatactagtcgttacaattttaattagagaccaaataactttagtattaagagaactaatttaaactactagtttaactatactatttagattatggtggacatggtactacctatattattttgatgttaatagaaactcagttatctgttagtaaataagaattatgcttatgaatatatgagcacatacaactcgactaaaaatctaaagatcatcataatcaagataaccgtgaaattactcatacagtgttttttttacaaatatgtgctctaccctattcttttattctttatctaaacaacgatctcttaaataaaatttgaatgaatataatcaaattaacatacacaatccgacagataatagaaacaatagtccgtcacatacactttatgctaatcgctcaacattctcatgatctcaatttcacaatatatacaaatttaaacaataaattgctacaggaaatcttaaaccaaattaaacatatttttgaaattagataaaatttgtgtcatcttcaaccttgcttcgctagttcttgcacagggagaaatcgacgagcagggggagtcgaccaggggagaaggggcgcggctagcagtagggagacggtcggcgaggcgtgctccggttccagcagtgggtggtagcggcgtgagggggctcggggaggtcgggaaccgctccaaggggggcgacgttggattttatagaggagggaagggagagagagagccaggggaggggagaagaccggcgacaccattaacgtgataatggcggcagtttctagagagaagagagtggggtagaggagaagaaagaggagagggcgccgttacttggtgcggggaggtgaggggctgcagggagccgaggggctagggcgagcacggctatccgagcgccagggcggcggcagcgtggcacgcggcgcgcgcgcctgtgcggtt

SEQ ID NO: 16809 - DNA, 2015 bp, Zea Mays
ccagaccctagccacgactttccccaagcctcagcccctctccccgctcgtgtctccaagccgcaacggcgcagctcctcttcttggacgccgaaaccgggcaccgtcgtagcccctgtctccgctcgtctccgggaccctgcttggccctctccggcgaacctctgtgcccctgctccgccgccagttcgacgccgcctgctccagatcgacgttgtcgtcctccgtcctttgtccgcctgctccagatcgacgacgcctgctccagatcaaatccggcctccgtcctctgtgcccctgccctgccgctcccagatcgacgccctaccgctccaggtcgagctgctgctccagatcgacgcccaactgctccagatcgagctgcttgtcccagatcgacgctaagtgtgtctgggttaggaagagatccaaggattggttctattacagctagtgacgaatggtgggaagaaaagatagaggccatgccagcatgcaaaaagtttaggcttgcagcattggagaatgaagatcttgaaataatgtttaatggggtgtcctgcactaatgcatatgctatggctccaggggcaaaagaaggattgcctgccaatgatagtgatgatgtggaggaggtgtctccaagtgttgaggacaagcaagctagaaaaagaggtgttgatcacaaatccccaattaaaaaatcaaagaagaattttagagatatgcagttcaagcgttttgtggattcatttgtggaaaaagctagttcaagcaagtcttccgcaacatcttcgcctaatgatcatgttaggcaagagataacagaaatgatggaatcagttatctcagctgggatagttgaaggaagtgatgacatttctatgccactcaacttctcatcaagaaggagtatcgagatgtgtttctcacactaaagattccagaagggaagcttgcatggctcaagagaacttgggaggagaggaaaaaacataagctagttatatgtattcatgctgtatcttgaacttgattagtaatgctatttgttcatgttgtatcttgagcttgattagtattgctatttattcatgttgtatggttgagttatattattcatgttgtatggttgacagatggctttcacctcaagtgaatcaaatgaagctgacataacaagtaattcaagtgactcaagtgactcaagtgactggatgtgtgaagctgctgcaattgcagcttatgcaatgctcgattgcggtacatcatctggaaagaagcaaaaaataagtgcaggagactggttatcagtgggttcagaggcatctcagttatccagagagttgttatgatatgtttagaatgagaagttcaaatgatgtagcatgaacttggacaaaggtaacgagatccggaatatcagtacatcaaagcaagacattagaagactcatagaagatttatcaagatcatgcaagagcctaatacacaagataagagaatcccaaacaaagaaacacgaagaaacaaaaaaatcagcacaccaaaaaggcactggacgtgtcacgcgcgaatgacaactgtggctggataagaaaagagctgaagacaaagtgcacaattgtcttagtgtgcatcagatacaatgcactagacaggttacccagagagctctgcagagtgacccaaggagttacagggcatcgaacatgtctggtggtgcaccagatacggcactctataagggatgcaaatgcaactgagtcaggtatgatgcaccggacaagtctagtgttaacaccggtggcacactggatacccagaggcctcaatggtcgataacgactatttccaatggctaggtgatgtggaactcatcggacgtgtttggaggcttcttcttccgaaggtcctcaaaataccaacttaaaagttattctctagtctgcttttaagtaatacaggtgcaataccgaaggtcatcttcggacgtgggaataaaggaagtcaga

SEQ ID NO: 16810 - DNA, 2325 bp, Zea Mays
ctcatccctcccgcaccacggcaccagaccctagccacgactttccccaagcctcagcccctctccccgctcgtgtctccaagccgcaacggcgcagctcctcttcttggacgccgaaaccgggcaccgtcgtagcccctgtctccgctcgtctccgggaccctgcttggccctctccggcgaacctctgtgcccctgctccgccgccagttcgacgccgcctgctccagatcgacgttgtcgtcctccgtcctttgtccgcctgctccagatcgacgacgcctgctccagatcaaatccggcctccgtcctctgtgcccctgccctgccgctcccagatcgacgccctaccgctccaggtcgagctgctgctccagatcgacgcccaactgctccagatcgagctgcttgtcccagatcgacgctaagccaagaataattagttcaacctatcatgcatagatggataacatgccaaagaacaggaaaccaaatgctcaatgggatctcagtgctgctagaatttttaatgagatatgtgtggaataagtattgacaaataatagaccacaaggttgtttgaacaacaaagggtacgccaatcttgtagccaagtttaatgaatggtcaggcagaaattacacccgtgttcaaatgaaaacccgttgggatgcactgaaatctgactttacaacatggaaaacactactccttagtgtgtctgggttaggaagagatccaaggattggttctattacagctagtgacgaatggtgggaagaaaagatagaggccatgccagcatgcaaaaagtttaggcttgcagcattggagaatgaagatcttgaaataatgtttaatggggtgtcctgcactaatgcatatgctatggctccaggggcaaaagaaggattgcctgccaatgatagtgatgatgtggaggaggtgtctccaagtgttgaggacaagcaagctagaaaaagaggtgttgatcacaaatccccaattaaaaaatcaaagaagaattttagagatatgcagttcaagcgttttgtggattcatttgtggaaaaagctagttcaagcaagtcttccgcaacatcttcgcctaatgatcatgttaggcaagagataacagaaatgatggaatcagttatctcagctgggatagttgaaggaagtgatgacatttctatgccactcaacttctcatcaagaaggagtatcgagatgtgtttctcacactaaagattccagaagggaagcttgcatggctcaagagaacttgggaggagaggaaaaaacataagctagttatatgtattcatgctgtatcttgaacttgattagtaatgctatttgttcatgttgtatcttgagcttgattagtattgctatttattcatgttgtatggttgagttatattattcatgttgtatggttgacagatggctttcacctcaagtgaatcaaatgaagctgacataacaagtaattcaagtgactcaagtgactcaagtgactggatgtgtgaagctgctgcaattgcagcttatgcaatgctcgattgcggtacatcatctggaaagaagcaaaaaataagtgcaggagactggttatcagtgggttcagaggcatctcagttatccagagagttgttatgatatgtttagaatgagaagttcaaatgatgtagcatgaacttggacaaaggtaacgagatccggaatatcagtacatcaaagcaagacattagaagactcatagaagatttatcaagatcatgcaagagcctaatacacaagataagagaatcccaaacaaagaaacacgaagaaacaaaaaaatcagcacaccaaaaaggcactggacgtgtcacgcgcgaatgacaactgtggctggataagaaaagagctgaagacaaagtgcacaattgtcttagtgtgcatcagatacaatgcactagacaggttacccagagagctctgcagagtgacccaaggagttacagggcatcgaacatgtctggtggtgcaccagatacggcactctataagggatgcaaatgcaactgagtcaggtatgatgcaccggacaagtctagtgttaacaccggtggcacactggatacccagaggcctcaatggtcgataacgactatttccaatggctaggtgatgtggaactcatcggacgtgtttggaggcttcttcttccgaaggtcctcaaaataccaacttaaaagttattctctagtctgcttttaagtaatacaggtgcaataccgaaggtcatcttcggacgtgggaataaaggaagtcaga

SEQ ID NO: 16811 - DNA, 2301 bp, Zea Mays
ctgatttctctcatccctcccgcaccacggcaccagaccctagccacgactttccccaagcctcagcccctctccccgctcgtgtctccaagccgcaacggcgcagctcctcttcttggacgccgaaaccgggcaccgtcgtagcccctgtctccgctcgtctccgggaccctgcttggccctctccggcgaacctctgtgcccctgctccgccgccagttcgacgccgcctgctccagatcgacgttgtcgtcctccgtcctttgtccgcctgctccagatcgacgacgcctgctccagatcaaatccggcctccgtcctctgtgcccctgccctgccgctcccagatcgacgccctaccgctccaggtcgagctgctgctccagatcgacgcccaactgctccagatcgagctgcttgtcccagatcgacgctaagatggataacatgccaaagaacaggaaaccaaatgctcaatgggatctcagtgctgctagaatttttaatgagatatgtgtggaataagtattgacaaataatagaccacaaggttgtttgaacaacaaagggtacgccaatcttgtagccaagtttaatgaatggtcaggcagaaattacacccgtgttcaaatgaaaacccgttgggatgcactgaaatctgactttacaacatggaaaacactactccttagtgtgtctgggttaggaagagatccaaggattggttctattacagctagtgacgaatggtgggaagaaaagatagaggccatgccagcatgcaaaaagtttaggcttgcagcattggagaatgaagatcttgaaataatgtttaatggggtgtcctgcactaatgcatatgctatggctccaggggcaaaagaaggattgcctgccaatgatagtgatgatgtggaggaggtgtctccaagtgttgaggacaagcaagctagaaaaagaggtgttgatcacaaatccccaattaaaaaatcaaagaagaattttagagatatgcagttcaagcgttttgtggattcatttgtggaaaaagctagttcaagcaagtcttccgcaacatcttcgcctaatgatcatgttaggcaagagataacagaaatgatggaatcagttatctcagctgggatagttgaaggaagtgatgacatttctatgccactcaacttctcatcaagaaggagtatcgagatgtgtttctcacactaaagattccagaagggaagcttgcatggctcaagagaacttgggaggagaggaaaaaacataagctagttatatgtattcatgctgtatcttgaacttgattagtaatgctatttgttcatgttgtatcttgagcttgattagtattgctatttattcatgttgtatggttgagttatattattcatgttgtatggttgacagatggctttcacctcaagtgaatcaaatgaagctgacataacaagtaattcaagtgactcaagtgactcaagtgactggatgtgtgaagctgctgcaattgcagcttatgcaatgctcgattgcggtacatcatctggaaagaagcaaaaaataagtgcaggagactggttatcagtgggttcagaggcatctcagttatccagagagttgttatgatatgtttagaatgagaagttcaaatgatgtagcatgaacttggacaaaggtaacgagatccggaatatcagtacatcaaagcaagacattagaagactcatagaagatttatcaagatcatgcaagagcctaatacacaagataagagaatcccaaacaaagaaacacgaagaaacaaaaaaatcagcacaccaaaaaggcactggacgtgtcacgcgcgaatgacaactgtggctggataagaaaagagctgaagacaaagtgcacaattgtcttagtgtgcatcagatacaatgcactagacaggttacccagagagctctgcagagtgacccaaggagttacagggcatcgaacatgtctggtggtgcaccagatacggcactctataagggatgcaaatgcaactgagtcaggtatgatgcaccggacaagtctagtgttaacaccggtggcacactggatacccagaggcctcaatggtcgataacgactatttccaatggctaggtgatgtggaactcatcggacgtgtttggaggcttcttcttccgaaggtcctcaaaataccaacttaaaagttattctctagtctgcttttaagtaatacaggtgcaataccgaaggtcatcttcggacgtgggaataaaggaagtcaga

SEQ ID NO: 16812 - DNA, 1927 bp, Zea Mays
gcggtccaagtacccctaaagttcatacatatttacccacattttccatagtataaaaaggtctgatttctctcatccctcccgcaccacggcaccagaccctagccacgactttccccaagcctcagcccctctccccgctcgtgtctccaagccgcaacggcgcagctcctcttcttggacgccgaaaccgggcaccgtcgtagcccctgtctccgctcgtctccgggaccctgcttggccctctccggcgaacctctgtgcccctgctccgccgccagttcgacgccgcctgctccagatcgacgttgtcgtcctccgtcctttgtccgcctgctccagatcgacgacgcctgctccagatcaaatccggcctccgtcctctgtgcccctgccctgccgctcccagatcgacgccctaccgctccaggtcgagctgctgctccagatcgacgcccaactgctccagatcgagctgcttgtcccagatcgacgctaaggggcaaaagaaggattgcctgccaatgatagtgatgatgtggaggaggtgtctccaagtgttgaggacaagcaagctagaaaaagaggtgttgatcacaaatccccaattaaaaaatcaaagaagaattttagagatatgcagttcaagcgttttgtggattcatttgtggaaaaagctagttcaagcaagtcttccgcaacatcttcgcctaatgatcatgttaggcaagagataacagaaatgatggaatcagttatctcagctgggatagttgaaggaagtgatgacatttctatgccactcaacttctcatcaagaaggagtatcgagatgtgtttctcacactaaagattccagaagggaagcttgcatggctcaagagaacttgggaggagaggaaaaaacataagctagttatatgtattcatgctgtatcttgaacttgattagtaatgctatttgttcatgttgtatcttgagcttgattagtattgctatttattcatgttgtatggttgagttatattattcatgttgtatggttgacagatggctttcacctcaagtgaatcaaatgaagctgacataacaagtaattcaagtgactcaagtgactcaagtgactggatgtgtgaagctgctgcaattgcagcttatgcaatgctcgattgcggtacatcatctggaaagaagcaaaaaataagtgcaggagactggttatcagtgggttcagaggcatctcagttatccagagagttgttatgatatgtttagaatgagaagttcaaatgatgtagcatgaacttggacaaaggtaacgagatccggaatatcagtacatcaaagcaagacattagaagactcatagaagatttatcaagatcatgcaagagcctaatacacaagataagagaatcccaaacaaagaaacacgaagaaacaaaaaaatcagcacaccaaaaaggcactggacgtgtcacgcgcgaatgacaactgtggctggataagaaaagagctgaagacaaagtgcacaattgtcttagtgtgcatcagatacaatgcactagacaggttacccagagagctctgcagagtgacccaaggagttacagggcatcgaacatgtctggtggtgcaccagatacggcactctataagggatgcaaatgcaactgagtcaggtatgatgcaccggacaagtctagtgttaacaccggtggcacactggatacccagaggcctcaatggtcgataacgactatttccaatggctaggtgatgtggaactcatcggacgtgtttggaggcttcttcttccgaaggtcctcaaaataccaacttaaaagttattctctagtctgcttttaagtaatacaggtgcaataccgaaggtcatcttcggacgtgggaataaaggaagtcaga

SEQ ID NO: 16813 - DNA, 1319 bp, Zea Mays
ctcatccctcccgcaccacggcaccagaccctagccacgactttccccaagcctcagcccctctccccgctcgtgtctccaagccgcaacggcgcagctcctcttcttggacgccgaaaccgggcaccgtcgtagcccctgtctccgctcgtctccgggaccctgcttggccctctccggcgaacctctgtgcccctgctccgccgccagttcgacgccgcctgctccagatcgacgttgtcgtcctccgtcctttgtccgcctgctccagatcgacgacgcctgctccagatcaaatccggcctccgtcctctgtgcccctgccctgccgctcccagatcgacgccctaccgctccaggtcgagctgctgctccagatcgacgcccaactgctccagatcgagctgcttgtcccagatcgacgctaagatggataacatgccaaagaacaggaaaccaaatgctcaatgggatctcagtgctgctagaatttttaatgagatatgtgtggaataagtattgacaaataatagaccacaaggttgtttgaacaacaaagggtacgccaatcttgtagccaagtttaatgaatggtcaggcagaaattacacccgtgttcaaatgaaaacccgttgggatgcactgaaatctgactttacaacatggaaaacactactccttagtgtgtctgggttaggaagagatccaaggattggttctattacagctagtgacgaatggtgggaagaaaagatagaggccatgccagcatgcaaaaagtttaggcttgcagcattggagaatgaagatcttgaaataatgtttaatggggtgtcctgcactaatgcatatgctatggctccaggggcaaaagaaggattgcctgccaatgatagtgatgatgtggaggaggtgtctccaagtgttgaggacaagcaagctagaaaaagagatggctttcacctcaagtgaatcaaatgaagctgacataacaagtaattcaagtgactcaagtgactcaagtgactggatgtgtgaagctgctgcaattgcagcttatgcaatgctcgattgcggtacatcatctggaaagaagcaaaaaataagtgcaggagactggttatcagtgggttcagaggcatctcagttatccagagagttgttatgatatgtttagaatgagaaggtcagtgttctatagtttgcatgacattttagttaacagttatggtttacgatcatcaaatgagatgtgttcaattgaagcacttggcatgtttttatggacgtgtggtgcacctcagtcatttcggcaagca

SEQ ID NO: 16814 - DNA, 497 bp, Zea Mays
ttgtagcatgtcttctctaacatcaaaactatttgctcatttacttggcgtttataacccctattgtgtatgacttctacaaccatgaaatggagtcaacactgtttgtcgatctttttttcaagttcatacagaacttggcgtttatgggtgccctgcttttcttccttgggatgaagaactcaattccaaaacgtcgctccaagggaaggacaacaaaaaccaagacaaactgatgtcagtggttgtaggaggggaagcaattgggctcattatgtttgcatactatacaggaatagatgtcccacttttgttcttggtgcgccaattgaattgtgaattgggacttacagaacttagcatgtaggatatttaagttatcttgcgcaattttattttcttatgttgcgatgtgttcttatgtcacatttcattttgctacaagaactgctttgacagtaaaaaaatattaagtcgcatagtctattttctgtgca

SEQ ID NO: 16815 - DNA, 697 bp, Zea Mays
catcaatcctacccgtcttgcccttttcaggttcattgaatttggaaatgacggtggacctgcagcgaagaccttgaagccaaagttcaatttgttcgtcaagctagtgtccaagaatactggattgggggtgccgcatattgatataaaaactgtcattgcagctaccatgtttcttaaaggctttggtggtcttctgttcatagtcagcagctcatttggagcattcctcctgctcatttacttggcgtttataacccctattgtgtatgacttctacaaccatgaaatggagtcaacactgtttgtcgatctttttttcaagttcatacagaacttggcgtttatgggtgccctgcttttcttccttgggatgaagaactcaattccaaaacgtcgctccaagggaaggacaacaaaaaccaagacaaactgatgtcagtggttgtaggaggggaagcaattgggctcattatgtttgcatactatacaggaatagatgtcccacttttgttcttggtgcgccaattgaattgtgaattgggacttacagaacttagcatgtaggatatttaagttatcttgcgcaattttattttcttatgttgcgatgtgttcttatgtcacatttcattttgctacaagaactgctttgacagtaaaaaaatattaagtcgcatagtctattttctgtgca

SEQ ID NO: 16816 - DNA, 693 bp, Zea Mays
cggtgcggagatgcgagttgagatcggttcattgaatttggaaatgacggtggacctgcagcgaagaccttgaagccaaagttcaatttgttcgtcaagctagtgtccaagaatactggattgggggtgccgcatattgatataaaaactgtcattgcagctaccatgtttcttaaaggctttggtggtcttctgttcatagtcagcagctcatttggagcattcctcctgctcatttacttggcgtttataacccctattgtgtatgacttctacaaccatgaaatggagtcaacactgtttgtcgatctttttttcaagttcatacagaacttggcgtttatgggtgccctgcttttcttccttgggatgaagaactcaattccaaaacgtcgctccaagggaaggacaacaaaaaccaagacaaactgatgtcagtggttgtaggaggggaagcaattgggctcattatgtttgcatactatacaggaatagatgtcccacttttgttcttggtgcgccaattgaattgtgaattgggacttacagaacttagcatgtaggatatttaagttatcttgcgcaattttattttcttatgttgcgatgtgttcttatgtcacatttcattttgctacaagaactgctttgacagtaaaaaaatattaagtcgcatagtctattttctgtgca

SEQ ID NO: 16817 - DNA, 3030 bp, Zea Mays
ctcgagctcgtatcaaactggctcgttaacgaaccgagctgagatgttagttcagctcgtggaatcaagctgagctagctcgtgctaagatgttagttcagctcgtagaatcaagctgattgtgactctatgagtcgatcgagcttacgagccacgaccggcctaactgtggcagcggtgctaaacatcaatggagagggaatcatggtgaggcttctccgggtttcctctctttctctatctcttcctacatcgccactcgccagtgcggcggtgacctctagaatccaaagcaagctgtagtgagcagccccttacatactctctgcggactgcggtccgcaccgcacgccatctcagcaagacgagagctccaccgcgctgttcacttcttctgacgaaggatggcgggaaaagaggatgagaatgagaagccatcgttggtggcagccggcggcaagcaagatcggacagcggcgaccacggaatcccttccgcaaaggacgaatcttgagtggggaaaggcagcgtgtagcgaggatgacatccagaagtgtgtagctgccggtgccttccatcccggtgagctggtcgaatggcgagctcccgtcaaggatgagactccgacgctatccaccatggaggatcagtttgttatcctgtctctgacgcacataatttgcggtctgagggtcgatgcgagcgatttcctggtcagtgtgctcgagtactacagacttgagtggtctcacctgacgcccaactctattacggcgctgagcatcttcgcccacctttgtgaggcctacgtggaggcgcctccaactgtggaggtcttcacgcacttctacagcctctatcacaataggaaaggcgaaacgacaacactgggcgccgtctacttccggctcagggacaggatgaagaagaattatccattgtactacttgaggtcctcgcagttcatgtgggtttctctgtggttctatgccaaggtaccaaagagctgtcgcttgaccttcaggggtgatatactaaaggaggaaaacaattggaattggaaagatcttttgcctctttcctgtgagcagatgaagcaggtcggccaaatcatgaagctaagtaaccaaggcttgactggtgcagacatcattcatgattacctcaagcgccggattagccctttgcgccgaaggatgcatttgacatgcaattattctggcctctcagatcctaccagggattcagacaaagatctttctgtggaagacattgagagcaagctgagctaccttctagatcttaagaggatgggtgtgaagcagcctacaggtagactggtcagagcatcaaccaatgaccaagccaatcagcctctagacttgctgaatgtttgctcaactcacgaagctaagaaggaagcacaacctcaagtttgtgcctccctacgaagatacacaaggcaatctgctggtcccaggaaggttgcagtacctccacctcttaaaattgaccctccccccactcaaggtccggccccagaagagattctagatgccacaacaaacatagcgactgcagtttctccaaacctgggcgtagaacaaaaatctatagagcaccctactgtggctgaagagcggaaaatagcagagttagtgaaacctacgttttcagtcattggtgccaaaaggaaggcatctgccccccggtctcgttcaaagagaagagcaaagtattcattactttccgttgttacaaagaccaggatgtcatctttggacactggttctataaaagggacttctagaacaaaagaggcagtgttagcgctgaattcacggtcaataggattggctcgatgccctcctgcctctttagcagaagggacagggaacggtggactgttcatgcttgccaaagttgttgaccatactaaggttgttgaggattccatgtcgaatatactccttaatcaacaagttggagattcttctcgcaaggaggttgatcctgcacaatctatcactgagattgtccaagaccaggaggccattgaggtttcagctgccattccggtgcctaataaggaggaaataaacagtggggtgatatgggagcggatgcagaaagttcagagtgaattcttcatatgttcccttccctgtagtacgtgtcactcagtatgacagcctcctctgagcttttagaacaagcaaagaagctggtcatggagaataaacgcctgaaggacgtgcagataatgctgtcgcaacaagtgaaagacctcgaagacggcagaaggctcttaacagaaaggatgaagaaagccgagcaggagacattcaaaataatagaagaaaatatgaagctcaaagatgagaacaaagaagcagatgatcgaggagctgagtaagcagaatgagtcaaccctaggggccttggtccataaatgcactctgttggaccgctacaaagaggagtctgctcagctcattagagagaaggaagagctgcaatcgcgtgtttcgcgtgtcaatgatcttgtcaagctagtctctagtactttgtgccaagagaaagacagcgcttcctaaattttatgtagcatttgtgtgtttgacaagtgcaaatgagatccacagaaggaatgtgattggaagcgaatgcagattactgatgtatagaaacatccttatcaatgattgatgtagtctaaaatctcaactgaaggggttatggcattatgggcatgatttagggggtgtttggtttcttttttttttttctcggaattaagaagaaagaaggttatggggccaaaaaacaacccagatacaagagcctcttacgttggacgaaaacataaaaacataaaaggactcataagtcgaaaacataaaaacataaaaggactcataaggaaccacagacaacatcctcacaacaagaaaaacagggagagcatcctcacaacaagaaaaacagggagagagaaactagactaacaagaaaaacataaaaacataa

SEQ ID NO: 16818 - DNA, 2159 bp, Zea Mays
gcacaccggcacacggctcctccaagatcgagagctgtagctgcaacctgcagcagacgcatatgtccgtcgccgccgccttgggccgcgccgatgagctccgcgcgctggacgacaccctcgccggcgtccgcggccttgtagcgtctggtgcgaagcaagttcctcgcatctttcgcgtcccctacccggaggagctactccaccatgaacaaccgccagcggcggcgaccgtcccggtgatcgatctcagcggcgaccgcgcagccgtgatcgacgccgtccgtggggcggcggcggggtgggggttcttccaggtcacgggccacgcggtgcccgagcaggtgatgtcagcagccgtggcggcgatgcgggcgttccacgaagccgacggcggggagggcagcgacaaggcgcggctctactcgcgagagcccgggagggcggtcaagtaccactgcaacttcgacctgtaccagtctcccgtggccaactggcgcgacacggtctacctgcggatggcacctgaccctcccgccgccgacgatctgccggagatctgccgcttaacaaacaaggtcgcgtcatctacatacatcgagatccttatagtgggcgagcgactcccaatttgctcagtatgctagactttgtagcaatcttcagaatttttcgcaatgagatgatcgctaaaacaaaaaggagggggagaaagggtcgccttgtccgagacctctcccatggtgtatagtcggattagggactccattagtgcttctcccttgaggttgaggtggaaaggattgaagcgatccagtcagtcgtccacctgacgggaaagcctaactacggagtaaggcaagaagatagtcccaacggacggagtcgaatacctttgcaatgtctagcttgaggagcgtgggcgagttgttatgctagaaacgtctaatcatgcttctcaccgctaggaagtttctatggattctccttttttatgaaggtgctttgaaatggcgaaactagctcattcattcatggtgccagccgaagagctaggattttggtaataaacttaatgaaagaatgaatgagcattatcggtctgaagccccccgactgtctccgctccttctttttgggggaattaggatgatgctagccgtattgattagctagaggttgaggtagcgagtttgttcagctaaccttttttggaaatgtttatttctatatgtttaatcatttattccatccattcaaattataattcacctgtttttcagaccaaacttttcaattacacaaatatttgcaagaccaaatttgtttcattcaattattcattaaatatattttggaatttgtatttatttgaacttgtagatggtaatattttttagaaaagcttgtttaaaacctgagagattttttattttggacaaagtcagagaaaaacataaatttcaatgtataggaagtattatgacatataagtgaacgtccgttacatacaagtcgctaaaattaaattaaaatgtattatgattggcagagatgcactgtttgaatacgccaaacaagtgaaagatttggggcagaggttgtttgggctgctctccgaatccctcgggctcaaaccgagctacttgacagatattgagtgcgaccagggacagattatacttgggcactactaccctccatgcccccagcctgaactcgccattgggacaagccggcattcagactccggcttcctgaccatactactgcaggacaaagttggcggcctccagatcctccatgatggtcagtgggtcgacgttgcaccgacgcctggagcattcatcgtcaacataggcgatctcttgcagctggtctctaacgacaagttcagcagcgtcgagcacagggtggtagccaagaatgctgaaccaagagtttcgatcgcgtgctttttcagcacccatttccatcccgcttcgacaagaacgtatggcccaatcaaggagctgctgtccgaggagaaccctcctttgtatagggaaacactcgtgagagagtatgttgcacgttactactctgttggcttggatggaaaacagaagactgctctagctgatttcaggttgtctgcagccgtgtccgcgaggccgccc

SEQ ID NO: 16819 - DNA, 580 bp, Zea Mays
ccacaccatttgttgtggcacaagataggcaattgatgatgattgcaaccaaactggacaaatgttagctggattgctcaagtggccacaaggaacctttgcctccaagcacggatttaagacttaaccagccaagatatgcaactttgcccaacataatgaaggcaaaatccaaagttattaagaaagtcgccgctgaagaccttggcgtagatattagatcagacatggaggtgattgaggtcaatgaaccaccaaaacgaaaagcaggggtgattctttcatgtgtcgacgagctccttgacaagttgaaaaatgaagcacgtgtcctttaaccatttgtatattattcctcgctgaatatggtctgacgttcatttatttaagttctctctccaaatgttcagacttcagaccatttacaaataaaataagtgttaacatgaaccaattaagatactacccctgaaacatttacctgctgaattccttccaaatagctgtttacttgattgtgtacaggctaagctatctcttttctgaaatttggaggaatatgacgtgcatgttaggattaagt

SEQ ID NO: 16820 - DNA, 788 bp, Zea Mays
cttgcttcaactgttgtttatttttctgcaagcaccagtagagccctacatgtcaaaagttgatcctggccaggacaggaaaacaagaattaaaaaaaagaacaggaaaacagccacaccatttgttgtggcacaagataggcaattgatgatgattgcaaccaaactggacaaatgttagctggattgctcaagtggccacaaggaacctttgcctccaaggttacattggacacagaaaaacaaaaagctactgttgagcgagaagttgatggtggaattgaaaccatctgccttgatctgccagcagtgatcaccacggatttaagacttaaccagccaagatatgcaactttgcccaacataatgaaggcaaaatccaaagttattaagaaagtcgccgctgaagaccttggcgtagatattagatcagacatggaggtgattgaggtcaatgaaccaccaaaacgaaaagcaggggtgattctttcatgtgtcgacgagctccttgacaagttgaaaaatgaagcacgtgtcctttaaccatttgtatattattcctcgctgaatatggtctgacgttcatttatttaagttctctctccaaatgttcagacttcagaccatttacaaataaaataagtgttaacatgaaccaattaagatactacccctgaaacatttacctgctgaattccttccaaatagctgtttacttgattgtgtacaggctaagctatctcttttctgaaatttggaggaatatgacgtgcatgttaggattaagt

SEQ ID NO: 16821 - DNA, 688 bp, Zea Mays
cgcggttgttctcatatgggctacggtgccgctatatatgggcaattgatgatgattgcaaccaaactggacaaatgttagctggattgctcaagtggccacaaggaacctttgcctccaaggttacattggacacagaaaaacaaaaagctactgttgagcgagaagttgatggtggaattgaaaccatctgccttgatctgccagcagtgatcaccacggatttaagacttaaccagccaagatatgcaactttgcccaacataatgaaggcaaaatccaaagttattaagaaagtcgccgctgaagaccttggcgtagatattagatcagacatggaggtgattgaggtcaatgaaccaccaaaacgaaaagcaggggtgattctttcatgtgtcgacgagctccttgacaagttgaaaaatgaagcacgtgtcctttaaccatttgtatattattcctcgctgaatatggtctgacgttcatttatttaagttctctctccaaatgttcagacttcagaccatttacaaataaaataagtgttaacatgaaccaattaagatactacccctgaaacatttacctgctgaattccttccaaatagctgtttacttgattgtgtacaggctaagctatctcttttctgaaatttggaggaatatgacgtgcatgttaggattaagt

SEQ ID NO: 16822 - DNA, 5548 bp, Zea Mays
aagggattagaccaaaaggacagtactttgatgaagctgaatcaaatgagaacgaaaatgatgatgttgtagaaataattgggtcatcatctagagaacagaattatcaagcaagccattaacgttggggcaacaaagaagcccactacaactttgctctgacgtacaccccaagagattgtagcggaaaggtatgccaagggggcaactcaaagaaccatcagtgctgcaatgaagcctaaagaaaaaggagaagctgtttgtatgaagatagccaagttttttgagtgtggcatacccttcaatgctgccaactcaagacagtttgaggtagctgtagaggccattgcacagtatggtacggggttcaaaccccctagtttccatgagccatgagaaccattgcttgtgaaggctgtcaaagagatagatggtgagaagaagcatgaggatgcatggagtcaatatggctgcaccctcatgtcagatggatggacagacagaaggggtcgacatttgatcaacttcctagttaacagccctaaaggtacattctttttagaatcagtggatgcatcgatgagtctcatgatgtgatgatgcttgcagaactactagatataagacattgagcagattggaagggataaggtcatacaggtcgtagctgacaatggtgctaactacaaggctgcagggcgcattctggttcagaccactcctaccttgttttggacccttgtgctgctcactgcttagactttatgctggaggccatagaaaaactgaaggattttaagaagcctattgcacgtgtctgtcatgtcacaacattcatatatagacataggagaattctaagtgagatgagggtgcatacaaaaggtatggatcttgtgaggcctgctgctactaaatttgctactgcattcctcaccttgaggagtttacataagcacaaggatcgattgagagcattgttttctggtgatgttttcactcgctccaaagtagctaaaacagaagcagggaaaaaagtatgacattgttttctcaacagagttggcattcggttgaggactgccttaaagcttctttaccactacttgttgtgcttagattggttgatggtgatgagaagccagccatgcctaaagtggcagcagctatgaagatagcaaagcaaaagattacttcatcattctctattcaaagcaagaaagcttgtctaaaccgcatcatgaaaattgttgacagtcgttgggtgaaacaaatggatactccgttgtatggagcagcactctacttgaaccctggaaaattctagagctaaggggttgcttcaattatgtacttgttcaaatggtggtagatgaggaccttagagaaaaaattgatgctcaggcagtcctttatgagaaccaaaaagaagcatttgcaaacccaatggccattaaaaatgctcaaacaagaaactcacttgattggtggcttgcatatggtggtcgaaccattgagttatataagtttgcaggacggattgttagtcattgtgcttcatcatccagttgtgagcagaattggagcaaatttgaatttatgcatgccaagataaggaacaggctagagcacaaaaattgaatgatttggtgtatgttacatacaatagaaagatggcagctaggttccaaaaaaatatgtgaagaagggaagaactttgatcctttggttcttgaagattttgattgggacaatgagtgggttgatccattagctacttcatttgttgttggggatggccctcttttcacatgggaacatgttgatcatggggccggtgcatctacacaacttcaaggccgcaactttcctaggacagctcatggtactcaactgccaatcaatgttttcaagtcgtctggtcgaacctagtcgtatagctaccgaccagtcgactagtcgcgattagtcgtcgaccagatcgactaatcggccctcagcaaaaggaaagcagaggagaaaaaaccatacttaccatctgaggatgtgctcatcttgaggacgaggagcgctgcacaaggcagggtagggtgattggaaggttgttgtcgaggtgaggggagggggacggtggctcctccttgggcgagggcggcagctactccttgggagacggcggctctgtcttggggccaaggaggaggctgcagtcgtgtgcgccggcggctcctggtggctggtccttgtgcgccggctgctccctgttctgtgtgccagcggcggtgtgtgggactggaggctggaggggttgtgcaggactgcctgagcgttctcaactctcaagtctaaccctagaagcccacaaatcaaattgcagcccagttccaaccccagttgcaaaagcccatcaacagtgccatgtccaaactagtcgtcccatgtttaatcggacgactaatcaaacgactaattttctggtccgttagtcgcatcggtggggctggtcgattgcaatccaccgattaatcgcgattagttggacgacttgaaaacactgctgccaattcttgaggatgatgaaaatggtcttgatgtgggtgaagagaatgaagacgatgaaaattttgtgcttgacaaccttgacatggatgataaagaagcaacaaacaacagtggtgactgtggtggtgagcaagacaaggatgatgttggtttagatgatttggatgatggttattgagtgcttgagtaacacttgtgtgcttgtggttgtggacattgcattccactttagttgcttttgtgctatgtttgtgattggggactactagacatctcattccactttgtttgcggttgtcgacttcctattagttgaacttgtgttattgtggtaatgtcattttgcacaatattatcatgtgaactcatgttggttattgtctgaaattatgatatattgaaatttccctatgttgtataaaacgtttaaaagtcaaaactccacccatgagcgtttcaaagtttcgtcgttttaataaccatgctttcaagagtaatcatgttgcttttcacagtacttagacgtcaaaaacaccacaatcatacaccatgccttactaggaccaccagtcaaaatgatggaatggataaatcattatgtcagaatctggtctctaaaataaattcatgttaaacagatctatacaaggaattgaagaaaacacaaagtgctcgaattacctggcaaatacaacatggttcaacacctgttggaggatcttccaatgatattaagacatatttccgttgttttaagttacttaggattttttcctcactaagtcctgtgtttacgtacccaatgcgttcacctagtgcgagcaattcctggggaacagaaaaatgtagtcaaacacaaatcgggtcacataatgtgaatgatgccacaggaaccacagttttaaaacctaaagtggctacaagtgtaccaattatatacttcctgctacaagcaaaaactcagttctgaacacactaagttaagccagttttacccacattatgcaatttaatctgattccatgctcctgaaactacactgaaactacaacattttgaggatatatggtatgggatatcttcattctggaaaatgacttgattcaaacaaaattggtagccaaatatgccaggattcaaaatatcttctaccaacgtcatcactgactaggctttaaggttttggaataaaattatgatcaagagaaattctgatacctcataggacatattatccacatcaagccgcatatcccgatgtctatcaatcaaatttgcgcgtctcataataagtgaccgatcaatgagaagcaaatcctgttcaaaaataaatattgctgattaacacagtacatcacaaatcaatcacaatgttacatctattcgagaacagattaatttgtaacatcactgtctagataagacttcatttactccgagctataaacatgctgataagagctagatcataaattattgttgtatctttgaaatagttctgacaaaaatattaagcataagatatattacatcactggggcattatctaaggaatgataacaaaactaccacaaggtgtttgacaactggaacatgtggcagtgaaggggcaaagaaaatacaagcttttatagtataggctttctttctcactggcaaaataattgagatctttgaatcacattacctggcatcatatatgcagtgatcaatgtttggaatttactgccactattgttaatttaagccaaataattagcaacctattgtatgtacagaaagttgcacactaatctatcttattggattaagtagctaggaagtttccatgccaccatttcacagaaatcaacagcccagaatagtggcttcacaatgatctcttatttcacttttgacagttaatcatatagaacacggtattactcatctatgtatccatttctctggtacatccacttcattcaatggccaatgtatactccaacactacgtgaggcttggcctccaaatgttcccaaacatgggtgtgtatgagcatgtgtagtttgcacgtgcaagtgcagttgtgtctaaacaatatatcatcacattcaaagtttacctctctaatagactacaacaacaacgaagtttttaagtccatgcgagttggggtaggctagagttgaaacccaacaaaagccacaattcaaggttcaaacacatagacagttgttttccatgcacccctattcaagacaatctttgggtatattccattgtttcaagtctccttttaccgcctcttcccatgtcaacttcagcattctctagcatctatacctattactatcacgccttaagatcccactaagcactggtgtatttggagaattccgctgtgcatgtgcaaaccatctcaaccagtgttgtataagctttttaaaattggtgctacacctaacctattatttatagactcgatctgtccttgtatggacacaaatacaacgcaatatatgcatttccgcaacacttatctgctaaacatgtcatcttttcataggccaaaattccacaacatacaacatagcaagtctaatcgccatcctatgaaacttaccttttagcttgtggtacccccccccccttgtcacatagaacgttaaatgcttggcgccacttcaaccaacatgttttgattctatagctaacatcttcatcaatattctcgtctctcgatagcattgatcctaaatactgaaaggtatccttcctagacactacttagccttccaaactaacatctcattccccatatgtagtgtcgaagtcacatttcatatattcggtttcagttcttctgagtctaaaacctttggactctagagtctctagccacaagcccactacatcgtccacaaaaaacatacaccaagggatataccttgtatgtccctcgtgacttcatatataaccaagaaaaaaaggtaagagctcgaag

SEQ ID NO: 16823 - DNA, 3346 bp, Zea Mays
atgcgggatgcgagggctccgcagttccagaggcggggccagggcggcgtcggcgtcgtcctcctcccgctgatgctcctcctcgcaggcaccgccagcggccagcagcagatccagccgcccccggtacctccggcggacctgccggacgtggagaggcggctcaacaacctgaccgaccacgtcgccaccaccatctccgacaagttccgcttctgcgtcgccgacccgaaggaggactggaacgaggcgttcaactacacatcggacctcagcttcgtggatcgctgccttaccgagacccaaggcgacctgcctcagcgtctctgcggccccgatgaagtcaagttctacttctcaagcttgtacgaccgcgatggggacaagaacatcaacctcaagacaaacataaactgcaacatgtcttcttggggcaagggatgcgatgccggatgggcctgcgccaccgatccagttccagaccgccccagcaaccgtggtagcaacgatatcccgctgagaacaagcagctgccaggcatgctgcgagggcttcttctgcccccgcggcctcacttgcatgctccgcactattgcagattgggttccacagctgaggagagtaagcgcacggctttgatcacacagtcatacgaacttctgttcagcgagctgattttgggatttaatttgcagagtgcataataaaggcctcctgcgaagaaaacgcagagaacgagcacatcgccattcttggagcttgcatagtgggtgcgttgtgcctgctgcttcttgtcatatacaactgctcagacaaattcctcagcatccgtgaacggaggaaagcaaggtcaagggagaatgccatccggctagctcgccagcagctaaaggcgcaggagggatggaaagcggcgaaacagtttgccaggaggcatgtgagtggcatgcagggtcatctttcacgcacgttttcgcggaggaggtcgtttcgtcagcaggtagacgcagacaagtctagccatagggtgcaggaagcgccgctgatgggtcaggtccagatgcaggaaatgtcggattctgctgtgtttgcttctgagagcgcaaatgagataacagaggcgatgccatcagtcattgtagatgtcagtgatggggaagttgttgctacaaatgaaaatcctgcgccgaaaggaaaacatagatcaacccacacacaagtgttcaagtatgcgtatggcgagattgagaaggagaaattccagcagcgacaggacaacaagaatctaacttttactggggtgatcgccatggtgaaggaccagcagaaggagataactaggcctttgctcaaggttgagttcagagacctgacactgatgctagggaagaagaagctgctgaggtctatcaatggtgaactccggccggggcgtgtaactgctgtcatgggcccatcaggggctggcaagaccacatttctcaatgccgtcactgggaaggtgaacggctacaagatgacaggttctgttcttgttaatggaaagaatcttaatatccgttcctacaaaaaggtcattggatttgtgccacaagatgacattgttcatggaaacttaacggtggaggaaaacctctggttcagtgcaaagtgcaggctatcagcaagcatgaagcatcgcgacaaggtgctcctagtggagagagtgatagattctctggatcttcagggaatcagaaattcattggttggcacagttgaaaagcgtgggatttctggcgggcagaggaagcgtgtcaatgtgggcatcgagatggtgatggagccgtcgcttctaatcctggatgaaccaacatctggcctggatagctcctcgtcacaacttctcctcagagcccttcggcatgaggcgctccaaggcgtgaacgtctgtgctgttgttcatcaaccgagctacacgctgtacaacatgttcgacgatttgatactcctcgcaaaaggggggttgatggtctacaatggcccagtaaagacggtcgaggagtacttcacagctcttggaatccatgttcctgaccgcgtaaaccccccagaccactacatcgacattctcgagggcattgtgaagcctgattcttctgccatcaaagcgaagcacctaccagtgcattggatgctacacaatggctacgaagtaccaagtgacatgcaagatgatgtcaaggaaatcggtgaacaagccccacaattcaggtccagctcctcgacatctggctcgccctctcctcactgcctccccatcagaaatgcatttgcagaagagcgtgaccgtctcgaacagcgtttgtcaaaaccgaaggacttgtccagcagaaaaacaccagggatcttcatgcagtacaaatattacttgggaagggttacgaaacagcggctgcgtgaagctaggctgctcatggttgatttcctgatactaggcctagctggtatctgcttagggacgatagcaaagctcagtgacaaaacattcgggatgcctggctacatatacactataattgcagtctctcttttgtgcaagatcgcagcactgcggtcgttttcgttggagcgattgcagtacttcagagagagagaatctgggatgagctctctggcatacttccttgctagggacacgattgatcatttcagtactgttgtgaagccgatcatttacctgtctatgttctactacttcaataacccaagatcaacaattgctgataactacattgtgctcctcgcgcttgtgtactgtgtgactgggataggatacacttttgccatctgcttcagtcctggctcagcacagctgtgttctgcgcttatcccggttgttctaaccctgttatccactcaaaagagtactccaacattaatcaggagattgtgctactcaaaatgggcattggagggcttcataattgtaaatgccaagaagtatcctggagtttggcttataacccgctgtggcctgttgtttcagagtcaatttgatattcacaactacaagctctgcattttgattttgttcatgtatggtctgttcttcaggatggtggcatttgctgcaatgattttactgaagaagagatgaatgtactctagatgtaacatttagttcatctctaatatcttcattcatttttacatgtgtaaaacaattctgatgaaaggttttagagcactgacccttgtacagatgagaaaaaaggcaataggaattcatttttttctaccattattgtttcgtacatccccatatctgaagtcctatgcttcacttgaaaaaagaagattcaac

SEQ ID NO: 16824 - DNA, 3580 bp, Zea Mays
tcgcaatacgtttccacgccgtcgcgcccgcacccgcccagcccttcctcctcacgtcacgagccacgcttgctgccgtctcggcgctcctcctccgcctcggaatgcgggatgcgagggctccgcagttccagaggcggggccagggcggcgtcggcgtcgtcctcctcccgctgatgctcctcctcgcaggcaccgccagcggccagcagcagatccagccgcccccggtacctccggcggacctgccggacgtggagaggcggctcaacaacctgaccgaccacgtcgccaccaccatctccgacaagttccgcttctgcgtcgccgacccgaaggaggactggaacgaggcgttcaactacacatcggacctcagcttcgtggatcgctgccttaccgagacccaaggcgacctgcctcagcgtctctgcggccccgatgaagtcaagttctacttctcaagcttgtacgaccgcgatggggacaagaacatcaacctcaagacaaacataaactgcaacatgtcttcttggggcaagggatgcgatgccggatgggcctgcgccaccgatccagttccagaccgccccagcaaccgtggtagcaacgatatcccgctgagaacaagcagctgccaggcatgctgcgagggcttcttctgcccccgcggcctcacttgcatgctcccttgcccactaggctcatactgtccacgcgccacggcgaatcacacaactgggctctgcgacccgtacaagtatcagatagctccaaactcgactgatagctgtggaggtgctgacatgtgggctgatatccagagcacagaagaaatcttctgcccagctggttactactgtccaagcacgaccagaaaagataactgtagcagcactattgcagattgggttccacagctgaggagaagtgcataataaaggcctcctgcgaagaaaacgcagagaacgagcacatcgccattcttggagcttgcatagtgggtgcgttgtgcctgctgcttcttgtcatatacaactgctcagacaaattcctcagcatccgtgaacggaggaaagcaaggtcaagggagaatgccatccggctagctcgccagcagctaaaggcgcaggagggatggaaagcggcgaaacagtttgccaggaggcatgtgagtggcatgcagggtcatctttcacgcacgttttcgcggaggaggtcgtttcgtcagcaggtagacgcagacaagtctagccatagggtgcaggaagcgccgctgatgggtcaggtccagatgcaggaaatgtcggattctgctgtgtttgcttctgagagcgcaaatgagataacagaggcgatgccatcagtcattgtagatgtcagtgatggggaagttgttgctacaaatgaaaatcctgcgccgaaaggaaaacatagatcaacccacacacaagtgttcaagtatgcgtatggcgagattgagaaggagaaattccagcagcgacaggacaacaagaatctaacttttactggggtgatcgccatggtgaaggaccagcagaaggagataactaggcctttgctcaaggttgagttcagagacctgacactgatgctagggaagaagaagctgctgaggtctatcaatggtgaactccggccggggcgtgtaactgctgtcatgggcccatcaggggctggcaagaccacatttctcaatgccgtcactgggaaggtgaacggctacaagatgacaggttctgttcttgttaatggaaagaatcttaatatccgttcctacaaaaaggtcattggatttgtgccacaagatgacattgttcatggaaacttaacggtggaggaaaacctctggttcagtgcaaagtgcaggctatcagcaagcatgaagcatcgcgacaaggtgctcctagtggagagagtgatagattctctggatcttcagggaatcagaaattcattggttggcacagttgaaaagcgtgggatttctggcgggcagaggaagcgtgtcaatgtgggcatcgagatggtgatggagccgtcgcttctaatcctggatgaaccaacatctggcctggatagctcctcgtcacaacttctcctcagagcccttcggcatgaggcgctccaaggcgtgaacgtctgtgctgttgttcatcaaccgagctacacgctgtacaacatgttcgacgatttgatactcctcgcaaaaggggggttgatggtctacaatggcccagtaaagacggtcgaggagtacttcacagctcttggaatccatgttcctgaccgcgtaaaccccccagaccactacatcgacattctcgagggcattgtgaagcctgattcttctgccatcaaagcgaagcacctaccagtgcattggatgctacacaatggctacgaagtaccaagtgacatgcaagatgatgtcaaggaaatcggtgaacaagccccacaattcaggtccagctcctcgacatctggctcgccctctcctcactgcctccccatcagaaatgcatttgcagaagagcgtgaccgtctcgaacagcgtttgtcaaaaccgaaggacttgtccagcagaaaaacaccagggatcttcatgcagtacaaatattacttgggaagggttacgaaacagcggctgcgtgaagctaggctgctcatggttgatttcctgatactaggcctagctggtatctgcttagggacgatagcaaagctcagtgacaaaacattcgggatgcctggctacatatacactataattgcagtctctcttttgtgcaagatcgcagcactgcggtcgttttcgttggagcgattgcagtacttcagagagagagaatctgggatgagctctctggcatacttccttgctagggacacgattgatcatttcagtactgttgtgaagccgatcatttacctgtctatgttctactacttcaataacccaagatcaacaattgctgataactacattgtgctcctcgcgcttgtgtactgtgtgactgggataggatacacttttgccatctgcttcagtcctggctcagcacagctgtgttctgcgcttatcccggttgttctaaccctgttatccactcaaaagagtactccaacattaatcaggagattgtgctactcaaaatgggcattggagggcttcataattgtaaatgccaagaagtatcctggagtttggcttataacccgctgtggcctgttgtttcagagtcaatttgatattcacaactacaagctctgcattttgattttgttcatgtatggtctgttcttcaggatggtggcatttgctgcaatgattttactgaagaagagatgaatgtactctagatgtaacatttagttcatctctaatatcttcattcatttttacatgtgtaaaacaattctgatgaaaggttttagagcactgacccttgtacagatgagaaaaaaggcaataggaattcatttttttctaccattattgtttcgtacatccccatatctgaagtcctatgcttcacttgaaaaaagaagattcaac

SEQ ID NO: 16825 - DNA, 3506 bp, Zea Mays
tcgcaatacgtttccacgccgtcgcgcccgcacccgcccagcccttcctcctcacgtcacgagccacgcttgctgccgtctcggcgctcctcctccgcctcggaatgcgggatgcgagggctccgcagttccagaggcggggccagggcggcgtcggcgtcgtcctcctcccgctgatgctcctcctcgcaggcaccgccagcggccagcagcagatccagccgcccccggtacctccggcggacctgccggacgtggagaggcggctcaacaacctgaccgaccacgtcgccaccaccatctccgacaagttccgcttctgcgtcgccgacccgaaggaggactggaacgaggcgttcaactacacatcggacctcagcttcgtggatcgctgccttaccgagacccaaggcgacctgcctcagcgtctctgcggccccgatgaagtcaagttctacttctcaagcttgtacgaccgcgatggggacaagaacatcaacctcaagacaaacataaactgcaacatgtcttcttggggcaagggatgcgatgccggatgggcctgcgccaccgatccagttccagaccgccccagcaaccgtggtagcaacgatatcccgctgagaacaagcagctgccaggcatgctgcgagggcttcttctgcccccgcggcctcacttgcatgctcccttgcccactaggctcatactgtccacgcgccacggcgaatcacacaactgggctctgcgacccgtacaagtatcagatagctccaaactcgactgatagctgtggaggtgctgacatgtgggctgatatccagagcacagaagaaatcttctgcccagctggttactactgtccaagcacgaccagaaaagataactgtagcagcactattgcagattgggttccacagctgaggagaggtgcgttgtgcctgctgcttcttgtcatatacaactgctcagacaaattcctcagcatccgtgaacggaggaaagcaaggtcaagggagaatgccatccggctagctcgccagcagctaaaggcgcaggagggatggaaagcggcgaaacagtttgccaggaggcatgtgagtggcatgcagggtcatctttcacgcacgttttcgcggaggaggtcgtttcgtcagcaggtagacgcagacaagtctagccatagggtgcaggaagcgccgctgatgggtcaggtccagatgcaggaaatgtcggattctgctgtgtttgcttctgagagcgcaaatgagataacagaggcgatgccatcagtcattgtagatgtcagtgatggggaagttgttgctacaaatgaaaatcctgcgccgaaaggaaaacatagatcaacccacacacaagtgttcaagtatgcgtatggcgagattgagaaggagaaattccagcagcgacaggacaacaagaatctaacttttactggggtgatcgccatggtgaaggaccagcagaaggagataactaggcctttgctcaaggttgagttcagagacctgacactgatgctagggaagaagaagctgctgaggtctatcaatggtgaactccggccggggcgtgtaactgctgtcatgggcccatcaggggctggcaagaccacatttctcaatgccgtcactgggaaggtgaacggctacaagatgacaggttctgttcttgttaatggaaagaatcttaatatccgttcctacaaaaaggtcattggatttgtgccacaagatgacattgttcatggaaacttaacggtggaggaaaacctctggttcagtgcaaagtgcaggctatcagcaagcatgaagcatcgcgacaaggtgctcctagtggagagagtgatagattctctggatcttcagggaatcagaaattcattggttggcacagttgaaaagcgtgggatttctggcgggcagaggaagcgtgtcaatgtgggcatcgagatggtgatggagccgtcgcttctaatcctggatgaaccaacatctggcctggatagctcctcgtcacaacttctcctcagagcccttcggcatgaggcgctccaaggcgtgaacgtctgtgctgttgttcatcaaccgagctacacgctgtacaacatgttcgacgatttgatactcctcgcaaaaggggggttgatggtctacaatggcccagtaaagacggtcgaggagtacttcacagctcttggaatccatgttcctgaccgcgtaaaccccccagaccactacatcgacattctcgagggcattgtgaagcctgattcttctgccatcaaagcgaagcacctaccagtgcattggatgctacacaatggctacgaagtaccaagtgacatgcaagatgatgtcaaggaaatcggtgaacaagccccacaattcaggtccagctcctcgacatctggctcgccctctcctcactgcctccccatcagaaatgcatttgcagaagagcgtgaccgtctcgaacagcgtttgtcaaaaccgaaggacttgtccagcagaaaaacaccagggatcttcatgcagtacaaatattacttgggaagggttacgaaacagcggctgcgtgaagctaggctgctcatggttgatttcctgatactaggcctagctggtatctgcttagggacgatagcaaagctcagtgacaaaacattcgggatgcctggctacatatacactataattgcagtctctcttttgtgcaagatcgcagcactgcggtcgttttcgttggagcgattgcagtacttcagagagagagaatctgggatgagctctctggcatacttccttgctagggacacgattgatcatttcagtactgttgtgaagccgatcatttacctgtctatgttctactacttcaataacccaagatcaacaattgctgataactacattgtgctcctcgcgcttgtgtactgtgtgactgggataggatacacttttgccatctgcttcagtcctggctcagcacagctgtgttctgcgcttatcccggttgttctaaccctgttatccactcaaaagagtactccaacattaatcaggagattgtgctactcaaaatgggcattggagggcttcataattgtaaatgccaagaagtatcctggagtttggcttataacccgctgtggcctgttgtttcagagtcaatttgatattcacaactacaagctctgcattttgattttgttcatgtatggtctgttcttcaggatggtggcatttgctgcaatgattttactgaagaagagatgaatgtactctagatgtaacatttagttcatctctaatatcttcattcatttttacatgtgtaaaacaattctgatgaaaggttttagagcactgacccttgtacagatgagaaaaaaggcaataggaattcatttttttctaccattattgtttcgtacatccccatatctgaagtcctatgcttcacttgaaaaaagaagattcaac

SEQ ID NO: 16826 - DNA, 3511 bp, Zea Mays
atcgcaatacgtttccacgccgtcgcgcccgcacccgcccagcccttcctcctcacgtcacgagccacgcttgctgccgtctcggcgctcctcctccgcctcggaatgcgggatgcgagggctccgcagttccagaggcggggccagggcggcgtcggcgtcgtcctcctcccgctgatgctcctcctcgcaggcaccgccagcggccagcagcagatccagccgcccccggtacctccggcggacctgccggacgtggagaggcggctcaacaacctgaccgaccacgtcgccaccaccatctccgacaagttccgcttctgcgtcgccgacccgaaggaggactggaacgaggcgttcaactacacatcggacctcagcttcgtggatcgctgccttaccgagacccaaggcgacctgcctcagcgtctctgcggccccgatgaagtcaagttctacttctcaagcttgtacgaccgcgatggggacaagaacatcaacctcaagacaaacataaactgcaacatgtcttcttggggcaagggatgcgatgccggatgggcctgcgccaccgatccagttccagaccgccccagcaaccgtggtagcaacgatatcccgctgagaacaagcagctgccaggcatgctgcgagggcttcttctgcccccgcggcctcacttgcatgctcccttgcccactaggctcatactgtccacgcgccacggcgaatcacacaactgggctctgcgacccgtacaagtatcagatagctccaaactcgactgatagctgtggaggtgctgacatgtgggctgatatccagagcacagaagaaatcttctgcccagctggttactactgtccaagcacgaccagaaaagataactgtagcagtgggcactattgcagattgggttccacagctgaggagaggtgcgttgtgcctgctgcttcttgtcatatacaactgctcagacaaattcctcagcatccgtgaacggaggaaagcaaggtcaagggagaatgccatccggctagctcgccagcagctaaaggcgcaggagggatggaaagcggcgaaacagtttgccaggaggcatgtgagtggcatgcagggtcatctttcacgcacgttttcgcggaggaggtcgtttcgtcagcaggtagacgcagacaagtctagccatagggtgcaggaagcgccgctgatgggtcaggtccagatgcaggaaatgtcggattctgctgtgtttgcttctgagagcgcaaatgagataacagaggcgatgccatcagtcattgtagatgtcagtgatggggaagttgttgctacaaatgaaaatcctgcgccgaaaggaaaacatagatcaacccacacacaagtgttcaagtatgcgtatggcgagattgagaaggagaaattccagcagcgacaggacaacaagaatctaacttttactggggtgatcgccatggtgaaggaccagcagaaggagataactaggcctttgctcaaggttgagttcagagacctgacactgatgctagggaagaagaagctgctgaggtctatcaatggtgaactccggccggggcgtgtaactgctgtcatgggcccatcaggggctggcaagaccacatttctcaatgccgtcactgggaaggtgaacggctacaagatgacaggttctgttcttgttaatggaaagaatcttaatatccgttcctacaaaaaggtcattggatttgtgccacaagatgacattgttcatggaaacttaacggtggaggaaaacctctggttcagtgcaaagtgcaggctatcagcaagcatgaagcatcgcgacaaggtgctcctagtggagagagtgatagattctctggatcttcagggaatcagaaattcattggttggcacagttgaaaagcgtgggatttctggcgggcagaggaagcgtgtcaatgtgggcatcgagatggtgatggagccgtcgcttctaatcctggatgaaccaacatctggcctggatagctcctcgtcacaacttctcctcagagcccttcggcatgaggcgctccaaggcgtgaacgtctgtgctgttgttcatcaaccgagctacacgctgtacaacatgttcgacgatttgatactcctcgcaaaaggggggttgatggtctacaatggcccagtaaagacggtcgaggagtacttcacagctcttggaatccatgttcctgaccgcgtaaaccccccagaccactacatcgacattctcgagggcattgtgaagcctgattcttctgccatcaaagcgaagcacctaccagtgcattggatgctacacaatggctacgaagtaccaagtgacatgcaagatgatgtcaaggaaatcggtgaacaagccccacaattcaggtccagctcctcgacatctggctcgccctctcctcactgcctccccatcagaaatgcatttgcagaagagcgtgaccgtctcgaacagcgtttgtcaaaaccgaaggacttgtccagcagaaaaacaccagggatcttcatgcagtacaaatattacttgggaagggttacgaaacagcggctgcgtgaagctaggctgctcatggttgatttcctgatactaggcctagctggtatctgcttagggacgatagcaaagctcagtgacaaaacattcgggatgcctggctacatatacactataattgcagtctctcttttgtgcaagatcgcagcactgcggtcgttttcgttggagcgattgcagtacttcagagagagagaatctgggatgagctctctggcatacttccttgctagggacacgattgatcatttcagtactgttgtgaagccgatcatttacctgtctatgttctactacttcaataacccaagatcaacaattgctgataactacattgtgctcctcgcgcttgtgtactgtgtgactgggataggatacacttttgccatctgcttcagtcctggctcagcacagctgtgttctgcgcttatcccggttgttctaaccctgttatccactcaaaagagtactccaacattaatcaggagattgtgctactcaaaatgggcattggagggcttcataattgtaaatgccaagaagtatcctggagtttggcttataacccgctgtggcctgttgtttcagagtcaatttgatattcacaactacaagctctgcattttgattttgttcatgtatggtctgttcttcaggatggtggcatttgctgcaatgattttactgaagaagagatgaatgtactctagatgtaacatttagttcatctctaatatcttcattcatttttacatgtgtaaaacaattctgatgaaaggttttagagcactgacccttgtacagatgagaaaaaaggcaataggaattcatttttttctaccattattgtttcgtacatccccatatctgaagtcctatgcttcacttgaaaaaagaagattcaac

SEQ ID NO: 16827 - DNA, 3513 bp, Zea Mays
ctcgccatcgcaatacgtttccacgccgtcgcgcccgcacccgcccagcccttcctcctcacgtcacgagccacgcttgctgccgtctcggcgctcctcctccgcctcggaatgcgggatgcgagggctccgcagttccagaggcggggccagggcggcgtcggcgtcgtcctcctcccgctgatgctcctcctcgcaggcaccgccagcggccagcagcagatccagccgcccccggtacctccggcggacctgccggacgtggagaggcggctcaacaacctgaccgaccacgtcgccaccaccatctccgacaagttccgcttctgcgtcgccgacccgaggactggaacgaggcgttcaactacacatcggacctcagcttcgtggatcgctgccttaccgagacccaaggcgacctgcctcagcgtctctgcggccccgatgaagtcaagttctacttctcaagcttgtacgaccgcgatggggacaagaacatcaacctcaagacaaacataaactgcaacatgtcttcttggggcaagggatgcgatgccggatgggcctgcgccaccgatccagttccagaccgccccagcaaccgtggtagcaacgatatcccgctgagaacaagcagctgccaggcatgctgcgagggcttcttctgcccccgcggcctcacttgcatgctcccttgcccactaggctcatactgtccacgcgccacggcgaatcacacaactgggctctgcgacccgtacaagtatcagatagctccaaactcgactgatagctgtggaggtgctgacatgtgggctgatatccagagcacagaagaaatcttctgcccagctggttactactgtccaagcacgaccagaaaagataactgtagcagtgggcactattgcagattgggttccacagctgaggagaggtgcgttgtgcctgctgcttcttgtcatatacaactgctcagacaaattcctcagcatccgtgaacggaggaaagcaaggtcaagggagaatgccatccggctagctcgccagcagctaaaggcgcaggagggatggaaagcggcgaaacagtttgccaggaggcatgtgagtggcatgcagggtcatctttcacgcacgttttcgcggaggaggtcgtttcgtcagcaggtagacgcagacaagtctagccatagggtgcaggaagcgccgctgatgggtcaggtccagatgcaggaaatgtcggattctgctgtgtttgcttctgagagcgcaaatgagataacagaggcgatgccatcagtcattgtagatgtcagtgatggggaagttgttgctacaaatgaaaatcctgcgccgaaaggaaaacatagatcaacccacacacaagtgttcaagtatgcgtatggcgagattgagaaggagaaattccagcagcgacaggacaacaagaatctaacttttactggggtgatcgccatggtgaaggaccagcagaaggagataactaggcctttgctcaaggttgagttcagagacctgacactgatgctagggaagaagaagctgctgaggtctatcaatggtgaactccggccggggcgtgtaactgctgtcatgggcccatcaggggctggcaagaccacatttctcaatgccgtcactgggaaggtgaacggctacaagatgacaggttctgttcttgttaatggaaagaatcttaatatccgttcctacaaaaaggtcattggatttgtgccacaagatgacattgttcatggaaacttaacggtggaggaaaacctctggttcagtgcaaagtgcaggctatcagcaagcatgaagcatcgcgacaaggtgctcctagtggagagagtgatagattctctggatcttcagggaatcagaaattcattggttggcacagttgaaaagcgtgggatttctggcgggcagaggaagcgtgtcaatgtgggcatcgagatggtgatggagccgtcgcttctaatcctggatgaaccaacatctggcctggatagctcctcgtcacaacttctcctcagagcccttcggcatgaggcgctccaaggcgtgaacgtctgtgctgttgttcatcaaccgagctacacgctgtacaacatgttcgacgatttgatactcctcgcaaaaggggggttgatggtctacaatggcccagtaaagacggtcgaggagtacttcacagctcttggaatccatgttcctgaccgcgtaaaccccccagaccactacatcgacattctcgagggcattgtgaagcctgattcttctgccatcaaagcgaagcacctaccagtgcattggatgctacacaatggctacgaagtaccaagtgacatgcaagatgatgtcaaggaaatcggtgaacaagccccacaattcaggtccagctcctcgacatctggctcgccctctcctcactgcctccccatcagaaatgcatttgcagaagagcgtgaccgtctcgaacagcgtttgtcaaaaccgaaggacttgtccagcagaaaaacaccagggatcttcatgcagtacaaatattacttgggaagggttacgaaacagcggctgcgtgaagctaggctgctcatggttgatttcctgatactaggcctagctggtatctgcttagggacgatagcaaagctcagtgacaaaacattcgggatgcctggctacatatacactataattgcagtctctcttttgtgcaagatcgcagcactgcggtcgttttcgttggagcgattgcagtacttcagagagagagaatctgggatgagctctctggcatacttccttgctagggacacgattgatcatttcagtactgttgtgaagccgatcatttacctgtctatgttctactacttcaataacccaagatcaacaattgctgataactacattgtgctcctcgcgcttgtgtactgtgtgactgggataggatacacttttgccatctgcttcagtcctggctcagcacagctgtgttctgcgcttatcccggttgttctaaccctgttatccactcaaaagagtactccaacattaatcaggagattgtgctactcaaaatgggcattggagggcttcataattgtaaatgccaagaagtatcctggagtttggcttataacccgctgtggcctgttgtttcagagtcaatttgatattcacaactacaagctctgcattttgattttgttcatgtatggtctgttcttcaggatggtggcatttgctgcaatgattttactgaagaagagatgaatgtactctagatgtaacatttagttcatctctaatatcttcattcatttttacatgtgtaaaacaattctgatgaaaggttttagagcactgacccttgtacagatgagaaaaaaggcaataggaattcatttttttctaccattattgtttcgtacatccccatatctgaagtcctatgcttcacttgaaaaaagaagattcaac

SEQ ID NO: 16828 - DNA, 3815 bp, Zea Mays
ctcaatctatatactacactttcacaagcagtactatactactatagacgtcgtcctagctcgtttccccgctcgccatcgcaatacgtttccacgccgtcgcgcccgcacccgcccagcccttcctcctcacgtcacgagccacgcttgctgccgtctcggcgctcctcctccgcctcggaatgcgggatgcgagggctccgcagttccagaggcggggccagggcggcgtcggcgtcgtcctcctcccgctgatgctcctcctcgcaggcaccgccagcggccagcagcagatccagccgcccccggtacctccggcggacctgccggacgtggagaggcggctcaacaacctgaccgaccacgtcgccaccaccatctccgacaagttccgcttctgcgtcgccgacccgaaggaggactggaacgaggcgttcaactacacatcggacctcagcttcgtggatcgctgccttaccgagacccaaggcgacctgcctcagcgtctctgcggccccgatgaagtcaagttctacttctcaagcttgtacgaccgcgatggggacaagaacatcaacctcaagacaaacataaactgcaacatgtcttcttggggcaagggatgcgatgccggatgggcctgcgccaccgatccagttccagaccgccccagcaaccgtggtagcaacgatatcccgctgagaacaagcagctgccaggcatgctgcgagggcttcttctgcccccgcggcctcacttgcatgctcccttgcccactaggctcatactgtccacgcgccacggcgaatcacacaactgggctctgcgacccgtaaagatctttctggttgcgttattcctgtcgcaataggtttcttgataaagaaatccagtatctgaaccgtggaactttgatcaggtacaagtatcagatagctccaaactcgactgatagctgtggaggtgctgacatgtgggctgatatccagagcacagaagaaatcttctgcccagctggttactactgtccaagcacgaccagaaaagataactgtagcagtgggcactattgcagattgggttccacagctgaggagaagtgcataataaaggcctcctgcgaagaaaacgcagagaacgagcacatcgccattcttggagcttgcatagtgtagtaatcaactgcactgcacccggttcttgtgtttgcgtatgattcaaaccttttgccattctagggtgcgttgtgcctgctgcttcttgtcatatacaactgctcagacaaattcctcagcatccgtgaacggaggaaagcaaggtcaagggagaatgccatccggctagctcgccagcagctaaaggcgcaggagggatggaaagcggcgaaacagtttgccaggaggcatgtgagtggcatgcagggtcatctttcacgcacgttttcgcggaggaggtcgtttcgtcagcaggtagacgcagacaagtctagccatagggtgcaggaagcgccgctgatgggtcaggtccagatgcaggaaatgtcggattctgctgtgtttgcttctgagagcgcaaatgagataacagaggcgatgccatcagtcattgtagatgtcagtgatggggaagttgttgctacaaatgaaaatcctgcgccgaaaggaaaacatagatcaacccacacacaagtgttcaagtatgcgtatggcgagattgagaaggagaaattccagcagcgacaggacaacaagaatctaacttttactggggtgatcgccatggtgaaggaccagcagaaggagataactaggcctttgctcaaggttgagttcagagacctgacactgatgctagggaagaagaagctgctgaggtctatcaatggtgaactccggccggggcgtgtaactgctgtcatgggcccatcaggggctggcaagaccacatttctcaatgccgtcactgggaaggtgaacggctacaagatgacaggttctgttcttgttaatggaaagaatcttaatatccgttcctacaaaaaggtcattggatttgtgccacaagatgacattgttcatggaaacttaacggtggaggaaaacctctggttcagtgcaaagtgcaggctatcagcaagcatgaagcatcgcgacaaggtgctcctagtggagagagtgatagattctctggatcttcagggaatcagaaattcattggttggcacagttgaaaagcgtgggatttctggcgggcagaggaagcgtgtcaatgtgggcatcgagatggtgatggagccgtcgcttctaatcctggatgaaccaacatctggcctggatagctcctcgtcacaacttctcctcagagcccttcggcatgaggcgctccaaggcgtgaacgtctgtgctgttgttcatcaaccgagctacacgctgtacaacatgttcgacgatttgatactcctcgcaaaaggggggttgatggtctacaatggcccagtaaagacggtcgaggagtacttcacagctcttggaatccatgttcctgaccgcgtaaaccccccagaccactacatcgacattctcgagggcattgtgaagcctgattcttctgccatcaaagcgaagcacctaccagtgcattggatgctacacaatggctacgaagtaccaagtgacatgcaagatgatgtcaaggaaatcggtgaacaagccccacaattcaggtccagctcctcgacatctggctcgccctctcctcactgcctccccatcagaaatgcatttgcagaagagcgtgaccgtctcgaacagcgtttgtcaaaaccgaaggacttgtccagcagaaaaacaccagggatcttcatgcagtacaaatattacttgggaagggttacgaaacagcggctgcgtgaagctaggctgctcatggttgatttcctgatactaggcctagctggtatctgcttagggacgatagcaaagctcagtgacaaaacattcgggatgcctggctacatatacactataattgcagtctctcttttgtgcaagatcgcagcactgcggtcgttttcgttggagcgattgcagtacttcagagagagagaatctgggatgagctctctggcatacttccttgctagggacacgattgatcatttcagtactgttgtgaagccgatcatttacctgtctatgttctactacttcaataacccaagatcaacaattgctgataactacattgtgctcctcgcgcttgtgtactgtgtgactgggataggatacacttttgccatctgcttcagtcctggctcagcacagctgtgttctgcgcttatcccggttgttctaaccctgttatccactcaaaagagtactccaacattaatcaggagattgtgctactcaaaatgggcattggagggcttcataattgtaaatgccaagaagtatcctggagtttggcttataacccgctgtggcctgttgtttcagagtcaatttgatattcacaactacaagctctgcattttgattttgttcatgtatggtctgttcttcaggatggtggcatttgctgcaatgattttactgaagaagagatgaatgtactctagatgtaacatttagttcatctctaatatcttcattcatttttacatgtgtaaaacaattctgatgaaaggttttagagcactgacccttgtacagatgagaaaaaaggcaataggaattcatttttttctaccattattgtttcgtacatccccatatctgaagtcctatgcttcacttgaaaaaagaagattcaac

SEQ ID NO: 16829 - DNA, 3675 bp, Zea Mays
cggagcaggagtactcaatctatatactacactttcacaagcagtactatactactatagacgtcgtcctagctcgtttccccgctcgccatcgcaatacgtttccacgccgtcgcgcccgcacccgcccagcccttcctcctcacgtcacgagccacgcttgctgccgtctcggcgctcctcctccgcctcggaatgcgggatgcgagggctccgcagttccagaggcggggccagggcggcgtcggcgtcgtcctcctcccgctgatgctcctcctcgcaggcaccgccagcggccagcagcagatccagccgcccccggtacctccggcggacctgccggacgtggagaggcggctcaacaacctgaccgaccacgtcgccaccaccatctccgacaagttccgcttctgcgtcgccgacccgaaggaggactggaacgaggcgttcaactacacatcggacctcagcttcgtggatcgctgccttaccgagacccaaggcgacctgcctcagcgtctctgcggccccgatgaagtcaagttctacttctcaagcttgtacgaccgcgatggggacaagaacatcaacctcaagacaaacataaactgcaacatgtcttcttggggcaagggatgcgatgccggatgggcctgcgccaccgatccagttccagaccgccccagcaaccgtggtagcaacgatatcccgctgagaacaagcagctgccaggcatgctgcgagggcttcttctgcccccgcggcctcacttgcatgctcccttgcccactaggctcatactgtccacgcgccacggcgaatcacacaactgggctctgcgacccgtacaagtatcagatagctccaaactcgactgatagctgtggaggtgctgacatgtgggctgatatccagagcacagaagaaatcttctgcccagctggttactactgtccaagcacgaccagaaaagataactgtagcagtgggcactattgcagattgggttccacagctgaggagaagtgcataataaaggcctcctgcgaagaaaacgcagagaacgagcacatcgccattcttggagcttgcatagtgggtgcgttgtgcctgctgcttcttgtcatatacaactgctcagacaaattcctcagcatccgtgaacggaggaaagcaaggtcaagggagaatgccatccggctagctcgccagcagctaaaggcgcaggagggatggaaagcggcgaaacagtttgccaggaggcatgtgagtggcatgcagggtcatctttcacgcacgttttcgcggaggaggtcgtttcgtcagcaggtagacgcagacaagtctagccatagggtgcaggaagcgccgctgatgggtcaggtccagatgcaggaaatgtcggattctgctgtgtttgcttctgagagcgcaaatgagataacagaggcgatgccatcagtcattgtagatgtcagtgatggggaagttgttgctacaaatgaaaatcctgcgccgaaaggaaaacatagatcaacccacacacaagtgttcaagtatgcgtatggcgagattgagaaggagaaattccagcagcgacaggacaacaagaatctaacttttactggggtgatcgccatggtgaaggaccagcagaaggagataactaggcctttgctcaaggttgagttcagagacctgacactgatgctagggaagaagaagctgctgaggtctatcaatggtgaactccggccggggcgtgtaactgctgtcatgggcccatcaggggctggcaagaccacatttctcaatgccgtcactgggaaggtgaacggctacaagatgacaggttctgttcttgttaatggaaagaatcttaatatccgttcctacaaaaaggtcattggatttgtgccacaagatgacattgttcatggaaacttaacggtggaggaaaacctctggttcagtgcaaagtgcaggctatcagcaagcatgaagcatcgcgacaaggtgctcctagtggagagagtgatagattctctggatcttcagggaatcagaaattcattggttggcacagttgaaaagcgtgggatttctggcgggcagaggaagcgtgtcaatgtgggcatcgagatggtgatggagccgtcgcttctaatcctggatgaaccaacatctggcctggatagctcctcgtcacaacttctcctcagagcccttcggcatgaggcgctccaaggcgtgaacgtctgtgctgttgttcatcaaccgagctacacgctgtacaacatgttcgacgatttgatactcctcgcaaaaggggggttgatggtctacaatggcccagtaaagacggtcgaggagtacttcacagctcttggaatccatgttcctgaccgcgtaaaccccccagaccactacatcgacattctcgagggcattgtgaagcctgattcttctgccatcaaagcgaagcacctaccagtgcattggatgctacacaatggctacgaagtaccaagtgacatgcaagatgatgtcaaggaaatcggtgaacaagccccacaattcaggtccagctcctcgacatctggctcgccctctcctcactgcctccccatcagaaatgcatttgcagaagagcgtgaccgtctcgaacagcgtttgtcaaaaccgaaggacttgtccagcagaaaaacaccagggatcttcatgcagtacaaatattacttgggaagggttacgaaacagcggctgcgtgaagctaggctgctcatggttgatttcctgatactaggcctagctggtatctgcttagggacgatagcaaagctcagtgacaaaacattcgggatgcctggctacatatacactataattgcagtctctcttttgtgcaagatcgcagcactgcggtcgttttcgttggagcgattgcagtacttcagagagagagaatctgggatgagctctctggcatacttccttgctagggacacgattgatcatttcagtactgttgtgaagccgatcatttacctgtctatgttctactacttcaataacccaagatcaacaattgctgataactacattgtgctcctcgcgcttgtgtactgtgtgactgggataggatacacttttgccatctgcttcagtcctggctcagcacagctgtgttctgcgcttatcccggttgttctaaccctgttatccactcaaaagagtactccaacattaatcaggagattgtgctactcaaaatgggcattggagggcttcataattgtaaatgccaagaagtatcctggagtttggcttataacccgctgtggcctgttgtttcagagtcaatttgatattcacaactacaagctctgcattttgattttgttcatgtatggtctgttcttcaggatggtggcatttgctgcaatgattttactgaagaagagatgaatgtactctagatgtaacatttagttcatctctaatatcttcattcatttttacatgtgtaaaacaattctgatgaaaggttttagagcactgacccttgtacagatgagaaaaaaggcaataggaattcatttttttctaccattattgtttcgtacatccccatatctgaagtcctatgcttcacttgaaaaaagaagattcaac

SEQ ID NO: 16830 - DNA, 2511 bp, Zea Mays
caggaacattttggcaattctacatctttatctgttggaccatctggccaactgtttaatggtgcaggagactgggatgaatggcagtttggaccgagcacagttcatagtggtggtgctatggcaaactatgcatttgatatgaatctcctttggacagatatgaatccagacaatgctgaatatcacagaaatatccagaatcacttcatgtcaaacattgaaaacatgaatgcttatggtaatagggatcttgatgcttcctccatgtttgattctgatatttcagatgctttatctgggttgaggctgtctaataattcagtaatggatcaaaggaataatagggaagagctagcagatgaaatactcgagcgtcaaagagatttctctaaaactgttgatgaaacccgatcatctttggttggtaatgtttttcatgcacctaggtcagatgtgcatccatcacgaatatatggagatggtattttacggaggcagaccagtgcatgtgcattagatggttccaatgtttcaaggatcaatcgccatcacataaagggtgttgatcgcccatctttggctgaccagctagctataatgcaatcaggcaactttcctagagggaccaatctttctcgcaatgtgtctgtgactaacatgtccaaccccatgagcaacagatacaacagcaatacagacctggatttggctaggagtcgaatgacattttttaaggagatacttgcacaacagtatctgcaggaggataatctgtcatataacgatagtaggatctatcatgatgagccttgttttccctgttcaagaatgcaaagatctggatctcatttttattcaaactcgcggtgcattctatcccatggtgatcggcaatcacggctcttgtccctcaataggaaggcaatgggtagaaatattggatcacatgcctatcatgataatacattatcaaactacctggatgtgctttctttggataatgcagatagaaacggtgctgattcagtggaactgattgatttagtgggtcacgttaaggaaattagtatggatcaatatggaagccggtttattcaacaaaaactcgaaattgcatcactggatgaccgggaaaaaatatttccagagatattatccaatgccattgctctaacaactgatgtttttggcaattatgttatccagaagtttttcgagttcgctacagaaaggcagttaatccaattggcagatcaactcaaaggttttggaggtagttgataaggatcgaaagattgacattgttcatgagctcaggaatcatattctgaaatgtattggtgatcaaaatggtaaccatgtgatccagaaatgcatcgagtgtgttcctgaagaccgcattccatttgttattgatcctatactttcacaaattcttgttttatgtacccatcaatatggctgcagagttattcagagagttttagagcattgccatgatcctgtgactcaaagtgctaccatgaatgaaattgtgcagcaaaccttccatctgacagatgataaatttgggaactatgttgttcagcatgtgttgaaacatgggaaaccagaagagcgttcggccatcattcaaaagctctctgggcaagtggtcatcttgagcaagctaaagtatgcttctaatgtcatcgagaaatgtttggagtttggaactcttgaagaacgtgatagccttattggggagatcatttcttctggtcaaacatttcaggaattgatgaaggatcagtttggtaactatgttgtacagaaagtccttaagacatgtgatgaaagatacctagagatgatcctctcgagcatcaagttacacttgaatgaactgaagaattacacgtacggaaagcacattgtgacacgcgtcgagaagctaatcgttacaggaggtgagcaaacagcaaattattcgcatcacaatgcaaaaaggactttcgaagtaaaagtaactcttgtactgagcaaaacactcggtttctgatttcagaggaacgagcaaggatggcctccctgagcggccagcgtcagcagcagccaccaaactgtacagctgtcgacgcacactaatccttttttttatgcattggcgtcaaatgcgacggcacattggttccttttaacgcattgtggcgtcaaatacgagtagctagatgagagctaggtttttgggcactgtaaattcttttggccatgtgcaagttcatttacagtggataatagatgtacattgtgctggagcgttcgttagctttggtatggtaggtgatcgagagcagtgctgtgtaatataaatatactcttgttgttcaccgtacgacgtacagttgctcttttgtagcactgatctcgtttttcattcatatgtaatctctaattcattcgtaaggctgctttcaagttccaacccttgtcttaatcagcgccacattagtgatcaattgtgctgtc

SEQ ID NO: 16831 - DNA, 2945 bp, Zea Mays
gcgccgaatcctagtcctagcgatgccaagatttccattccctcccgcccctctaaacccagagcctaaaaccccggaaaccctaaccctagagaaaaaagggcgccgccacccaccctggccaccggggcgcgctcatttgttccccgccccttttgcaggtggtttcgttcaaacccaatctattttttcgcgagcgcgcgcgtgcggcgttgtgagaggaggcgaagaagatggctccattcggcgacggcggtgtcggctgtggcgatggaggggaggcgctgcgtgggtgggaccctctgcgcagtggcagcgcgccgccaacgatggagggcgcggcggcggcagcggcggcggcggagaggagggtatttggcggcggcggtgacggcgcgtcgttcttctccgggatcgacgggctcatgtttggcgcgaggatggacgaggtcagcaggtgccgcggtgccgccggagctcaggaacattttggcaattctacatctttatctgttggaccatctggccaactgtttaatggtgcaggagactgggatgaatggcagtttggaccgagcacagttcatagtggtggtgctatggcaaactatgcatttgatatgaatctcctttggacagatatgaatccagacaatgctgaatatcacagaaatatccagaatcacttcatgtcaaacattgaaaacatgaatgcttatggtaatagggatcttgatgcttcctccatgtttgattctgatatttcagatgctttatctgggttgaggctgtctaataattcagtaatggatcaaaggaataatagggaagagctagcagatgaaatactcgagcgtcaaagagatttctctaaaactgttgatgaaacccgatcatctttggttggtaatgtttttcatgcacctaggtcagatgtgcatccatcacgaatatatggagatggtattttacggaggcagaccagtgcatgtgcattagatggttccaatgtttcaaggatcaatcgccatcacataaagggtgttgatcgcccatctttggctgaccagctagctataatgcaatcaggcaactttcctagagggaccaatctttctcgcaatgtgtctgtgactaacatgtccaaccccatgagcaacagatacaacagcaatacagacctggatttggctaggagtcgaatgacattttttaaggagatacttgcacaacagtatctgcaggaggataatctgtcatataacgatagtaggatctatcatgatgagccttgttttccctgttcaagaatgcaaagatctggatctcatttttattcaaactcgcggtgcattctatcccatggtgatcggcaatcacggctcttgtccctcaataggaaggcaatgggtagaaatattggatcacatgcctatcatgataatacattatcaaactacctggatgtgctttctttggataatgcagatagaaacggtgctgattcagtggaactgattgatttagtgggtcacgttaaggaaattagtatggatcaatatggaagccggtttattcaacaaaaactcgaaattgcatcactggatgaccgggaaaaaatatttccagagatattatccaatgccattgctctaacaactgatgtttttggcaattatgttatccagaagtttttcgagttcgctacagaaaggcagttaatccaattggcagatcaactcaaaggtcacattttggaactcagcctccagatgtatggttgcagggtagttcagaaggttttggaggtagttgataaggatcgaaagattgacattgttcatgagctcaggaatcatattctgaaatgtattggtgatcaaaatggtaaccatgtgatccagaaatgcatcgagtgtgttcctgaagaccgcattccatttgttattgatcctatactttcacaaattcttgttttatgtacccatcaatatggctgcagagttattcagagagttttagagcattgccatgatcctgtgactcaaagtgctaccatgaatgaaattgtgcagcaaaccttccatctgacagatgataaatttgggaactatgttgttcagcatgtgttgaaacatgggaaaccagaagagcgttcggccatcattcaaaagctctctgggcaagtggtcatcttgagcaagctaaagtatgcttctaatgtcatcgagaaatgtttggagtttggaactcttgaagaacgtgatagccttattggggagatcatttcttctggtcaaacatttcaggaattgatgaaggatcagtttggtaactatgttgtacagaaagtccttaagacatgtgatgaaagatacctagagatgatcctctcgagcatcaagttacacttgaatgaactgaagaattacacgtacggaaagcacattgtgacacgcgtcgagaagctaatcgttacaggagaggaacgagcaaggatggcctccctgagcggccagcgtcagcagcagccaccaaactgtacagctgtcgacgcacactaatccttttttttatgcattggcgtcaaatgcgacggcacattggttccttttaacgcattgtggcgtcaaatacgagtagctagatgagagctaggtttttgggcactgtaaattcttttggccatgtgcaagttcatttacagtggataatagatgtacattgtgctggagcgttcgttagctttggtatggtaggtgatcgagagcagtgctgtgtaatataaatatactcttgttgttcaccgtacgacgtacagttgctcttttgtagcactgatctcgtttttcattcatatgtaatctctaattcattcgtaaggctgctttcaagttccaacccttgtcttaatcagcgccacattagtgatcaattgtgctgtc

SEQ ID NO: 16832 - DNA, 2572 bp, Zea Mays
ctgagagccataccaaaagaactgatggcagctccccttctcttccccttgctgctgctgctgctgctgctgtcgtcctctaccactcctcttcaagctcaacagaacttcacccaagtgacttggtatgccaagaccaacgacccggatccagcgccggtgcaagctccatccggctcacgcctccagctcaactccaatggggcgctctcgctccaggactccgccggcacagaggtatggaatccccaagtcgtgggcgcatcctacgctgccatgctcgattctggaaactttgtgctggctgctgcagatggctctgccctatgggagagcttcaaataccctacagataccatcctgcccactcaggtcctcaccactggaatgagcctccgcagtcggatcatccccacagactattccaatggccggttcctcctcggcctgcaaagtactggtgcgtctctttataccgttgctgtgccctctggttacgaatatgatccgtactggtccatggatgtgaacaccaccaatctggtgttcgatgcgtctggcgtgatatatatcggcaacagaagtgaaatcacatcttgggtggtcagctccatagcagactactaccttcgtgccacacttgaccccgatggcgttttccgacagtatatgtacccaaagaagaacagcaaccagagtaatcaggcatggtcagtagtggacttcaagcccccaaatatctgtggagcacagctaacaaacgttggaagcggtatttgcggttttaacagctattgcacatggaatggcgcaaacaaccagagtacctgcaagtgccccgagcagtactcatttattgatgatgagaggaagtacaaaggctgcaagccagacttccagccacaaagttgcgacttggatgaagcagcggccctgatgcagtttaaggtcataccgatgagccatgttgactggccactgtctgactatgagcagtatagccccataactaaggatcagtgtcagcaactctgtctgacagattgtttctgtgcccttgctgtgttccatgatgaagacaatacatgttggaagaagaagatgcctttgtcaaacggccaaatggcggatggtgtgcagaggacagtctatatcaaggtacgaaaggacaacggcacgcagtcggagatcgtcgattccaacaaatggaagaaagacaagaagaactggatcattggaagttcattgttcttgggaagctctgtcttggtcaaccttctgctgatctccataatactctttggtacttactgtaccatcacgataaaggaagtcccagctatgcagtcatcaaacagtataggattgcccctgaaagccttcacttatgctgagcttgagaaggcaaccggtggtttccagaaagtgattggcactggtgcttctggtattgtgtacaagggccagctacaagatgatctcagtacccacattgctgtcaaaaagatcgacaagcttgagcatgaaacagaaaaggagttcaccattgaggtccaaactattggacggacacaccacaagaacttggtcaggttgctaggattctgcaacgaaggaaaagaaagactgttagtgtatgaattcatgaccaatgggtcactcaacagatttctatttggtgatgccaagcttcagtggaatattcgagcccagcttgctcttggggtggcaagggggctgctatacttacatgaggaatgcagcacacagattatccactgtgacataaagtcccagaacatccttctcgatggcaacttcacagcaaagatctctgacttcggcttagccaaactgctccgaaccaaccagacacaaacaaatacaggtattcggggtacacgaggatatgttgctcctgagtggtttaagaacatcggtatcactgccaaggtggatgtttacagctttggggtcatcctgttggagcttgtttgttgtcggcggaatgttgaattggaggccacagatgaggatcaaaaaatactgactgactgggcaaacgactgttataggtgtggcagaattgattttctggtggagggtgatgaagaagcaatttctgatttgaagaacgtggaaaggtttgttgcagtggcattgtggtgtcttcaggaggacccaactatgagacctacaatgctgaaggtgacacaaatgcttgatgaagcagctgcagtccccagccctcctgaacctacttcctttgtcagtgcacttgcatagcatcacacctgcatattgtcatattagtatatgtatgaacatgcgtgttcgaggaaaaaaaaagtatatgtatgaaccaacaaaatggtgtgggaaattaggtatagctatctactgaaaattacctatgctgatattgtagtgtgttcatatgtactgtaaagagcacagcattactgtctgcagccataacgtactgtagtaaatattaggaagtcttcattttcccaatttgaatgcatgtttccttaaaataaattattttctatgaacaaattaatgtggt

SEQ ID NO: 16833 - DNA, 2494 bp, Zea Mays
gacgcaggaactgagagccataccaaaagaactgatggcagctccccttctcttccccttgctgctgctgctgctgctgctgtcgtcctctaccactcctcttcaagctcaacagaacttcacccaaggttcctccttgacgccccaagggcctaccacctcttggctctccccatctggcgacttcgcgtttggcttccagcccatcgaggaccaacgacccggatccagcgccggtgcaagctccatccggctcacgcctccagctcaactccaatggggcgctctcgctccaggactccgccggcacagagatggctctgccctatgggagagcttcaaataccctacagataccatcctgcccactcaggtcctcaccactggaatgagcctccgcagtcggatcatccccacagactattccaatggccggttcctcctcggcctgcaaagtactggtgcgtctctttataccgttgctgtgccctctggttacgaatatgatccgtactggtccatggatgtgaacaccaccaatctggtgttcgatgcgtctggcgtgatatatatcggcaacagaagtgaaatcacatcttgggtggtcagctccatagcagactactaccttcgtgccacacttgaccccgatggcgttttccgacagtatatgtacccaaagaagaacagcaaccagagtaatcaggcatggtcagtagtggacttcaagcccccaaatatctgtggagcacagctaacaaacgttggaagcggtatttgcggttttaacagctattgcacatggaatggcgcaaacaaccagagtacctgcaagtgccccgagcagtactcatttattgatgatgagaggaagtacaaaggctgcaagccagacttccagccacaaagttgcgacttggatgaagcagcggccctgatgcagtttaaggtcataccgatgagccatgttgactggccactgtctgactatgagcagtatagccccataactaaggatcagtgtcagcaactctgtctgacagattgtttctgtgcccttgctgtgttccatgatgaagacaatacatgttggaagaagaagatgcctttgtcaaacggccaaatggcggatggtgtgcagaggacagtctatatcaaggtacgaaaggacaacggcacgcagtcggagatcgtcgattccaacaaatggaagaaagacaagaagaactggatcattggaagttcattgttcttgggaagctctgtcttggtcaaccttctgctgatctccataatactctttggtacttactgtaccatcacgataaaggaagtcccagctatgcagtcatcaaacagtataggattgcccctgaaagccttcacttatgctgagcttgagaaggcaaccggtggtttccagaaagtgattggcactggtgcttctggtattgtgtacaagggccagctacaagatgatctcagtacccacattgctgtcaaaaagatcgacaagcttgagcatgaaacagaaaaggagttcaccattgaggtccaaactattggacggacacaccacaagaacttggtcaggttgctaggattctgcaacgaaggaaaagaaagactgttagtgtatgaattcatgaccaatgggtcactcaacagatttctatttggtgatgccaagcttcagtggaatattcgagcccagcttgctcttggggtggcaagggggctgctatacttacatgaggaatgcagcacacagattatccactgtgacataaagtcccagaacatccttctcgatggcaacttcacagcaaagatctctgacttcggcttagccaaactgctccgaaccaaccagacacaaacaaatacagctttggggtcatcctgttggagcttgtttgttgtcggcggaatgttgaattggaggccacagatgaggatcaaaaaatactgactgactgggcaaacgactgttataggtgtggcagaattgattttctggtggagggtgatgaagaagcaatttctgatttgaagaacgtggaaaggtttgttgcagtggcattgtggtgtcttcaggaggacccaactatgagacctacaatgctgaaggtgacacaaatgcttgatgaagcagctgcagtccccagccctcctgaacctacttcctttgtcagtgcacttgcatagcatcacacctgcatattgtcatattagtatatgtatgaacatgcgtgttcgaggaaaaaaaaagtatatgtatgaaccaacaaaatggtgtgggaaattaggtatagctatctactgaaaattacctatgctgatattgtagtgtgttcatatgtactgtaaagagcacagcattactgtctgcagccataacgtactgtagtaaatattaggaagtcttcattttcccaatttgaatgcatgtttccttaaaataaattattttctatgaacaaattaatgtggt

SEQ ID NO: 16834 - DNA, 1582 bp, Zea Mays
tggtatggatccaaatttccctttatgatttccctgcgagcacaaagctagcgaagataccaaacaatggggagcacgagcgccacaggcaccacgtcgtcttcctcatcggctgcccacgggggcggtgccgcacacgtactgctcctgccgtacccgggcgcgcagggccatacaaacccgctgctccagttcggccgctgcctcgcctaccacggcctccgccccacgctcgtcacctcgcggtacgtgctctccaccaccccgcctcccggggagcccttcagggtggccgccatctccgatggcttcgacgacggcggggcggccgcgtgccccgacctcgacgtgtactggcgccagctcgaggccgtcggctcggagacgctggcggagctgatccgctccgaggccgccgatgggcggcctgtgcgcgtgctggtttacgacccgcacctgccgtgggcgcgacgggtggcacaggcggccgggctggcggcagcggcgttcctatcgcagccatgcgccgtcgacgtcgtctacggggaggtgtgggcaggacggctgccactgccggtggtggacgggaaagagctgtttgcacgcgggctgctgggtgtcgagcttggtcccgacgacgttccgccgttcgcagcaaagccagactggtgccctgtgttccttcgggcatcactgcggcaatttgaggggctggaggacgccgacgacgtgctcgtcaactcattccacgagatcgaacccaagttagaggagcttggcaatggattgtacaattctggcaaaccattcatttgggttgtgaggtcaaacgaagaacacaagttgtccgatgaacttcgtgacaagtgcaaggaacgtggccttattgtttcttggtgcccccaactggaagttctagcacataaagctacaggttgtttcttcacacattgcggatggaactcgacactggaagcaattgttaatggtgtgccaatggtggcaataccacactgggcagaccagccgaccatatcaaaatatatggagagcatgtggggcttgggtgtccgggtgcgcaaggatgagaaaggcttggtaacgagggacgaggtggaaaggtgcatcaaggatgtcatggatggtgatagtaaggataagtataggaagagtgccactatgtggatgcaaaaggccaagtccgccatgcagaatggagggagctcggacaagaatattacagaattcgtcgcgaagtattctttaagttaattttcaaagatttcgtaaaaaagttatttttcaaaggtataatgatagtgttataattacttcctaccttcgtggattgtatgccttcctgcatgtgatatattttgtctcgggattgtgtgtattacgttttgacttgatgctgtacatgctacagcagcaacctccacgtctaaaaatatatacattgttacgcagctatcctttgtaactttatagtcacattattttgtaaaatgaacattatcatgtgcctagtatatgttatgttatattaaaatgggttaatatatcagggcagatattgact

SEQ ID NO: 16835 - DNA, 2006 bp, Zea Mays
tggtatggatccaaatttccctttatgatttccctgcgagcacaaagctagcgaagataccaaacaatggggagcacgagcgccacaggcaccacgtcgtcttcctcatcggctgcccacgggggcggtgccgcacacgtactgctcctgccgtacccgggcgcgcagggccatacaaacccgctgctccagttcggccgctgcctcgcctaccacggcctccgccccacgctcgtcacctcgcggtacgtgctctccaccaccccgcctcccggggagcccttcagggtggccgccatctccgatggcttcgacgacggcggggcggccgcgtgccccgacctcgacgtgtactggcgccagctcgaggccgtcggctcggagacgctggcggagctgatccgctccgaggccgccgatgggcggcctgtgcgcgtgctggtttacgacccgcacctgccgtgggcgcgacgggtggcacaggcggccgggctggcggcagcggcgttcctatcgcagccatgcgccgtcgacgtcgtctacggggaggtgtgggcaggacggctgccactgccggtggtggacgggaaagagctgtttgcacgcgggctgctgggtgtcgagcttggtcccgacgacgttccgccgttcgcagcaaagccagactggtgccctgtgttccttcgggcatcactgcggcaatttgaggggctggaggacgccgacgacgtgctcgtcaactcattccacgagatcgaacccaaggtgaggtcaccgttaccacggccggcacctgtttgttgttttgcccaaatgaacttcggtgttgcatacacatcgtcatcgttcgtccacaatcacgtttattcactaaataatatatggttggtgtgtctgttgtgataatttgattccacttcaccatcataagcttttctttttgacgcatttgcaatgttaattatttgagcatgaggcagattatatggccctaacatggcatgcaaagacaataggcccaaccttgccatcattttatcttgatgatgaccgtttgccgttgaacaagacttacggtttcaacctcttcaacagcagcgagtcatgtctggcttggcttgacaaacagcttccgtgttctgttgttcttgtatcctatggtactgtctctgattatgatgaaacacagttagaggagcttggcaatggattgtacaattctggcaaaccattcatttgggttgtgaggtcaaacgaagaacacaagttgtccgatgaacttcgtgacaagtgcaaggaacgtggccttattgtttcttggtgcccccaactggaagttctagcacataaagctacaggttgtttcttcacacattgcggatggaactcgacactggaagcaattgttaatggtgtgccaatggtggcaataccacactgggcagaccagccgaccatatcaaaatatatggagagcatgtggggcttgggtgtccgggtgcgcaaggatgagaaaggcttggtaacgagggacgaggtggaaaggtgcatcaaggatgtcatggatggtgatagtaaggataagtataggaagagtgccactatgtggatgcaaaaggccaagtccgccatgcagaatggagggagctcggacaagaatattacagaattcgtcgcgaagtattctttaagttaattttcaaagatttcgtaaaaaagttatttttcaaaggtataatgatagtgttataattacttcctaccttcgtggattgtatgccttcctgcatgtgatatattttgtctcgggattgtgtgtattacgttttgacttgatgctgtacatgctacagcagcaacctccacgtctaaaaatatatacattgttacgcagctatcctttgtaactttatagtcacattattttgtaaaatgaacattatcatgtgcctagtatatgttatgttatattaaaatgggttaatatatcagggcagatattgact

SEQ ID NO: 16836 - DNA, 1676 bp, Zea Mays
tggtatggatccaaatttccctttatgatttccctgcgagcacaaagctagcgaagataccaaacaatggggagcacgagcgccacaggcaccacgtcgtcttcctcatcggctgcccacgggggcggtgccgcacacgtactgctcctgccgtacccgggcgcgcagggccatacaaacccgctgctccagttcggccgctgcctcgcctaccacggcctccgccccacgctcgtcacctcgcggtacgtgctctccaccaccccgcctcccggggagcccttcagggtggccgccatctccgatggcttcgacgacggcggggcggccgcgtgccccgacctcgacgtgtactggcgccagctcgaggccgtcggctcggagacgctggcggagctgatccgctccgaggccgccgatgggcggcctgtgcgcgtgctggtttacgacccgcacctgccgtgggcgcgacgggtggcacaggcggccgggctggcggcagcggcgttcctatcgcagccatgcgccgtcgacgtcgtctacggggaggtgtgggcaggacggctgccactgccggtggtggacgggaaagagctgtttgcacgcgggctgctgggtgtcgagcttggtcccgacgacgttccgccgttcgcagcaaagccagactggtgccctgtgttccttcgggcatcactgcggcaatttgaggggctggaggacgccgacgacgtgctcgtcaactcattccacgagatcgaacccaagcagcgagtcatgtctggcttggcttgacaaacagcttccgtgttctgttgttcttgtatcctatggtactgtctctgattatgatgaaacacagttagaggagcttggcaatggattgtacaattctggcaaaccattcatttgggttgtgaggtcaaacgaagaacacaagttgtccgatgaacttcgtgacaagtgcaaggaacgtggccttattgtttcttggtgcccccaactggaagttctagcacataaagctacaggttgtttcttcacacattgcggatggaactcgacactggaagcaattgttaatggtgtgccaatggtggcaataccacactgggcagaccagccgaccatatcaaaatatatggagagcatgtggggcttgggtgtccgggtgcgcaaggatgagaaaggcttggtaacgagggacgaggtggaaaggtgcatcaaggatgtcatggatggtgatagtaaggataagtataggaagagtgccactatgtggatgcaaaaggccaagtccgccatgcagaatggagggagctcggacaagaatattacagaattcgtcgcgaagtattctttaagttaattttcaaagatttcgtaaaaaagttatttttcaaaggtataatgatagtgttataattacttcctaccttcgtggattgtatgccttcctgcatgtgatatattttgtctcgggattgtgtgtattacgttttgacttgatgctgtacatgctacagcagcaacctccacgtctaaaaatatatacattgttacgcagctatcctttgtaactttatagtcacattattttgtaaaatgaacattatcatgtgcctagtatatgttatgttatattaaaatgggttaatatatcagggcagatattgact

SEQ ID NO: 16837 - DNA, 1791 bp, Zea Mays
tggtatggatccaaatttccctttatgatttccctgcgagcacaaagctagcgaagataccaaacaatggggagcacgagcgccacaggcaccacgtcgtcttcctcatcggctgcccacgggggcggtgccgcacacgtactgctcctgccgtacccgggcgcgcagggccatacaaacccgctgctccagttcggccgctgcctcgcctaccacggcctccgccccacgctcgtcacctcgcggtacgtgctctccaccaccccgcctcccggggagcccttcagggtggccgccatctccgatggcttcgacgacggcggggcggccgcgtgccccgacctcgacgtgtactggcgccagctcgaggccgtcggctcggagacgctggcggagctgatccgctccgaggccgccgatgggcggcctgtgcgcgtgctggtttacgacccgcacctgccgtgggcgcgacgggtggcacaggcggccgggctggcggcagcggcgttcctatcgcagccatgcgccgtcgacgtcgtctacggggaggtgtgggcaggacggctgccactgccggtggtggacgggaaagagctgtttgcacgcgggctgctgggtgtcgagcttggtcccgacgacgttccgccgttcgcagcaaagccagactggtgccctgtgttccttcgggcatcactgcggcaatttgaggggctggaggacgccgacgacgtgctcgtcaactcattccacgagatcgaacccaagattatatggccctaacatggcatgcaaagacaataggcccaaccttgccatcattttatcttgatgatgaccgtttgccgttgaacaagacttacggtttcaacctcttcaacagcagcgagtcatgtctggcttggcttgacaaacagcttccgtgttctgttgttcttgtatcctatggtactgtctctgattatgatgaaacacagttagaggagcttggcaatggattgtacaattctggcaaaccattcatttgggttgtgaggtcaaacgaagaacacaagttgtccgatgaacttcgtgacaagtgcaaggaacgtggccttattgtttcttggtgcccccaactggaagttctagcacataaagctacaggttgtttcttcacacattgcggatggaactcgacactggaagcaattgttaatggtgtgccaatggtggcaataccacactgggcagaccagccgaccatatcaaaatatatggagagcatgtggggcttgggtgtccgggtgcgcaaggatgagaaaggcttggtaacgagggacgaggtggaaaggtgcatcaaggatgtcatggatggtgatagtaaggataagtataggaagagtgccactatgtggatgcaaaaggccaagtccgccatgcagaatggagggagctcggacaagaatattacagaattcgtcgcgaagtattctttaagttaattttcaaagatttcgtaaaaaagttatttttcaaaggtataatgatagtgttataattacttcctaccttcgtggattgtatgccttcctgcatgtgatatattttgtctcgggattgtgtgtattacgttttgacttgatgctgtacatgctacagcagcaacctccacgtctaaaaatatatacattgttacgcagctatcctttgtaactttatagtcacattattttgtaaaatgaacattatcatgtgcctagtatatgttatgttatattaaaatgggttaatatatcagggcagatattgact

SEQ ID NO: 16838 - DNA, 1673 bp, Zea Mays
tggtatggatccaaatttccctttatgatttccctgcgagcacaaagctagcgaagataccaaacaatggggagcacgagcgccacaggcaccacgtcgtcttcctcatcggctgcccacgggggcggtgccgcacacgtactgctcctgccgtacccgggcgcgcagggccatacaaacccgctgctccagttcggccgctgcctcgcctaccacggcctccgccccacgctcgtcacctcgcggtacgtgctctccaccaccccgcctcccggggagcccttcagggtggccgccatctccgatggcttcgacgacggcggggcggccgcgtgccccgacctcgacgtgtactggcgccagctcgaggccgtcggctcggagacgctggcggagctgatccgctccgaggccgccgatgggcggcctgtgcgcgtgctggtttacgacccgcacctgccgtgggcgcgacgggtggcacaggcggccgggctggcggcagcggcgttcctatcgcagccatgcgccgtcgacgtcgtctacggggaggtgtgggcaggacggctgccactgccggtggtggacgggaaagagctgtttgcacgcgggctgctgggtgtcgagcttggtcccgacgacgttccgccgttcgcagcaaagccagactggtgccctgtgttccttcgggcatcactgcggcaatttgaggggctggaggacgccgacgacgtgctcgtcaactcattccacgagatcgaacccaagcgagtcatgtctggcttggcttgacaaacagcttccgtgttctgttgttcttgtatcctatggtactgtctctgattatgatgaaacacagttagaggagcttggcaatggattgtacaattctggcaaaccattcatttgggttgtgaggtcaaacgaagaacacaagttgtccgatgaacttcgtgacaagtgcaaggaacgtggccttattgtttcttggtgcccccaactggaagttctagcacataaagctacaggttgtttcttcacacattgcggatggaactcgacactggaagcaattgttaatggtgtgccaatggtggcaataccacactgggcagaccagccgaccatatcaaaatatatggagagcatgtggggcttgggtgtccgggtgcgcaaggatgagaaaggcttggtaacgagggacgaggtggaaaggtgcatcaaggatgtcatggatggtgatagtaaggataagtataggaagagtgccactatgtggatgcaaaaggccaagtccgccatgcagaatggagggagctcggacaagaatattacagaattcgtcgcgaagtattctttaagttaattttcaaagatttcgtaaaaaagttatttttcaaaggtataatgatagtgttataattacttcctaccttcgtggattgtatgccttcctgcatgtgatatattttgtctcgggattgtgtgtattacgttttgacttgatgctgtacatgctacagcagcaacctccacgtctaaaaatatatacattgttacgcagctatcctttgtaactttatagtcacattattttgtaaaatgaacattatcatgtgcctagtatatgttatgttatattaaaatgggttaatatatcagggcagatattgact

SEQ ID NO: 16839 - DNA, 2828 bp, Zea Mays
tgaaattccaacattcacatctgagattctgaggttagcatatgtggaagcacggcatatgttgctcagactgcttggatccggaatggaaccattcaagagaacattttatttggaaagccaatgcattcagagagatattcggaaatcgtaaatgcttgctgcctggaaaaggatttggaaatgatggagtttggtgaccagactgaaataggagagcgagggatcaatctcagtggaggccagaaacagcgcatccagcttgcaagagcggtttatcaagactgcgatatatatcttctcgatgacatatttagcgcggttgatgctcatactggatcagctattttcaaggaatgtctgaaaggcatactcaagaataagactgtgttgcttgtgactcaccaagtggacttcttgcaaaatgtggatactataattgtaatgaaagatgggttagtcatccagtcagggatctatcttgagttactagcatcatgctcagaattttctgatcttgttacagctcatcatagttcaatggagacagcaggggcacaagcttttcatgttcagaacacagagagctctcaggcttccactggatctgtagatgccccatctttggcatcgaaatccaatgctgaaaatggtgaatcagttggcagtgcaacaaacaaagaagcaggttcttctaagctgatccaggaagaggaaaaggagagtggccgagtaagctggcgtgtgtacaagctatatatgacagaggcctggggatggtggggaattgtggtcattttagctgtgtcactgctgtcagagggctccagtatggctagcaactactggttatcatatgagacatcaggaggccctgtgtttgacacttccttatttcttggtgtttatgcttcgatagttgctacgacaattatattggaaatgatcgccactcttattgtgacattcatggggcttcaatcagcacaggcctttttcaacaagatgtttgacagcattttacgagcgccaatgtcattttttgacaccactccttcaggaaggatcctaagccgggcatcatcagaccaatctaagattgatactaaccttgtgttctatgttggttttgccacatcaatgtgcatctcagtggttaccaacgtcgctattacttgccaagttgcatggccatcagtaattgcagtatttcctctgctgcttttgaacatctggtatcggaaccgttacattacgacatctcgagagcttacccggcttcaaggggtaacaagggcgccaattattgatcactttacagaaagctttctgggtgccccaactgtaaggtgcttcagaaaggaggatgagttctaccagataaacctggacaggatcaattcgaatctgcgtatgtcatttcataattatgcagctaatgagtggcttggatttcgcctggagctaattggcacacttattttgtctataactgcttttctcatgatcagcttgcctagcaatttcatcaagaaagaatttgtcggcatgtccctttcctacggcatttctctcaattccttggtgtactacacaatttccataagctgtatgatcgagaatgatatggtagccatagagagggtgcatcagtacagtactctcccttctgaggcagcatgggaagttgccgacggtcttccctcacaagattggcccagccgaggagacattgatgtgaaagatctgaaggttcggtatcgtcaaaacacgcctctaatcttgaaaggcattactgtgagcatcaaaggtggagaaaaggttggagttgtgggaaggactggcagtggaaagtcgactttggtgcaggctttattcaggatcgtggagcctgcagatggccatatcatcatcgatggtgtcaacatctgcactctggggcttcgtgatctgaggtctcgcttcggtgtgattccccaagaacctgtgctcttcgaaggaactgtacggagcaacatagacccagcagggcggtattccgaggctgagatatggcaggccctcgagtgctgccagctaaaggatatagtagcctcaaaaccagagaagcttgatgcactagtcgccgacatgggggagaactggagcgtagggcagaagcagcttctgtgcttcggccgagtcatactgaaacgcagccggatcctcttcatggacgaggcaacggcttcggtcgattctcaaacagacgcggctatccaaaagatcatccgcgaggagttcactgaatgtactgtcatcagcgttgcacatcggatcccgactgtcatggacagtgaccgtgtcctggtgttggacgcaggtctagtggcagaattcgacgcaccctccaagttgatgcggaggccatcactctttggtgcgatggttcaggagtacgcaagtcgctcatctagcgtgaaggaaaccgttggatgagatgagagtatgagaccacttctcatggccaaaagacgacggtatcggagaaatttaggcatacgcatgatgggctctgttcgcaaggaaaaataaattgtactaggactttctgtaagcttgcaagcataaagctttgttttgttcgctacaccatgtattatcttaaatagaactggactatttggtttgcatttccgccaattttgtatgtgacgaaagcttagagcatctacaggaagtttgtgtaattcacatgctaaaccagtgactttcctaagttaagaaaacctaaatttatctctctctggctaatagttttatatgaacttccgtaaaataaaaaaaag

SEQ ID NO: 16840 - DNA, 5074 bp, Zea Mays
ccccatcgacggatcccccaacgagttccgacttccgttccactagcagtctgcactcggcagtcggccagtcgcacagccagagagccaacaagcccgcagggccgccgcaggcacacgggatggcgctcccatggtggctcaccaccaaggcgtgcacagcgccgccgcctggccccggctccttctccgatgcggtcgcgttcctcttcctctccccgtgcccgcagcgcgggctcctcgccaccgccgacctcgtgttcctcgtcgcctgcatcgtccgcctcgccagacgccttcgcaggggacacccggtgcccgcggctgctccccctcccgagcgcgaggcgctgctgcagaagccgaaccatccttcgccgccgctcgtccgccacgtgctcgcgctcggggcctccgcggtgttcgcggcggtgtccgtcgtcctcctcgcgctcgcgctcctcctcctgccggccacgccgtggcgcgccgcggagggagccttcctctccgtccacgccgtcgcgcacggggtggctgcctggaccatcgtctcttcgcggagagcaggagctgccccggaggcgcacctccgcgtgttctggctcgccaccgctctcggcgccgcgctcttctctgcctcggcagtggtccgcggcgcggacgcctcgctgctcttccccgatgacattctcgccttcgctggtctgcttgtctccctgcctctggcatacatagcggtcaccggcttcaccggcaatgtcaccagggcacaagaaggtgaaccggaacacgccggtccagaggcgccctcctcgccgtacaccaccgcttcgttcctttcgcgcgctacgttcagctggataaactccctcatcaccaagggctacgcggccgaatccctcaaaaccgaagacgtgcccccggtctctgccgcccaccgcgccgaggcggcgcacgccttgttcatgtccaattggccagcgtcgccagcatctcggcacccggtcggcgtggcactctggctctctttctggccgcagctcgtgcttactgcgttccttggcctcgctcgtctgggggccatgtacgttgggccgtcgctcatcgatcagttcgtcgagttcatccgccgcggcgggacatcatgggagggccttcgtctcgttctcatcttgctcgctggcaaggccgtccagacgctggcatcgcaccattacagcttccagggacagcttctgggcatgcgcatccgcggcgcgctgcagacggcgctgtaccgcaagtcgctgcgcctcaccgccggtgctcgccgagcgcacggcgctggagccatcgtcaactacatgcaggtcgacgctgggatcgtgtcctacgccatgcacggactccacgggctgtggctgatgccgctgcagatagtggtggcgctactcctcctgtacgcctacctcgggccccgccgtgctcatgacgctcgccgtgatcaccgcagtgactgtggtcacggccttcgctaacaagctcaacctggcgtaccagctcaagttcctcggcgtccgcgatagccgcgtgaaggcccatcaccgagatgctcagtaacatgcgtcccatcaagctgcaggcttgggaggacaccttcgggggcaaggttcgcgacatccggcgagaagagctcgggtggctggccaagatcatgctcttcatgtgcgccaacacggtggtattctcgagcggtccgctcgctatgacggtgctcgtgttcgggacctacctcgcctccggtgggcagctcgacgccggcaaggtgttcacggccacggcgttcttcggcatgctggaaggccccatgcggaacttcccgcagactattgtcatgtccatgcaggcgtttgtgtcgctggatcggctgaacaaattcctgacggacaccgagatcgacaccgcggccgtggagcgcatcgagagtggcggcgctgaggacacagtggccgtcaaggtgcaaggcggggtgttcgcttgggatgtgccagcggacgaggagatgaagggcaacaacaacaacagcagcaggccccgccatgaggtggcagagaatgaccaaggaaatcgggcggagttggtgacagtgctgaggggcattgacgtggaggtgaggaggggcgagcttacggcggtggtcgggacagtgggctccggcaaatcgtcgctgctgtcctgcatcatgggggagatgcacaagctctccggcacggttagcatatgtggaagcacggcatatgttgctcagactgcttggatccggaatggaaccattcaagagaacattttatttggaaagccaatgcattcagagagatattcggaaatcgtaaatgcttgctgcctggaaaaggatttggaaatgatggagtttggtgaccagactgaaataggagagcgagggatcaatctcagtggaggccagaaacagcgcatccagcttgcaagagcggtttatcaagactgcgatatatatcttctcgatgacatatttagcgcggttgatgctcatactggatcagctattttcaaggaatgtctgaaaggcatactcaagaataagactgtgttgcttgtgactcaccaagtggacttcttgcaaaatgtggatactataattgtaatgaaagatgggttagtcatccagtcagggatctatcttgagttactagcatcatgctcagaattttctgatcttgttacagctcatcatagttcaatggagacagcaggggcacaagcttttcatgttcagaacacagagagctctcaggcttccactggatctgtagatgccccatctttggcatcgaaatccaatgctgaaaatggtgaatcagttggcagtgcaacaaacaaagaagcaggttcttctaagctgatccaggaagaggaaaaggagagtggccgagtaagctggcgtgtgtacaagctatatatgacagaggcctggggatggtggggaattgtggtcattttagctgtgtcactgctgtcagagggctccagtatggctagcaactactggttatcatatgagacatcaggaggccctgtgtttgacacttccttatttcttggtgtttatgcttcgatagttgctacgacaattatattggaaatgatcgccactcttattgtgacattcatggggcttcaatcagcacaggcctttttcaacaagatgtttgacagcattttacgagcgccaatgtcattttttgacaccactccttcaggaaggatcctaagccgggcatcatcagaccaatctaagattgatactaaccttgtgttctatgttggttttgccacatcaatgtgcatctcagtggttaccaacgtcgctattacttgccaagttgcatggccatcagtaattgcagtatttcctctgctgcttttgaacatctggtatcggaaccgttacattacgacatctcgagagcttacccggcttcaaggggtaacaagggcgccaattattgatcactttacagaaagctttctgggtgccccaactgtaaggtgcttcagaaaggaggatgagttctaccagataaacctggacaggatcaattcgaatctgcgtatgtcatttcataattatgcagctaatgagtggcttggatttcgcctggagctaattggcacacttattttgtctataactgcttttctcatgatcagcttgcctagcaatttcatcaagaaagaatttgtcggcatgtccctttcctacggcatttctctcaattccttggtgtactacacaatttccataagctgtatgatcgagaatgatatggtagccatagagagggtgcatcagtacagtactctcccttctgaggcagcatgggaagttgccgacggtcttccctcacaagattggcccagccgaggagacattgatgtgaaagatctgaaggttcggtatcgtcaaaacacgcctctaatcttgaaaggcattactgtgagcatcaaaggtggagaaaaggttggagttgtgggaaggactggcagtggaaagtcgactttggtgcaggctttattcaggatcgtggagcctgcagatggccatatcatcatcgatggtgtcaacatctgcactctggggcttcgtgatctgaggtctcgcttcggtgtgattccccaagaacctgtgctcttcgaaggaactgtacggagcaacatagacccagcagggcggtattccgaggctgagatatggcaggaaatacaacctaaacctatgctatgccctcgagtgctgccagctaaaggatatagtagcctcaaaaccagagaagcttgatgcactagtcgccgacatgggggagaactggagcgtagggcagaagcagcttctgtgcttcggccgagtcatactgaaacgcagccggatcctcttcatggacgaggcaacggcttcggtcgattctcaaacagacgcggctatccaaaagatcatccgcgaggagttcactgaatgtactgtcatcagcgttgcacatcggatcccgactgtcatggacagtgaccgtgtcctggtgttggacgcaggtctagtggcagaattcgacgcaccctccaagttgatgcggaggccatcactctttggtgcgatggttcaggagtacgcaagtcgctcatctagcgtgaaggaaaccgttggatgagatgagagtatgagaccacttctcatggccaaaagacgacggtatcggagaaatttaggcatacgcatgatgggctctgttcgcaaggaaaaataaattgtactaggactttctgtaagcttgcaagcataaagctttgttttgttcgctacaccatgtattatcttaaatagaactggactatttggtttgcatttccgccaattttgtatgtgacgaaagcttagagcatctacaggaagtttgtgtaattcacatgctaaaccagtgactttcctaagttaagaaaacctaaatttatctctctctggctaatagttttatatgaacttccgtaaaataaaaaaaag

SEQ ID NO: 16841 - DNA, 1087 bp, Zea Mays
gcattcgctgctccaaagaaagcccagaccaaagcagagctgcttgcttctccacgccttgtgcttccacagagcaaccagttctcagaagcaatgtccgcacccctggtggacgccgagtacatggccgagatcgagagggcacggcgggacctccgcgctctcgtcgccagcaagaactgcgcgccgatcatgctccgcctcgcgtggcacgacgccggcacttacgacgccaagaccaacacaggaggccccaacggctccataaggttcccacaggagtacagccactcttcaaacgcagggatcaagatcgccattgacctcttagagcctgtgaagcagaagcaccccaagatcacatacgcagacctgtatcaggattcttcgatttgtccagaggaaggacgcttgccggatgctagaagaggtgcttcgcatctcagacaagtattctaccggatgggtttatcagacagggacattgtggcgctctccggcggccatactctggggagagcgcatcgagagaggacagggtttgatggcccatggactagggatcctctgaaatttgacaactcttatttccttgagcttctgaaaggcgactctgaagggctcttgaaactccctactgacaaggttcttgtggaagatcctgaattccgtcagcatgtccaactatatgccaaggatgaagatgcatttttcagggactacgcggagtcacacaagaagctgtcagagctaggcttcacccccccctcgctcttgtctctcatccagatctgcgaataaacacaagtcgttgctggtgcaagctgcagctgggctcgcagttgctaccgcagttgtcgcatgggcgtacctgtgcgaatccaacaacaagttcatctaacttacgcttaccgttagtacaaatacaaattggagtcgccaaaatatttcagttctgtgcacatgtatttgcatctacatattgatataataccaagcatgttatgtgttgtgaacttgttgaggccaaagaatgaaataaagaaaaacctaaaaataagggcaaaagaagaagatagaaaatagt

SEQ ID NO: 16842 - DNA, 1193 bp, Zea Mays
gtccttcacacctgttctattagtggtgaaggtacactgctggctacaggctcctatgatggacaggcaagaatatggagtagagatggagacctgaagcagacattgttcaaacacaagggacccatattttcattgaaatggaataagaaaggagattttctcctaagtggaagtgttgataaaactgctattgtttgggatacaaagacatgggaatgcaaacagcagtttgaatttcattcagctccaacactagatgttgattggagaaataataactcttttgcaacatgttcaaccgataacatgatctatgtttgcaagattggggaacagcgtccggttaaagcattcagtggccatcagagtgaagttaatgctatcaagtgggatccgactggttctcttttggcttcatgttctgatgattggacagcaaagatatggagtatgaagcaagacaaatgtgtatttgatttcaaggagcataccaaggaaatatacactattcggtggagcccaacaggcccaggaacaaacaatcctaatcagcagttgcttttggccagcgcgtcttttgattcaactatcaagctttgggaagtcgagcaaggatgccttctgtacagcttgtctggtcataggcaaccagtgtattctgttgcatttagccccgacggcgaatacttagcgagcgggtccctggatcagtgcctacacatctggtctgtgaaagaaggcaggatcctgaagacgtacagaggtactgggggcatattcgaagtgtgctggaacaaagaaggcagcaagattgctgcctgtttctccaacaacacagtctgcgtgatggatttccggatgtagtccaaccagtagggtggtgcatatcaatcctaacacaaggctagatcataaatccgtcccatgcaaatttgtgaagagcggagttgttagcaaaatgtagatcctaggtggcttcaacttttgtccatgcacatttcgtttttcttggtcatacttaccttagagtagcaatgtagtagtggaaatgccttaacagggtttagtagcatggaaatgttttggtggtaaattaatgaattaatctgagatgtactagtttgtagtttgcacataccgtcgtgtcaatgtcttttatattgaactgctatagcgagcttggctgacca

SEQ ID NO: 16843 - DNA, 1254 bp, Zea Mays
cttaccttgcaaaagagaggctgcgtggaacccagtaccttcggctcagtgggcttagtggaaaggcttctcaccactgtgctagggtgaaggtacactgctggctacaggctcctatgatggacaggcaagaatatggagtagagatggagacctgaagcagacattgttcaaacacaagggacccatattttcattgaaatggaataagaaaggagattttctcctaagtggaagtgttgataaaactgctattgtttgggatacaaagacatgggaatgcaaacagcagtttgaatttcattcagctccaacactagatgttgattggagaaataataactcttttgcaacatgttcaaccgataacatgatctatgtttgcaagattggggaacagcgtccggttaaagcattcagtggccatcagagtgaagttaatgctatcaagtgggatccgactggttctcttttggcttcatgttctgatgattggacagcaaagatatggagtatgaagcaagacaaatgtgtatttgatttcaaggagcataccaaggaaatatacactattcggtggagcccaacaggcccaggaacaaacaatcctaatcagcagttgcttttggccagcgcgtcttttgattcaactatcaagctttgggaagtcgagcaaggatgccttctgtacagcttgtctggtcataggcaaccagtgtattctgttgcatttagccccgacggcgaatacttagcgagcgggtccctggatcagtgcctacacatctggtctgtgaaagaaggcaggatcctgaagacgtacagaggtactgggggcatattcgaagtgtgctggaacaaagaaggcagcaagattgctgcctgtttctccaacaacacagtctgcgtgatggatttccggatgtagtccaaccagtagggtggtgcatatcaatcctaacacaaggctagatcataaatccgtcccatgcaaatttgtgaagagcggagttgttagcaaaatgtagatcctaggtggcttcaacttttgtccatgcacatttcgtttttcttggtcatacttaccttagagtagcaatgtagtagtggaaatgccttaacagggtttagtagcatggaaatgttttggtggtaaattaatgaattaatctgagatgtactagtttgtagtttgcacataccgtcgtgtcaatgtcttttatattgaactgctatagcgagcttggctgacca

SEQ ID NO: 16844 - DNA, 1458 bp, Zea Mays
aataccacaggtcgcactccaatggatgtaagtacaactgctcaggagatatctaacactgatgttactgttttggaaggacacagttcaggtttttgcttgtgcatggagcccatctggttctcttctagcttctgggtcaggggactcaactgctagaatctggacaattccagatggtccatgtggttccaacatgcaatcatctcctcctggtgttcatgttttgaaacattttaaaggtcggaccaatgaaaagagtaaggatgtcaccacacttgactggaatggtgaaggtacactgctggctacaggctcctatgatggacaggcaagaatatggagtagagatggagacctgaagcagacattgttcaaacacaagggacccatattttcattgaaatggaataagaaaggagattttctcctaagtggaagtgttgataaaactgctattgtttgggatacaaagacatgggaatgcaaacagcagtttgaatttcattcagctccaacactagatgttgattggagaaataataactcttttgcaacatgttcaaccgataacatgatctatgtttgcaagattggggaacagcgtccggttaaagcattcagtggccatcagagtgaagttaatgctatcaagtgggatccgactggttctcttttggcttcatgttctgatgattggacagcaaagatatggagtatgaagcaagacaaatgtgtatttgatttcaaggagcataccaaggaaatatacactattcggtggagcccaacaggcccaggaacaaacaatcctaatcagcagttgcttttggccagcgcgtcttttgattcaactatcaagctttgggaagtcgagcaaggatgccttctgtacagcttgtctggtcataggcaaccagtgtattctgttgcatttagccccgacggcgaatacttagcgagcgggtccctggatcagtgcctacacatctggtctgtgaaagaaggcaggatcctgaagacgtacagaggtactgggggcatattcgaagtgtgctggaacaaagaaggcagcaagattgctgcctgtttctccaacaacacagtctgcgtgatggatttccggatgtagtccaaccagtagggtggtgcatatcaatcctaacacaaggctagatcataaatccgtcccatgcaaatttgtgaagagcggagttgttagcaaaatgtagatcctaggtggcttcaacttttgtccatgcacatttcgtttttcttggtcatacttaccttagagtagcaatgtagtagtggaaatgccttaacagggtttagtagcatggaaatgttttggtggtaaattaatgaattaatctgagatgtactagtttgtagtttgcacataccgtcgtgtcaatgtcttttatattgaactgctatagcgagcttggctgacca

SEQ ID NO: 16845 - DNA, 1473 bp, Zea Mays
agcaagctgccaaagaataaggggtcgcactccaatggatgtaagtacaactgctcaggagatatctaacactgatgttactgttttggaaggacacagttcagaggtttttgcttgtgcatggagcccatctggttctcttctagcttctgggtcaggggactcaactgctagaatctggacaattccagatggtccatgtggttccaacatgcaatcatctcctcctggtgttcatgttttgaaacattttaaaggtcggaccaatgaaaagagtaaggatgtcaccacacttgactggaatggtgaaggtacactgctggctacaggctcctatgatggacaggcaagaatatggagtagagatggagacctgaagcagacattgttcaaacacaagggacccatattttcattgaaatggaataagaaaggagattttctcctaagtggaagtgttgataaaactgctattgtttgggatacaaagacatgggaatgcaaacagcagtttgaatttcattcagctccaacactagatgttgattggagaaataataactcttttgcaacatgttcaaccgataacatgatctatgtttgcaagattggggaacagcgtccggttaaagcattcagtggccatcagagtgaagttaatgctatcaagtgggatccgactggttctcttttggcttcatgttctgatgattggacagcaaagatatggagtatgaagcaagacaaatgtgtatttgatttcaaggagcataccaaggaaatatacactattcggtggagcccaacaggcccaggaacaaacaatcctaatcagcagttgcttttggccagcgcgtcttttgattcaactatcaagctttgggaagtcgagcaaggatgccttctgtacagcttgtctggtcataggcaaccagtgtattctgttgcatttagccccgacggcgaatacttagcgagcgggtccctggatcagtgcctacacatctggtctgtgaaagaaggcaggatcctgaagacgtacagaggtactgggggcatattcgaagtgtgctggaacaaagaaggcagcaagattgctgcctgtttctccaacaacacagtctgcgtgatggatttccggatgtagtccaaccagtagggtggtgcatatcaatcctaacacaaggctagatcataaatccgtcccatgcaaatttgtgaagagcggagttgttagcaaaatgtagatcctaggtggcttcaacttttgtccatgcacatttcgtttttcttggtcatacttaccttagagtagcaatgtagtagtggaaatgccttaacagggtttagtagcatggaaatgttttggtggtaaattaatgaattaatctgagatgtactagtttgtagtttgcacataccgtcgtgtcaatgtcttttatattgaactgctatagcgagcttggctgacca

SEQ ID NO: 16846 - DNA, 243 bp, Zea Mays
gttcctcctcgtctcctccgcagctccgacggcgccctcgcccgcgccgcctgctatgggtgtgcttacatcgacggaactcaacttcctcgtcttccgctatctccaggagtcaggctttggagcttcgctgatgtggggcggcgagttcctcggttggatcgtggtggattcgtgcgctgctcgagatatttagggtcccgtacggatgctgctaggatcagatgtggtttagggactagg

SEQ ID NO: 16847 - DNA, 1938 bp, Zea Mays
ccaggggaaggcgcagcggtttgccggcagacgggcgggcccaggccgaggaaacaggcaggtgcatccatccagagccacgccggcgaaacgcggcgaacagatcagagcacgcgagagtggtgcagcgaggttgaagcaacgacccgcatccggccagcccccgagctgcgctgctctgctcttgctctcgttcgtcccactcctttcttcccaccgaggggagagacaaccccctggctcctgcctgctcgacggacccaaagcatcgcctcctcttcctacccctctcctcaatcggctcgtccggtcgtcgcttagcgccctccacccgccagccaccccactgcgacgccgcgttctccccttcttccgacgtcgctgtctctctctcagcccagctccaggggcgaggctgtgaaagaagagggaggaaagggagaaaaaaagaccctcttttcttccgtcggcaggcctcgtgaccatggatccgccgcccgccgggctctcgacgctgccgaggtctgctggagatccgtagccagcccacgtgtagacggttatggtgctagtaccggtgccaacgctgtgtttcttggcgggcgttgctgctcctcctccgcttgaggattgctgctgcatccggcaggagggatggtcggaggcggaagatgatgaatggcaatatttggtcagtatcagattctaaaagcatcggagaaactatcatgctagtcctccagttccagttggaacctgtgactccggtctctggagcgtcctcagatttgtacagatcatccgcaattcccaactttaatgggctcagagtcctccttgcggacagcgactgcaccaaccgagctgtaactcacaggctcctagagaagcttggttgccgagtcctttcggtcgcttctggcgtccaatgcatcagctccttcgctgcggagtcgtccttccagctggtggttcttgatcttgacatgcagacgatggatggattcgaagtagcccgcgcgatcaggaagttcagtagcaatagttggctgccgttgattattgccctagcagcaagaatcgacgacaacatccgggatcgttgccagaggtcaggagtaaatggcctgatccagaaaccggtcacattagccgcgctgggagatgaactgtatagagtccttcagaacaattaaaagagcctgacggttctcatttctttcaatctcaatagattgctatagcttgatcggtaactaatttctgccaggttagctccatacaatcacaaaaaaaaaaacattttgaggcaaaagggaaatgtataggaagctgaaagcatcgctttctgcttggttcctcggtgaaggaggaggaggacgactacgacaggaaggtacaaaaaacttggagagatcatactgttagaacttagacccattcatctgtaaaccctcagataagcaaagaattagattcatgcactaacactaaccacgatataattagtttggacgaaatccatgagctgttgagtttgtgattgggactcagaatggatgggggttcagtgaatgcagcggcatatgtgtctacaggggggaaaaaggaacttttgttattggttagacatgctgcaaaagcaggctggatgagattgcagacaagaaggcagacgatgcggctgatgctgaccttttttacattacagacttgggctggttctggtcagcgaacccttgcttgcttatacgatatcctctgttccttacacgatatccttctagaaacactttaagatataaactagttttttttaagcacgttagcatcagtggaacagtttgggtagtaaaaatctggtgcattggcacctaagcttctttggtcacctcaagagctctcaacaatcagagcgattgtctaatgagaatccac

SEQ ID NO: 16848 - DNA, 129 bp, Zea Mays
tctcaatcgtgtgctgaaagtcgtgcaagcaagaatgagggagatcaagcatggcgacagcaattgcacgggaactgccctcctggtcgggatcccaaacgttgggaaatcggccattgttagtgcgat

SEQ ID NO: 16849 - DNA, 1142 bp, Zea Mays
aagaagacggcagttccgtacttccgttggattctcttgcctcggctgctcctctccctccccctgcttggcttcgctcgccttctcagccacgccgccggtcagccacgccgccgcttccctcggtgggcacccccctcccccatctggaacccactcccgccaacggtggaggagccaggccatctagtgacaagtaagtagcattatcggcgaagaaaacatccacagctgagttgccaaagaaaggcggataaatatgtctcaaggaacttctccgctgccaaaagataaacctaccgcagaacctggaaaggctattggcatcaaacggctgcagactgatactccctcaggtcttgcatatcataatgtttatgtacgaaggaaagtagaatctgagcatagtaaagtgaacccttctcaggagttgaaaggtaatggaagagacaaatcaaaagatctggaggcatgccaagatgttcaacatgaggaggccaacaagcctcaagtggcatctccttttgctgaatctgtagaactagtatcttccaaatcttctcaagaaccaaatgcggaaactgtggcggagaaaactgagccaccagttgcttctagcactggcattcaagaggaggtgaaacggtcaagcatagaatactggaatgagagatttaatcggttacagacatatttggagaactgtgatcattcaacccaggagggttatttgcgaaagcttaggtccctttcggctgctgggagaaacatgcatgcaattgagctggagaaaagggcaatacatctcctaatggaggaagggaaagagctccagcgaatgaaggctttgaatgttcttgggaaggtttccccaaatgcttcgtcgaagctgacaccttcgcagcggtagtctctacaatgagatgactgtataacatcaagagggctgtaatactcaaatacattgcagaaaagacatgttgttcctgtgtaacacctttccttttatttcctttgatgccctgcccttttgatgtaagattgttgtaatgctatgtaaccagccgtacatataaacctgccattcttagtcctaaacctgactattatttgtttgttcctttgtcatgtgattgtgattt

SEQ ID NO: 16850 - DNA, 1389 bp, Zea Mays
atagcaaaaacctctaccttctatgagcttctatgagccaagtaaagagagaagccgagaaactgtgtttcacgtcccggcgatgagcccccgtgtggtcctcctcttcctcgccgccctccgcccctgcgccgccctcgtccgccttcactccaccactttttccttcactttcctcgacgccccagcgcgctttggcccccgagtgagcggcgatgggatctgcggctccctgcgtgccgctgacccggccgaggcgtgtgagaccatcaaagaccgcggcggccgccgcggcgcgggccggaaggctttcgtgctgatcgcgaggggcaactgcagctttgaggagaaggtgcgggcggcgcagcaagcggggttcgacgcctccatcgtgtacgacgatgaggagaaggccagcctttactccaatggctggcgaaacactaaagaagtttgccaggggtgaagatgaagagtgctgtattaactcgtcgatggatgagactgcagggacagtgttggtaatgtcatttgtgtcacttgttgtcatcatgtcagttcttgcttcttttctgtttgctcgaaactgccgacttctacgccatggagttgataatcacccaccttacgtcaagaaacaagtggtggaaaagtttccctgctcagcgtacagtgctccctgttctagtgaagataatttccaggaagcttgtgcaatttgcttagaagactacaataatggtgatatgcttagacatctcccatgcaagcatgaatttcacaagatctgtattgattcttggctcacaaaatggggcatcttctgccctatatgcaagctagaagtaacgttgggcgggtaggcacacttcattactgcatccaagtgctggcagttctattgaagattgttgatcttttgatccacattgcgaggttcaatattcattttaatcattgatctttgagaatgaagtacagatctcagttcctcaggttgggccttgtagtgtgctactagactactgcgttcaggttaatatttcgatcatctgtttgatatccttgtttggtgtgtggaagagctcaaggagctctgctgctgataaatgtcagcacttctgttgctgtgtattgccctgtattcctagagaaattaggtgttgtgtgcaagcaaagtgtaatcgtaagtccaatgtaaaccccttttataccaggttacgttaccttgctcattttattttgtgggcacagataaatgctcgttaattaggcaggggttgatcttactctaaaaaattgtcctaaggctcagaaataacgatgtttgaagatgcatttgttgcaaaaaacgatgttgggatcagattttgatgaatttattttcct

SEQ ID NO: 16851 - DNA, 1297 bp, Zea Mays
atagcaaaaacctctaccttctatgagcttctatgagccaagtaaagagagaagccgagaaactgtgtttcacgtcccggcgatgagcccccgtgtggtcctcctcttcctcgccgccctccgcccctgcgccgccctcgtccgccttcactccaccactttttccttcactttcctcgacgccccagcgcgctttgctttgaggagaaggtgcgggcggcgcagcaagcggggttcgacgcctccatcgtgtacgacgatgaggagaaggccagcctttactccatggttggtgaatctgatggcatacacatacctgcgatatttgtttccaagatggctggcgaaacactaaagaagtttgccaggggtgaagatgaagagtgctgtattaactcgtcgatggatgagactgcagggacagtgttggtaatgtcatttgtgtcacttgttgtcatcatgtcagttcttgcttcttttctgtttgctcgaaactgccgacttctacgccatggagttgataatcacccaccttacgtcaagaaacaagtggtggaaaagtttccctgctcagcgtacagtgctccctgttctagtgaagataatttccaggaagcttgtgcaatttgcttagaagactacaataatggtgatatgcttagacatctcccatgcaagcatgaatttcacaagatctgtattgattcttggctcacaaaatggggcatcttctgccctatatgcaagctagaagtaacgttgggcgggtaggcacacttcattactgcatccaagtgctggcagttctattgaagattgttgatcttttgatccacattgcgaggttcaatattcattttaatcattgatctttgagaatgaagtacagatctcagttcctcaggttgggccttgtagtgtgctactagactactgcgttcaggttaatatttcgatcatctgtttgatatccttgtttggtgtgtggaagagctcaaggagctctgctgctgataaatgtcagcacttctgttgctgtgtattgccctgtattcctagagaaattaggtgttgtgtgcaagcaaagtgtaatcgtaagtccaatgtaaaccccttttataccaggttacgttaccttgctcattttattttgtgggcacagataaatgctcgttaattaggcaggggttgatcttactctaaaaaattgtcctaaggctcagaaataacgatgtttgaagatgcatttgttgcaaaaaacgatgttgggatcagattttgatgaatttattttcct

SEQ ID NO: 16852 - DNA, 523 bp, Zea Mays
atacgaacatgaggtcggccaccctgcttacgatctgcaccttgtccgcgctgctgctggtggcgcgcggctcggagaagccatcggccgcgccgccgccggtggtggccgtgggcgtggcggcagccagcgacctcatccgctccggcggtcaccgctacctggacgtcagaacagaggaggaattcaggagtgggcatgtggaggattcactcaacgtgccctatcttttcttcacttcacaaggaagggagaagaaccccaagttcatcgcacaggtcgcagcgggtttcgacaaagaggacaacatagttgtgggctgcaaaagcggagtgaggtctgaattagcatgtgctgatctcatggcagctggatttagaaatgtgaagaacatagaaggtggttataccgcatgggtggaaagtggtcttgccgtgaagaaatctcaagcacaagatgaactatgatgtgccctatcctgttggttcttccttgctttgacgacaaccttcgaagaaaatag

SEQ ID NO: 16853 - DNA, 593 bp, Zea Mays
ttgctcaacctctgtttgtttgtgtcagcattacatttgctttggagtcctctctccgcccttcgtctaattaaactaacagaggaggaattcaggagtgggcatgtggaggattcactcaacgtgccctatcttttcttcacttcacaaggaagggagaagaaccccaagttcatcgcacaggtcgcagcgggtttcgacaaagaggacaacatagttgtgggctgcaaaagcggagtgaggtctgaattagcatgtgctgatctcatggcagctggatttagaaatgtgaagaacatagaaggtggttataccgcatgggtggaaagtggtcttgccgtgaagaaatctcaagcacaagatgaactatgatgtgccctatcctgttggttcttccttgctttgacgacaaccttcgaagaaaatagtaggtttaaatgagcaaaaatatacttccttggttatttaaatatatgacacagttgattttttcgaaaactttaaccactcgtcttgtttaaaaaatcgtcagttatcatttatttttgttgtaatttctttatcactcaaggtcgtttaagtagagatcacaa

SEQ ID NO: 16854 - DNA, 542 bp, Zea Mays
attggagctctcggtgcattcggttcaatgaaggaggaattcaggagtgggcatgtggaggattcactcaacgtgccctatcttttcttcacttcacaaggaagggagaagaaccccaagttcatcgcacaggtcgcagcgggtttcgacaaagaggacaacatagttgtgggctgcaaaagcggagtgaggtctgaattagcatgtgctgatctcatggcagctggatttagaaatgtgaagaacatagaaggtggttataccgcatgggtggaaagtggtcttgccgtgaagaaatctcaagcacaagatgaactatgatgtgccctatcctgttggttcttccttgctttgacgacaaccttcgaagaaaatagtaggtttaaatgagcaaaaatatacttccttggttatttaaatatatgacacagttgattttttcgaaaactttaaccactcgtcttgtttaaaaaatcgtcagttatcatttatttttgttgtaatttctttatcactcaaggtcgtttaagtagagatcacaa

SEQ ID NO: 16855 - DNA, 3962 bp, Zea Mays
tacctgtgcccccatcctgctgctccttgcatcgatccctaccgaataatattctgcagtagtttctcgagctcctgtagcaagaaagaaaccatgtcgggggtatgggtgttcgaggacgggatcgtgcggcgtgcggacagcgacccgcccagcggcgccggcgccggcgggtcccggccgaacaaggtgctggtgcacgttcccagcggggaggtggtgacgtcgtatgacgtgctggagcggcggctacgcgagctcggctgggagcgctacctctacgacccctgtctgctccagttccaccagcgctccaccgtgcacctcatcaccgtaccccgtgacttctcccgcctcaagctggtccacatgtacgacgtcgtcgtcaagacccgaaacgtcttcgaggtccgtgacgccgcccctgcctgatggtcttcgtggcgacgcaagctgctgctgtgtgcctattagcttcgtgcaagctcgtcggaccggctggtactggagccctatcgccgccgtatcaacatacgtgcgcatgtattgtatgtttgtgattggtactgatcgagtacttacgtgtgatttgcatggcgcagcgcgttcgtgtggctgcttcttgcatgctgtcctactttgtctgccgccgaataaatgtacgcgagagcgccgccgccgtcgccgtcgccgtatgcttcttatatatccggatttgaggagcgccgcgccagcatgcccccgtgcactgccacgccgtcgcgcttcttccccaaccttggccatcaccgaccccgccccatcttcttcggctccacccaacccgtccctgccccttcgccccggataaggccacccgaaggtgaaaatatttggttattacttgattattgttttttataattatttatttgttataattacttgattattgctcggtttactattatagaatacttgattgttgcttggttactgttataggttgagattgttatatgtttagattgtaatgtataaattatgtattgttattgttattgtgaatcagagctagtattgttattgatattgtaatggactatttgtatagtgcatagattgatgtatatgtggttattgaggcattgatgtatatgtgtggatgtctgccatcgtgatgttagttttatttataggttttggaatctcatcgtgcaggggaggtgttgtcgaaattttgtgttgtcacttttgttcttttttgcagagaaggtacttgtcttcctagctgttgtgggtttgcctgcaccacgtccactcaccactacaccgacacgccacagccctgctagcctgactccaccgccaccctaggtataacctctatttctgtatcatggtcatagatcacgtaacctagttaggtatctcctgttcgaaagagatatggttgcaaatatgcagatctttgcatatctataatcgtatctatttcgaattgtccaagtttttttggatagcccatagttgtgtagatagggttagtttccatgctctactccgatccgagaaagagtttgcatcacctcccttttgttctccggatacacactctccctgcgaggacattggagaacaacatggatgtgctgccgaaattctgtctcgatttagagtagagcatggaaactaaccccatcaatgcaatcacgggtgggattaggatctatcctcaccttttagaaggtacaaacatattgtagattcattacatgtttatattgcactatgttattatatatgttagaggatgaaggatcggtttgacaagtcgaatgatgattggttggatgctatagaggcaacaagtgatgagctacttggagcctactcaagggctgaagatgaagctatgacagtcgccttcggcgctcgaggaaaaaagaggctgaataggtttttgatgttatcaggtttgtctaccccgattactgctatcccacgcgaaagcaagggaagaaaaggaaagctgctacctcaacaccttctagtgtgtcgaggtcgaagaaggttaaagttttgacacgccgaccgaggtgtattgagacgaccgatgtgctaaagctaagtgaaggggttgttcctgccatagaactaggtcatgctatgccagtcgaggcaagtacaaatctgaccgaagagccgaaactagagaagacgacaggacaatttaaggcgctgagtccatcatgtgcagtggacctgccgaagccatcaagcattcccacaacaactccaaggaaaaggagaatggctagcgtgctagatgttgttctggagtccgtaaaaacatcagctcctgtccttgctgaagctcttatcacgcaggctaaagattcaaggaaaactgacgacgctagcatggcccacactcttactgaagctggaccttcagaagctcctgccaaagctaaaccttcgaaaactgcaccgataactctggagaaagagagtgttcctgagaaattcaaatatcctgctcctaaagcacccattaaagagctggaattcattgttcgacatgcttcaggaaagcagctatcagaagagcaggtagtcgaagtgcaacactatgccagggatctaaagtacccctaaggatccttggtatatggtggtagtgacgaagatgacttcctttactgtctaccagacagcaaagagatacatgtttaccgggaaatgatggacaatataggatatccgaagcttgaacttggcctatctgcaatatcaaaagatcagcttgcagacagtcttgcttacaatagtctgaaggtgtgtatagtttgacttgtgtaaaataaattatttttatggtttttttgctatagttatgtgctcactcttcattttctagggcttaattctgagcaaggctctaaagtcccagaaggaagcagaggatgagagctaccgaatagctcttgagaatctttgctcataagtcatcacactaaggaacgaagctcttgaaaaggataagatattactttccttaatggataggctaaaatctaacgaggctaaacttgctgcacaagccgaagctcataaagccaaagtggaagaactaaaaaggaaggttgctgaagcaaccgaaaaattcaaagttgaggtggtgaagcatgagatttgcgagatcgagaggtcaagagcacaaaagaacaccgatgtgcttcgtgcttccaaagaaaagtgttatgaaatatccttggaatgcgccaggaaactaaaggacaactttgctagggttggggcatattcctctgagcagagattaatccatggcgaccctgatggagttgttcagtggatcagcggggaagctaaagcttttgacgaaattctaagtgaccgaggagatttctgcgcctttgctggtgcgtgggaggccacgtccatcttagaaaaggccggttgcgaacatgccaaggttgtagttcagcctgaatttgttttctcagccgacgacattaaaaatcgttcaaccaaagcttctgcgttaggcgggaaattttactccgaggtatggatgaagggcggccgtgagatagctgatgaagatattagaaagaatgaaaagaatctgacgacgctcaagaagaagcgaaaagagctaaagaagctactgagcgtgtgaggcttatagttgaactttctcccccaccggagccatacaaccaaaaagccgacccagccctgaaggaagcgcttaagacgattaaaattgtcaatgaagcagttgatgaagttgtcaacagactgctaaacgaagccaccaaaaaagtgttgaaagaagattaaagctttgtatatttgggagtttagcttttgtacacagctttcgcctttgtaagaaccaagtatcaactattttcatgtgtattaatgtaatatatttctttgtgatgcatgaa

SEQ ID NO: 16856 - DNA, 3529 bp, Zea Mays
tacctgtgcccccatcctgctgctccttgcatcgatccctaccgaataatattctgcagtagtttctcgagctcctgtagcaagaaagaaaccatgtcgggggtatgggtgttcgaggacgggatcgtgcggcgtgcggacagcgacccgcccagcggcgccggcgccggcgggtcccggccgaacaaggtgctggtgcacgttcccagcggggaggtggtgacgtcgtatgacgtgctggagcggcggctacgcgagctcggctgggagcgctacctctacgacccctgtctgctccagttccaccagcgctccaccgtgcacctcatcaccgtaccccgtgacttctcccgcctcaagctggtccacatgtacgacgtcgtcgtcaagacccgaaacgtcttcgaggtccgtgacgccgcccctgcctgatggtcttcgtggcgacgcaagctgctgctgtgtgcctattagcttcgtgcaagctcgtcggaccggctggtactggagccctatcgccgccgtatcaacatacgtgcgcatgtattgtatgtttgtgattggtactgatcgagtacttacgtgtgatttgcatggcgcagcgcgttcgtgtggctgcttcttgcatgctgtcctactttgtctgccgccgaataaatgtacgcgagagcgccgccgccgtcgccgtcgccgtatgcttcttatatatccggatttgaggagcgccgcgccagcatgcccccgtgcactgccacgccgtcgcgcttcttccccaaccttggccatcaccgaccccgccccatcttcttcggctccacccaacccgtccctgccccttcgccccggataaggccacccgaaggtgaaaatatttggttattacttgattattgttttttataattatttatttgttataattacttgattattgctcggtttactattatagaatacttgattgttgcttggttactgttataggttgagattgttatatgtttagattgtaatgtataaattatgtattgttattgttattgtgaatcagagctagtattgttattgatattgtaatggactatttgtatagtgcatagattgatgtatatgtggttattgaggcattgatgtatatgtgtggatgtctgccatcgtgatgttagttttatttataggttttggaatctcatcgtgcaggggaggtgttgtcgaaattttgtgttgtcacttttgttcttttttgcagagaaggtacttgtcttcctagctgttgtgggtttgcctgcaccacgtccactcaccactacaccgacacgccacagccctgctagcctgactccaccgccaccctagaggatgaaggatcggtttgacaagtcgaatgatgattggttggatgctatagaggcaacaagtgatgagctacttggagcctactcaagggctgaagatgaagctatgacagtcgccttcggcgctcgaggaaaaaagaggctgaataggtttttgatgttatcaggtttgtctaccccgattactgctatcccacgcgaaagcaagggaagaaaaggaaagctgctacctcaacaccttctagtgtgtcgaggtcgaagaaggttaaagttttgacacgccgaccgaggtgtattgagacgaccgatgtgctaaagctaagtgaaggggttgttcctgccatagaactaggtcatgctatgccagtcgaggcaagtacaaatctgaccgaagagccgaaactagagaagacgacaggacaatttaaggcgctgagtccatcatgtgcagtggacctgccgaagccatcaagcattcccacaacaactccaaggaaaaggagaatggctagcgtgctagatgttgttctggagtccgtaaaaacatcagctcctgtccttgctgaagctcttatcacgcaggctaaagattcaaggaaaactgacgacgctagcatggcccacactcttactgaagctggaccttcagaagctcctgccaaagctaaaccttcgaaaactgcaccgataactctggagaaagagagtgttcctgagaaattcaaatatcctgctcctaaagcacccattaaagagctggaattcattgttcgacatgcttcaggaaagcagctatcagaagagcaggtagtcgaagtgcaacactatgccagggatctaaagtacccctaaggatccttggtatatggtggtagtgacgaagatgacttcctttactgtctaccagacagcaaagagatacatgtttaccgggaaatgatggacaatataggatatccgaagcttgaacttggcctatctgcaatatcaaaagatcagcttgcagacagtcttgcttacaatagtctgaaggtgtgtatagtttgacttgtgtaaaataaattatttttatggtttttttgctatagttatgtgctcactcttcattttctagggcttaattctgagcaaggctctaaagtcccagaaggaagcagaggatgagagctaccgaatagctcttgagaatctttgctcataagtcatcacactaaggaacgaagctcttgaaaaggataagatattactttccttaatggataggctaaaatctaacgaggctaaacttgctgcacaagccgaagctcataaagccaaagtggaagaactaaaaaggaaggttgctgaagcaaccgaaaaattcaaagttgaggtggtgaagcatgagatttgcgagatcgagaggtcaagagcacaaaagaacaccgatgtgcttcgtgcttccaaagaaaagtgttatgaaatatccttggaatgcgccaggaaactaaaggacaactttgctagggttggggcatattcctctgagcagagattaatccatggcgaccctgatggagttgttcagtggatcagcggggaagctaaagcttttgacgaaattctaagtgaccgaggagatttctgcgcctttgctggtgcgtgggaggccacgtccatcttagaaaaggccggttgcgaacatgccaaggttgtagttcagcctgaatttgttttctcagccgacgacattaaaaatcgttcaaccaaagcttctgcgttaggcgggaaattttactccgaggtatggatgaagggcggccgtgagatagctgatgaagatattagaaagaatgaaaagaatctgacgacgctcaagaagaagcgaaaagagctaaagaagctactgagcgtgtgaggcttatagttgaactttctcccccaccggagccatacaaccaaaaagccgacccagccctgaaggaagcgcttaagacgattaaaattgtcaatgaagcagttgatgaagttgtcaacagactgctaaacgaagccaccaaaaaagtgttgaaagaagattaaagctttgtatatttgggagtttagcttttgtacacagctttcgcctttgtaagaaccaagtatcaactattttcatgtgtattaatgtaatatatttctttgtgatgcatgaa

SEQ ID NO: 16857 - DNA, 855 bp, Zea Mays
tacctgtgcccccatcctgctgctccttgcatcgatccctaccgaataatattctgcagtagtttctcgagctcctgtagcaagaaagaaaccatgtcgggggtatgggtgttcgaggacgggatcgtgcggcgtgcggacagcgacccgcccagcggcgccggcgccggcgggtcccggccgaacaaggtgctggtgcacgttcccagcggggaggtggtgacgtcgtatgacgtgctggagcggcggctacgcgagctcggctgggagcgctacctctacgacccctgtctgctccagttccaccagcgctccaccgtgcacctcatcaccgtaccccgtgacttctcccgcctcaagctggtccacatgtacgacgtcgtcgtcaagacccgaaacgtcttcgaggtccgtgacgccgcccctgcctgatggtcttcgtggcgacgcaagctgctgctgtgtgcctattagcttcgtgcaagctcgtcggaccggctggtactggagccctatcgccgccgtatcaacatacgtgcgcatgtattgtatgtttgtgattggtactgatcgagtacttacgtgtgatttgcatggcgcagcgcgttcgtgtggctgcttcttgcatgctgtcctactttgtctgccgccgaataaatgtacgcgagagcgccgccgccgtcgccgtcgccgtatgcttcttatatatccggatttgaggaatgtgtaccaaaatacagagacaatactcaaagaaagaagtcatccgggacaaaggatattactactacagctttatcatccaataacagaactatatcacatccattaggaacaatataaaatgatagcgcg

SEQ ID NO: 16858 - DNA, 635 bp, Zea Mays
tacctgtgcccccatcctgctgctccttgcatcgatccctaccgaataatattctgcagtagtttctcgagctcctgtagcaagaaagaaaccatgtcgggggtatgggtgttcgaggacgggatcgtgcggcgtgcggacagcgacccgcccagcggcgccggcgccggcgggtcccggccgaacaaggtgctggtgcacgttcccagcggggaggtggtgacgtcgtatgacgtgctggagcggcggctacgcgagctcggctgggagcgctacctctacgacccctgtctgctccagttccaccagcgctccaccgtgcacctcatcaccgtaccccgtgacttctcccgcctcaagctggtccacatgtacgacgtcgtcgtcaagacccgaaacgtcttcgaggtccgtgacgccgcccctgcctgatggtcttcgtggcgacgcaagctgctgctgtgtgcctattagcttcgtgcaagctcgtcggaccggctgaatgtgtaccaaaatacagagacaatactcaaagaaagaagtcatccgggacaaaggatattactactacagctttatcatccaataacagaactatatcacatccattaggaacaatataaaatgatagcgcg

SEQ ID NO: 16859 - DNA, 1213 bp, Zea Mays
tacctgtgcccccatcctgctgctccttgcatcgatccctaccgaataatattctgcagtagtttctcgagctcctgtagcaagaaagaaaccatgtcgggggtatgggtgttcgaggacgggatcgtgcggcgtgcggacagcgacccgcccagcggcgccggcgccggcgggtcccggccgaacaaggtgctggtgcacgttcccagcggggaggtggtgacgtcgtatgacgtgctggagcggcggctacgcgagctcggctgggagcgctacctctacgacccctgtctgctccagttccaccagcgctccaccgtgcacctcatcaccgtaccccgtgacttctcccgcctcaagctggtccacatgtacgacgtcgtcgtcaagacccgaaacgtcttcgaggtccgtgacgccgcccctgcctgatggtcttcgtggcgacgcaagctgctgctgtgtgcctattagcttcgtgcaagctcgtcggaccggctgcgcgttcgtgtggctgcttcttgcatgctgtcctactttgtctgccgccgaataaatgtacgcgagagcgccgccgccgtcgccgtcgccgtatgcttcttatatatccggatttgagggtgtgttctttgactctttagtattagtcactttctagaataccaaatgggttgaggatttctaggaactaatatttagttcctagagtttagacacgggtgactaaagaaatcaaacgttccatattgcttctctctatataaatatacattgatttttaagcccagtcatggtttataatatctaatttttagtattcaactttgtcaaaaaaagttcaattgtataaccttgattgttacccttttttccgttatcacacacacatacacagatacccggtagtagaaatggatctctctctctctctctctatatagtgtgtagcgtgtgtgtgaattttttacttatacggtagttattttcatatttatatatctttagatttagaatgtgtatggtttgacaaactgtatgtgcatagagtatatattatcgtattatattaagtatgattatacttattttataggctactataattatatgttacaaaaatatatattatatatatatggcaaattgcagaacggtatgtatgtgtgtgtacacacacatatatattgattttgacatctcaactttttggatt

SEQ ID NO: 16860 - DNA, 1856 bp, Zea Mays
attcaatcatctcttcaatccttggagcttaaaacaaatgaagatgctcatgtggttgaagacgatgtagaggaaacaaaacgacatttgaatgtggttttcattggccatgttgatgctggaaaatcaactaccggaggacaaatattgtttttgagtggtcaagttgatgataggaccatccagaaatatgagaaggaagcaaaggataaaagtcgggaaagttggtatatggcttacatcatggacacaaatgaggaagaaagggttaagggaaagactgttgaagttggtagggcccactttgagacagaacacacaagattcactatcttggatgcaccgggtcacaaaagttatgttccaaatatgataagtggtgcatctcaagctgacattggtgttctggtcatatctgctcgaaaaggtgaattcgaaacaggttatgaaagaggaggacagacccgtgaacatgtactacttgcaaaaactttgggtgttgctaagctggtagttgtaataaataagatggacgaacctactgttaaatggtctaaggaaaggtatgatgagattgaagcaaaaatggttccattcctcaaatcttcagggtacaatgttaagaaagatgtgcaattcttgccaatatctggtcttgtgggaaccaatatgaaaaccaggatggataaaagcatttgtagttggtgggatggcccatgtctttttgaagttctggaccgtattgtagttcctttacgtgaccccaaaggttcagtaaggatgccgattattgataaatataaggatatgggcactgttgcaatgggcaaaatagagtctggcactatcagagagggtgacagtttgttggttatgccaaacaagtcccatgtgaaagtcattggtttgaacttggatgagagcaaagtacgtcgtgctggacctgctgagaatgtccgtgttaaattgtctggagttgaagaggaggatgtaatggctggttttgtactttcaagtgttgctaatcctgttggtgccgttagtgaattcattgctcagttgcagattttagagttgcttgacaatgctattttcactgccggctacaaagctgtgttgcatattcactctgttgtcgaagagtgtgagattgttgagctcatagaggaaattggcatgaagaaaaagaaagaagaagatccaaagaagaaaaagccaaagaggaagcctctttttgtgaagaacggtgcaattgttgtttgccgcattcaggtgaataacttgatatgcatagagaagttctctgatttccctcagcttggaaggtttacacttagaactgaaggaaagacggtagctgtaggcaaagttgttgatattccgcctgctggtagcccaacattctgagcttaagtcaattttgaacaggatggataatcatgaagcagtgcgttcgcttaagatacttttttttgggaagtgagattagttgttgaggttagattttttttcagtccatcttgagaatggtctatgcctttatggtttaggctagcaagtcttagattggttgcataaaattacatctctggttacatgtgaggttgtaaaatcagtatggaattatggatgagtgtaccaaccttaatgtacccgttcaagattatggtggtatctttgcgtacaatgctgtaactatccatttttttttgtgtgtgtgtgaagttaaatataagatgaccacacgtggacaggccgcattaggcctcattcgtttatgtgggattgtaccggaatcattccactccacattattcctcatttcagttgttcaaagtttatataagggtgcgttt

SEQ ID NO: 16861 - DNA, 1976 bp, Zea Mays
cctgtgttaacttcctttctcattgactaactctggaaagttcaattctatttattatgtcaagtctaataacaagaaattccaatatcatccctctggtcatggattgttgttatagaaaaatgaccaaacaccttttcacttaatgtggccaactatgtagatctgcctttatagttcttctttcatggaaagtgacatgcttaatgaaattgttgctatttgctaacccggacatgtacattcaggtgtcaaggaaattcaatcatctcttcaatccttggagcttaaaacaaatgatgctcatgtggttgaagacgatgtagaggaaacaaaacgacatttgaatgtggttttcattggccatgttgatgctggaaaatcaactaccggaggacaaatattgtttttgagtggtcaagttgatgataggaccatccagaaatatgagaaggaagcaaaggataaaagtcgggaaagttggtatatggcttacatcatggacacaaatgaggaagaaagggttaagggaaagactgttgaagttggtagggcccactttgagacagaacacacaagattcactatcttggatgcaccgggtcacaaaagttatgttccaaatatgataagtggtgcatctcaagctgacattggtgttctggtcatatctgctcgaaaaggtgaattcgaaacaggttatgaaagaggaggacagacccgtgaacatgtactacttgcaaaaactttgggtgttgctaagctggtagttgtaataaataagatggacgaacctactgttaaatggtctaaggaaaggtatgatgagattgaagcaaaaatggttccattcctcaaatcttcagggtacaatgttaagaaagatgtgcaattcttgccaatatctggtcttgtgggaaccaatatgaaaaccaggatggataaaagcatttgtagttggtgggatggcccatgtctttttgaagttctggaccgtattgtagttcctttacgtgaccccaaaggttcagtaaggatgccgattattgataaatataaggatatgggcactgttgcaatgggcaaaatagagtctggcactatcagagagggtgacagtttgttggttatgccaaacaagctaatcctgttggtgccgttagtgaattcattgctcagttgcagattttagagttgcttgacaatgctattttcactgccggctacaaagctgtgttgcatattcactctgttgtcgaagagtgtgagattgttgagctcatagaggaaattggcatgaagaaaaagaaagaagaagatccaaagaagaaaaagccaaagaggaagcctctttttgtgaagaacggtgcaattgttgtttgccgcattcaggtgaataacttgatatgcatagagaagttctctgatttccctcagcttggaaggtttacacttagaactgaaggaaagacggtagctgtaggcaaagttgttgatattccgcctgctggtagcccaacattctgagcttaagtcaattttgaacaggatggataatcatgaagcagtgcgttcgcttaagatacttttttttgggaagtgagattagttgttgaggttagattttttttcagtccatcttgagaatggtctatgcctttatggtttaggctagcaagtcttagattggttgcataaaattacatctctggttacatgtgaggttgtaaaatcagtatggaattatggatgagtgtaccaaccttaatgtacccgttcaagattatggtggtatctttgcgtacaatgctgtaactatccatttttttttgtgtgtgtgtgaagttaaatataagatgaccacacgtggacaggccgcattaggcctcattcgtttatgtgggattgtaccggaatcattccactccacattattcctcatttcagttgttcaaagtttatataagggtgcgttt

SEQ ID NO: 16862 - DNA, 2469 bp, Zea Mays
atataaccttgtttttttccattgtgtttgcaacagaacatgggttgttcccttcccttgttctgaccatgcaaacattttcttatgcatgagataaatttgtaactaggctaggaggctcactcacttttgcatgctttttggtcagtttaattgctgctttctctttgcccatgagacattttttcctttctgtacaaatgctcgcaacagatatatacaactaagatctccaatcttgggctaatagtgattctttaacctaattatctaacgaatctgacagtatgaccaactgactatggtgaatgtcttattgctctggcctgggcttgcaagatgccaagctgtttatggcctgtgttaacttcctttctcattgactaactctggaaagttcaattctatttattatgtcaagtctaataacaagaaattccaatatcatccctctggtcatggattgttgttatagaaaaatgaccaaacaccttttcacttaatgtggccaactatgtagatctgcctttatagttcttctttcatggaaagtgacatgcttaatgaaattgttgctatttgctaacccggacatgtacattcaggtgtcaaggaaattcaatcatctcttcaatccttggagcttaaaacaaatgatgctcatgtggttgaagacgatgtagaggaaacaaaacgacatttgaatgtggttttcattggccatgttgatgctggaaaatcaactaccggaggacaaatattgtttttgagtggtcaagttgatgataggaccatccagaaatatgagaaggaagcaaaggataaaagtcgggaaagttggtatatggcttacatcatggacacaaatgaggaagaaagggttaagggaaagactgttgaagttggtagggcccactttgagacagaacacacaagattcactatcttggatgcaccgggtcacaaaagttatgttccaaatatgataagtggtgcatctcaagctgacattggtgttctggtcatatctgctcgaaaaggtgaattcgaaacaggttatgaaagaggaggacagacccgtgaacatgtactacttgcaaaaactttgggtgttgctaagctggtagttgtaataaataagatggacgaacctactgttaaatggtctaaggaaaggtatgatgagattgaagcaaaaatggttccattcctcaaatcttcagggtacaatgttaagaaagatgtgcaattcttgccaatatctggtcttgtgggaaccaatatgaaaaccaggatggataaaagcatttgtagttggtgggatggcccatgtctttttgaagttctggaccgtattgtagttcctttacgtgaccccaaaggttcagtaaggatgccgattattgataaatataaggatatgggcactgttgcaatgggcaaaatagagtctggcactatcagagagggtgacagtttgttggttatgccaaacaagtcccatgtgaaagtcattggtttgaacttggatgagagcaaagtacgtcgtgctggacctgctgagaatgtccgtgttaaattgtctggagttgaagaggaggatgtaatggctggttttgtactttcaagtgttgctaatcctgttggtgccgttagtgaattcattgctcagttgcagattttagagttgcttgacaatgctattttcactgccggctacaaagctgtgttgcatattcactctgttgtcgaagagtgtgagattgttgagctcatagaggaaattggcatgaagaaaaagaaagaagaagatccaaagaagaaaaagccaaagaggaagcctctttttgtgaagaacggtgcaattgttgtttgccgcattcaggtgaataacttgatatgcatagagaagttctctgatttccctcagcttggaaggtttacacttagaactgaaggaaagacggtagctgtaggcaaagttgttgatattccgcctgctggtagcccaacattctgagcttaagtcaattttgaacaggatggataatcatgaagcagtgcgttcgcttaagatacttttttttgggaagtgagattagttgttgaggttagattttttttcagtccatcttgagaatggtctatgcctttatggtttaggctagcaagtcttagattggttgcataaaattacatctctggttacatgtgaggttgtaaaatcagtatggaattatggatgagtgtaccaaccttaatgtacccgttcaagattatggtggtatctttgcgtacaatgctgtaactatccatttttttttgtgtgtgtgtgaagttaaatataagatgaccacacgtggacaggccgcattaggcctcattcgtttatgtgggattgtaccggaatcattccactccacattattcctcatttcagttgttcaaagtttatataagggtgcgttt

SEQ ID NO: 16863 - DNA, 458 bp, Zea Mays
aggaaattcaatcatctcttcaatccttggagcttaaaacaaatgatgctggaaaatcaactaccggaggacaaatattgtttttgagtggtcaagttgatgataggaccatccagaaatatgagaaggaagcaaaggataaaagtcgggaaagttggtatatggcttacatcatggacacaaatgaggaagaaagggttaagggaaagactgttgaagttggtagggcccactttgagacagaacacacaagattcactatcttggatgcaccgggtcacaaaagttatgttccaaatatgataagtggtgcatctcaagctgacattggtgttctggtcatatctgctcgaaaaggtgaattcgaaacaggttatgaaagaggaggacagacccgtgaacatgtactacttgcaaaaactttgggtgttgctaagctggtagttgtaataaataag

SEQ ID NO: 16864 - DNA, 1539 bp, Zea Mays
cttgaacaagagcacacaaacacttcgttcccagatttttttttctctgaaaagttgaaacttctacaaagcaaaaagattattaaggagtggacgacagtaaaacactggcctaagtgctagtgacacgccggatgccaaacgaatgacatcgactaccataagggagtcgcggccgaaggtgacgctggtggcgcggatggttgcgtccgtggccaactacgactacatcatggattgggagttccagatggacggtctcgtccgcattaaggttgggctgagcgggatcctgatggtgaagggcacgtcctactcccacctgagcgaggcccgcgggaacgagggcgacatgcacggcacgctgctctcggagaacgtgatcggcgtcatccacgaccactacgtgaccttccgcctggacatggacgtcgacggcgccgacaactcgttcgttcgcgtggagatggcgcggcaggagacgggccccggcgatgagtcgccccggaggagctacctcagggccacccgccgcgtggcggagaccgagaaggacgcgcgggtgcgcctcagcctctaccacccggcggagttccacgtcgtcaaccccgccaagaagacgcgcgtcggcaaccccgttggctacaaggtcgtccctgccggcaccgccgcgagcttgctggacccggaggatccgccgcagaagaggggtgctttcacaaacaatcagatatgggtgacgccctacaacaagagcgaggaatgggccggcggcctgttcgtgtaccagagcaaaggggaggacactctggatacttggtccgagagagaccgtccgatcgagaacaaggacctggtgctgtggtacacgctggggttccaccacatcccgtgccaggaggacttccccatcatgcccaccgtgtcgtcaagcttcgacctcaagccagtcaacttcttcgagagcaaccccatcctcaagcagcgcccgaccaaagaggatgatctgcccatctgtactgcctccaccgccgcgtagcctactaggagggccgggggcgaactgattaaccggagacccatcaatcagcttgcatgcattgctgtgtgttgtgctcttgctaagctttattagtacgtaccacgaacctaatgcatgggccgtatctcatagtactccgtcagttctattttatttgtcacggtttagtttaaaaatgaactaacgaacaacgaatattcgaaaacggttatgataaatgagaactttgttggtatgatcagctaatgcatggagctatcggttgtgatggactttggatgctcgctttcttttcgatctaacccgggtgttaaccctttagtcctggctggtgtaacaccaattgggactagtgcagaccttttagtcacgacgtctataaaacttgggtccgaaactaatactcacatataatcttggtcggttggaggctcgggattcagggaactaatactcacatataatcttggttggttggaggctcgggattcagaggg

SEQ ID NO: 16865 - DNA, 2025 bp, Zea Mays
atgcgcgcgaaggggcgcgtaagatactagtatttctctctctacgggagttccctctccttcggtccttcgcgagtccaatggccgcctcgccctcttcacccttgacagcgccgccagagccggtgaccccgccgtccccatggaccatcacagacggagccatctctggcacgctcccagcagccgaggccttcgcagtgcactacccgggctacccctcctctcccgcccgcgccgcccgcaccctcggcggtctccccggcctcgccaaggtccggagttccgatcccggcgcccgcctcgagctccgcttccgccccgaggacccctactgccatccagcctttggccagtcccgcgcctccactggccttctgctgcgcctctccaagcgcaaaggagctgcggcaccttgtgcccatgtggtcgctcgtgtccggactgcttactacttcgaagataagacaggacatgatgaagcagatggagatgtcatgatgttggtaccccctctcttttcagtgaaggataggccaacaaagatagcgcttgtaccatcgtccaatgccatatctaaaaccatgcacaggggagttgtacaagaacggtgggagatgaatgttggaccaactctggcgcttccgttcaacactcaagttgtcccggagaagattaattgggaagaccacattagaaagaattctgtagaatggggttggcaaatggctgtttgcaaattgtttgatgagcgccctgtgtggccaaggcaatcactttatgagcggttccttgatgataatgtgcatgtctctcaaaaccaattcaaaaggcttctgtttagagctggatactacttctctactggaccctttggaaaattttggatcagaagaggatatgaccctcgtaaagactctgagtcacaaatgtctcgaaagtgggcagatatgtgcaagcttgaaacaatgccatcacagagtttcatctacctgcaattatatgaactgaaggatgattttattcaagcagaaattcgaaaaccttcttatcaatcagtttgttcacgttctacaggatggttttctaagccaatgatcaaaaccctgaggttgcaagtgagcataaggctcctctctttattgcataatgaagaggctaaaaacttgttgaggaatgcccatgagcttattgaaaggtccaagaagcaggaagccctttcgagatctgagctgtcaatagaatataatgatgctgatcaagtttctgccgcacatactggaactgaggatcaagtcggccctaacaactctgatagtgaagatgtggatgatgaagaagaggaagaggaattggagggttatgattctccacctatggcagatgatattcatgagttcaccttaggtgattcctatgcatttggtgaaggcttctcgaatggatacctcgaagaagtactgcgcagcttgccattgcaggaagacggccaaaagaaattatgtgatgctcctatcaacgctgatgcaagtgatggagagtttgaaatttacgaacagcccagtgatgatgaagattctgatggctagttgtatctttttttgagctgtgatcttccttagcttcagttttctaaacacataggattggttcacatgtatgtaagaactgcatagatggcttatttgttaaattattttgggtactgaggagcttagtagttcaaacccatcagtggcactttggctattgaaaatcatagccccaccacaccgatgaggacagccacgctgccattggacttgtgcccgtaactgctgttgctcgctgcaaaactcgcatatgattttccattggccgagctcagatattcagggcgacatgttaaggggatgtttggtttatagggactagtttttagttttcgtatttagtaatttagtgacaaaaatgaaataaaatagagtgactcaaaattagttcctaagacaaaacatcccctaagaccacggtatttcgagattt

SEQ ID NO: 16866 - DNA, 2114 bp, Zea Mays
atgcgcgcgaaggggcgcgtaagatactagtatttctctctctacgggagttccctctccttcggtccttcgcgagtccaatggccgcctcgccctcttcacccttgacagcgccgccagagccggtgaccccgccgtccccatggaccatcacagacggagccatctctggcacgctcccagcagccgaggccttcgcagtgcactacccgggctacccctcctctcccgcccgcgccgcccgcaccctcggcggtctccccggcctcgccaaggtccggagttccgatcccggcgcccgcctcgagctccgcttccgccccgaggacccctactgccatccagcctttggccagtcccgcgcctccactggccttctgctgcgcctctccaagcgcaaaggagctgcggcaccttgtgcccatgtggtcgctcgtgtccggactgcttactacttcgaaggtatggcagattttcaacatgttgttccagtgcatgctgcacaaacaagaaaaagaaaacactcagattctcaaaatgataatgagaattttggtagtgataagacaggacatgatgaagcagatggagatgtcatgatgttggtaccccctctcttttcagtgaaggataggccaacaaagatagcgcttgtaccatcgtccaatgccatatctaaaaccatgcacaggggagttgtacaagaacggtgggagatgaatgttggaccaactctggcgcttccgttcaacactcaagttgtcccggagaagattaattgggaagaccacattagaaagaattctgtagaatggggttggcaaatggctgtttgcaaattgtttgatgagcgccctgtgtggccaaggcaatcactttatgagcggttccttgatgataatgtgcatgtctctcaaaaccaattcaaaaggcttctgtttagagctggatactacttctctactggaccctttggaaaattttggatcagaagaggatatgaccctcgtaaagactctgagtcacaaatgtctcgaaagtgggcagatatgtgcaagcttgaaacaatgccatcacagagtttcatctacctgcaattatatgaactgaaggatgattttattcaagcagaaattcgaaaaccttcttatcaatcagtttgttcagatggttttctaagccaatgatcaaaaccctgaggttgcaagtgagcataaggctcctctctttattgcataatgaagaggctaaaaacttgttgaggaatgcccatgagcttattgaaaggtccaagaagcaggaagccctttcgagatctgagctgtcaatagaatataatgatgctgatcaagtttctgccgcacatactggaactgaggatcaagtcggccctaacaactctgatagtgaagatgtggatgatgaagaagaggaagaggaattggagggttatgattctccacctatggcagatgatattcatgagttcaccttaggtgattcctatgcatttggtgaaggcttctcgaatggatacctcgaagaagtactgcgcagcttgccattgcaggaagacggccaaaagaaattatgtgatgctcctatcaacgctgatgcaagtgatggagagtttgaaatttacgaacagcccagtgatgatgaagattctgatggctagttgtatctttttttgagctgtgatcttccttagcttcagttttctaaacacataggattggttcacatgtatgtaagaactgcatagatggcttatttgttaaattattttgggtactgaggagcttagtagttcaaacccatcagtggcactttggctattgaaaatcatagccccaccacaccgatgaggacagccacgctgccattggacttgtgcccgtaactgctgttgctcgctgcaaaactcgcatatgattttccattggccgagctcagatattcagggcgacatgttaaggggatgtttggtttatagggactagtttttagttttcgtatttagtaatttagtgacaaaaatgaaataaaatagagtgactcaaaattagttcctaagacaaaacatcccctaagaccacggtatttcgagattt

SEQ ID NO: 16867 - DNA, 2118 bp, Zea Mays
atgcgcgcgaaggggcgcgtaagatactagtatttctctctctacgggagttccctctccttcggtccttcgcgagtccaatggccgcctcgccctcttcacccttgacagcgccgccagagccggtgaccccgccgtccccatggaccatcacagacggagccatctctggcacgctcccagcagccgaggccttcgcagtgcactacccgggctacccctcctctcccgcccgcgccgcccgcaccctcggcggtctccccggcctcgccaaggtccggagttccgatcccggcgcccgcctcgagctccgcttccgccccgaggacccctactgccatccagcctttggccagtcccgcgcctccactggccttctgctgcgcctctccaagcgcaaaggagctgcggcaccttgtgcccatgtggtcgctcgtgtccggactgcttactacttcgaaggtatggcagattttcaacatgttgttccagtgcatgctgcacaaacaagaaaaagaaaacactcagattctcaaaatgataatgagaattttgataagacaggacatgatgaagcagatggagatgtcatgatgttggtaccccctctcttttcagtgaaggataggccaacaaagatagcgcttgtaccatcgtccaatgccatatctaaaaccatgcacaggggagttgtacaagaacggtgggagatgaatgttggaccaactctggcgcttccgttcaacactcaagttgtcccggagaagattaattgggaagaccacattagaaagaattctgtagaatggggttggcaaatggctgtttgcaaattgtttgatgagcgccctgtgtggccaaggcaatcactttatgagcggttccttgatgataatgtgcatgtctctcaaaaccaattcaaaaggcttctgtttagagctggatactacttctctactggaccctttggaaaattttggatcagaagaggatatgaccctcgtaaagactctgagtcacaaatgtctcgaaagtgggcagatatgtgcaagcttgaaacaatgccatcacagagtttcatctacctgcaattatatgaactgaaggatgattttattcaagcagaaattcgaaaaccttcttatcaatcagtttgttcacgttctacaggatggttttctaagccaatgatcaaaaccctgaggttgcaagtgagcataaggctcctctctttattgcataatgaagaggctaaaaacttgttgaggaatgcccatgagcttattgaaaggtccaagaagcaggaagccctttcgagatctgagctgtcaatagaatataatgatgctgatcaagtttctgccgcacatactggaactgaggatcaagtcggccctaacaactctgatagtgaagatgtggatgatgaagaagaggaagaggaattggagggttatgattctccacctatggcagatgatattcatgagttcaccttaggtgattcctatgcatttggtgaaggcttctcgaatggatacctcgaagaagtactgcgcagcttgccattgcaggaagacggccaaaagaaattatgtgatgctcctatcaacgctgatgcaagtgatggagagtttgaaatttacgaacagcccagtgatgatgaagattctgatggctagttgtatctttttttgagctgtgatcttccttagcttcagttttctaaacacataggattggttcacatgtatgtaagaactgcatagatggcttatttgttaaattattttgggtactgaggagcttagtagttcaaacccatcagtggcactttggctattgaaaatcatagccccaccacaccgatgaggacagccacgctgccattggacttgtgcccgtaactgctgttgctcgctgcaaaactcgcatatgattttccattggccgagctcagatattcagggcgacatgttaaggggatgtttggtttatagggactagtttttagttttcgtatttagtaatttagtgacaaaaatgaaataaaatagagtgactcaaaattagttcctaagacaaaacatcccctaagaccacggtatttcgagattt

SEQ ID NO: 16868 - DNA, 1561 bp, Zea Mays
atgcgcgcgaaggggcgcgtaagatactagtatttctctctctacgggagttccctctccttcggtccttcgcgagtccaatggccgcctcgccctcttcacccttgacagcgccgccagagccggtgaccccgccgtccccatggaccatcacagacggagccatctctggcacgctcccagcagccgaggccttcgcagtgcactacccgggctacccctcctctcccgcccgcgccgcccgcaccctcggcggtctccccggcctcgccaaggtccggagttccgatcccggcgcccgcctcgagctccgcttccgccccgaggacccctactgccatccagcctttggccagtcccgcgcctccactggccttctgctgcgcctctccaagcgcaaaggagctgcggcaccttgtgcccatgtggtcgctcgtgtccggactgcttactacttcgaaggtatggcagattttcaacatgttgttccagtgcatgctgcacaaacaagaaaaagaaaacactcagattctcaaaatgataatgagaattttgataagacaggacatgatgaagcagatggagatgtcatgatgttggtaccccctctcttttcagtgaaggataggccaacaaagatagcgcttgtaccatcgtccaatgccatatctaaaaccatgcacaggggagttgtacaagaacggtgggagatgaatgttggaccaactctggcgcttccgttcaacactcaagttgtcccggagaagattaattgggaagaccacattagaaagaattctgtagaatggggttggcaaatggctgtttgcaaattgtttgatgagcgccctgtgtggccaaggcaatcactttatgagcggttccttgatgataatgtgcatgtctctcaaaaccaattcaaaaggcttctgtttagagctggatactacttctctactggaccctttggaaaattttggatcagaagaggatatgaccctcgtaaagactctgagtcacaaatatatcagagaattgattttcgcatgcctcccgagctacgatatcttctaaggctgaagaattctgagtctcgaaagtgggcagatatgtgcaagcttgaaacaatgccatcacagagtttcatctacctgcaattatatgaactgaaggatgattttattcaagcagaaattcgaaaaccttcttatcaatcagtttgttcacgttctacaggatggttttctaagccaatgatcaaaaccctgaggttgcaagtgagcataaggctcctctctttattgcataatgaagaggctaaaaacttgttgaggaatgcccatgagcttattgaaaggtccaagaagcaggaagccctttcgagatctgagctgtcaatagaatataatgatgctgatcaagtttctgccgcacatactggaactgaggatcaagtcggccctaacaactctgatagtgaagatgtggatgatgaagaagaggaagaggaattggagggttatgattctccacctatgttaacctttatgattactcttgt

SEQ ID NO: 16869 - DNA, 1575 bp, Zea Mays
gagaccatgaaggccatacagggggcactgataatgtcctccagcattcagatcattctaggctacatccagctatgggaaaatacagaggcagggtggcctatctcgaagattttcaaatgtgtcctattacggtctcacaaccccgccatataaactggatgctctggaaccttatatgagcaagaggacagttgaacttcactggggtaagcaccatcaagattacatggatggcttgaataatcagctggctaccagccctctgtatggatacactctggaggatctgataaaagaagcttataacaatgacaatccattaccagaatataacaacacagcacaggtaactcgtttatgataccccattcattatattttgcttgcactgaccatcttcttcctgtcatttgttttctttcaaaaagaaaaataatgcaatttgtgctttcgccaataataggatggttgggtttggcttgtctgtgagtttctttctattttttctgaagtacaggcaccactgattcaagctactgatttcctgaattgctctttctatagcaagtttataagttcagtttatattccattgaatatttgttgcagtgaagagaaatgagagaaagcttttggttgttcatacacgaaatgctatctccccacttgcttttggtgacattcacgcttactacttagactacaaggatgataagctaacatatgtcacaaacttcatggaccatcttgtctcttggcatactgtcactctacgcatgatgcgtgcagagtcttttgtgaaccttggtgagccaaatatcctagaggcttgagctacagatacaccctagttatcataatgaggcattcttcggatacatcggatcaaatcctgctggaggagccagagagttggaaaatctcatgtctcacaagaaatgcttatcaccccaatgtcatatacgccaagataagctgctgggatttcaccattgcccttggatattgctacaaggaaatcactagtcagcatccagtttgaagacatgcaacaaaacaactctagaagctatggagctggtagattctggagttggcagtaaggcagtgatccaacttgggctttgaagccatggtgctttctctagacggctattatgtctgtagtgttgttagaataatcctggttctgtgttttcataacttcatcatgctagtgttctgttgtagcggaacacagaatggaacggaacgatattcttgttttactggttgagcactacacgacgattgtttttctagggtgttctggacaaagaaagcttgtaccttaaaacaggaggatacaagaagctggagtggttgtctgaaggcttttgaactgcttgaagcattaggttagctctggagattttgtgaatgatctagctagctatctgtaaatgatctagttgtgaatgatattataattctgatgcttttgtgaatatataattgtgtttgtgtatattgattaactgtgtatgtctttatgatttgtgtataaaaatctgtgatttgtggtgcttaatt

SEQ ID NO: 16870 - DNA, 1259 bp, Zea Mays
gtttgcaagtttttttccccatctgtagttgagcagaggttcctggagaccatgaaggccatacagggggcactgataatgtcctccagcattcagatcattctaggctacatccagctatgggaaaatacagaggcagggtggcctatctcgaagattttcaaatgtgtcctattacggtctcacaaccccgccatataaactggatgctctggaaccttatatgagcaagaggacagttgaacttcactggggtaagcaccatcaagattacatggatggcttgaataatcagctggctaccagccctctgtatggatacactctggaggatctgataaaagaagcttataacaatgacaatccattaccagaatataacaacacagcacaggatgataagctaacatatgtcacaaacttcatggaccatcttgtctcttggcatactgtcactctacgcatgatgcgtgcagagtcttttgtgaaccttggtgagccaaatatcctagaggcttgagctacagatacaccctagttatcataatgaggcattcttcggatacatcggatcaaatcctgctggaggagccagagagttggaaaatctcatgtctcacaagaaatgcttatcaccccaatgtcatatacgccaagataagctgctgggatttcaccattgcccttggatattgctacaaggaaatcactagtcagcatccagtttgaagacatgcaacaaaacaactctagaagctatggagctggtagattctggagttggcagtaaggcagtgatccaacttgggctttgaagccatggtgctttctctagacggctattatgtctgtagtgttgttagaataatcctggttctgtgttttcataacttcatcatgctagtgttctgttgtagcggaacacagaatggaacggaacgatattcttgttttactggttgagcactacacgacgattgtttttctagggtgttctggacaaagaaagcttgtaccttaaaacaggaggatacaagaagctggagtggttgtctgaaggcttttgaactgcttgaagcattaggttagctctggagattttgtgaatgatctagctagctatctgtaaatgatctagttgtgaatgatattataattctgatgcttttgtgaatatataattgtgtttgtgtatattgattaactgtgtatgtctttatgatttgtgtataaaaatctgtgatttgtggtgcttaatt

SEQ ID NO: 16871 - DNA, 2168 bp, Zea Mays
ggtcgctatagagcaaggatcactatcaaatcttatagcctgaacgtacctgtagatgttagtgactaaaaattaattaaaacaagtaaacattaatcgctaaattgcatggtgatttatttctttttaatattgcttgtatatttatttcatggtttgtttatgtatggacatgactataatatgcaattgtgttctttgtgcttatatgatattagattcgagttgaaagtcgtttcaaatgtttgttatttatttgcattcgtaataatttattcaaatgtctattatttatttggtaatttttttatcaatttttgattaatttaaaaatgcatttcgaaataaaaaaagaaaagaaaaccctccctaaccctaaggcccactagggcccatctacctaactctccctcccacgccgtccctgtctcctcccaacatcgccgtcgtcgcccactcgcccccgtccctgcagtcgcccgtgctccgcccgctccaccagggcgcctcgccctaggggatggtctccgaccacctcccttcaccgccgccacgtgctcagtgacgcctaggtcatcggcgctgaagtttggaggccctgtacgtgcttcacagagatcgccgaccatgggctacgcagagatcgccatccgcccctctgggagcggcaagaaaatacagaggcagggtggcctatctcgaagattttcaaatgtgtcctattacggtctcacaaccccgccatataaactggatgctctggaaccttatatgagcaagaggacagttgaacttcactggggtaagcaccatcaagattacatggatggcttgaataatcagctggctaccagccctctgtatggatacactctggaggatctgataaaagaagcttataacaatgacaatccattaccagaatataacaacacagcacaggtaactcgtttatgataccccattcattatattttgcttgcactgaccatcttcttcctgtcatttgttttctttcaaaaagaaaaataatgcaatttgtgctttcgccaataataggatggttgggtttggcttgtctgtgagtttctttctattttttctgaagtacaggcaccactgattcaagctactgatttcctgaattgctctttctatagcaagtttataagttcagtttatattccattgaatatttgttgcagtgaagagaaatgagagaaagcttttggttgttcatacacgaaatgctatctccccacttgcttttggtgacattcacgcttactacttagactacaaggatgataagctaacatatgtcacaaacttcatggaccatcttgtctcttggcatactgtcactctacgcatgatgcgtgcagagtcttttgtgaaccttggtgagccaaatatcctagaggcttgagctacagatacaccctagttatcataatgaggcattcttcggatacatcggatcaaatcctgctggaggagccagagagttggaaaatctcatgtctcacaagaaatgcttatcaccccaatgtcatatacgccaagataagctgctgggatttcaccattgcccttggatattgctacaaggaaatcactagtcagcatccagtttgaagacatgcaacaaaacaactctagaagctatggagctggtagattctggagttggcagtaaggcagtgatccaacttgggctttgaagccatggtgctttctctagacggctattatgtctgtagtgttgttagaataatcctggttctgtgttttcataacttcatcatgctagtgttctgttgtagcggaacacagaatggaacggaacgatattcttgttttactggttgagcactacacgacgattgtttttctagggtgttctggacaaagaaagcttgtaccttaaaacaggaggatacaagaagctggagtggttgtctgaaggcttttgaactgcttgaagcattaggttagctctggagattttgtgaatgatctagctagctatctgtaaatgatctagttgtgaatgatattataattctgatgcttttgtgaatatataattgtgtttgtgtatattgattaactgtgtatgtctttatgatttgtgtataaaaatctgtgatttgtggtgcttaatt

SEQ ID NO: 16872 - DNA, 1624 bp, Zea Mays
caggggttgttggattggattgtagcctgcgccaccatattttaacttcaaatccgttgagatatgcttctttttcgggtctctttgtttccttcctccttttgctggagccactgactttgatgtctcaccaccatttcttcattgcattcccttttctctcaacttgaggcatccttgtgtacacaagatctgcctacgtgtttcagctgatctaagccaggcgcaactgtgaaacaatggcgacatccaagaaggatccccccaatcctagcagaggcaggacgtcacccaacctcatgtcgtccagcagtgagtcctctgggcacggatatggtgctaggcgggctcggtctgtaccgagttccgcgcaccgcaaatttggctcatcgtcgccgtctgtgtctgcctctggctccacagacgtgcatcattcatcattgttcaacgctggtaggtccatctcatcacggaccatgggctcttccatccagggcaccaaggcccagccattcccatctgcagcctcaaaacctacactggcaaaggagaaatccgacaaggtcagcaccaccttgcagcggcctccagtgcttgctgtgccggcagctaaggcatcgccatccaccttgccgaggagtaagccatctccaaggcctagttctgacagttgcaaagcggcagcatcactgaaacctagcagtcagagggtcatgttgccaggtgctgctcaaggagacaaagttcagccactgtctaccgcacagtcacctggtgcagctgcaaggaagagattggatactgttaatggtgctactaccaactcaaaggctaaaagtgtttctcagaaggcaatgggggcatcttcagccaggaaggagaaacataaggacccatcaatgcagattaagggaactgagtgcataaacaccaccacgtctatagaagagcacttgcacaaggagctccccgacccagttgatctgaaatccatggagatgactgtacctgatcagcatgagccatctttcaatgaaccagaacatgtactcaaagacgatgagaaatccgagggtcatttctctgaagagaaagtagatgcaggagctaatgagattcataatggagggcaagatgacaatggtggtgtcaagactatatatgaatgtgggattgttgagaagaaggctgaccggagtgtggataagacagtgccgaagactgaagtggctcaggtatggaggaaggatgatccaaagggcaatgacgtgattgaggaaaccaaaagcaagctcctgctggagaggaagagccgggtgaaggccttggtgggggcctttgaaactgtattgtcgttcaaggagtagtcctcaatcttgtcttctggtctcttgtgcccatctcaatattgagtaatatatatgatgacttccttggctcgttgtactctatatcgtatttcctttttctgaatcatcgttgcattcgatgtggatttgtctatttgttgctctttattgatgtagaattaaattaaattccggtgcttatggcgagaacatttggattctgtgaggaatattcttacttgcaatttttaatatctttcaaatttgtgcgctat

SEQ ID NO: 16873 - DNA, 1486 bp, Zea Mays
gggagattctaggctccatctgatctcgctgcattttgttcttttcctccagtccgaggcgcaatagataactgatctaagccaggcgcaactgtgaaacaatggcgacatccaagaaggatccccccaatcctagcagaggcaggacgtcacccaacctcatgtcgtccagcagtgagtcctctgggcacggatatggtgctaggcgggctcggtctgtaccgagttccgcgcaccgcaaatttggctcatcgtcgccgtctgtgtctgcctctggctccacagacgtgcatcattcatcattgttcaacgctggtaggtccatctcatcacggaccatgggctcttccatccagggcaccaaggcccagccattcccatctgcagcctcaaaacctacactggcaaaggagaaatccgacaaggtcagcaccaccttgcagcggcctccagtgcttgctgtgccggcagctaaggcatcgccatccaccttgccgaggagtaagccatctccaaggcctagttctgacagttgcaaagcggcagcatcactgaaacctagcagtcagagggtcatgttgccaggtgctgctcaaggagacaaagttcagccactgtctaccgcacagtcacctggtgcagctgcaaggaagagattggatactgttaatggtgctactaccaactcaaaggctaaaagtgtttctcagaaggcaatgggggcatcttcagccaggaaggagaaacataaggacccatcaatgcagattaagggaactgagtgcataaacaccaccacgtctatagaagagcacttgcacaaggagctccccgacccagttgatctgaaatccatggagatgactgtacctgatcagcatgagccatctttcaatgaaccagaacatgtactcaaagacgatgagaaatccgagggtcatttctctgaagagaaagtagatgcaggagctaatgagattcataatggagggcaagatgacaatggtggtgtcaagactatatatgaatgtgggattgttgagaagaaggctgaccggagtgtggataagacagtgccgaagactgaagtggctcaggtatggaggaaggatgatccaaagggcaatgacgtgattgaggaaaccaaaagcaagctcctgctggagaggaagagccgggtgaaggccttggtgggggcctttgaaactgtattgtcgttcaaggagtagtcctcaatcttgtcttctggtctcttgtgcccatctcaatattgagtaatatatatgatgacttccttggctcgttgtactctatatcgtatttcctttttctgaatcatcgttgcattcgatgtggatttgtctatttgttgctctttattgatgtagaattaaattaaattccggtgcttatggcgagaacatttggattctgtgaggaatattcttacttgcaatttttaatatctttcaaatttgtgcgctat

SEQ ID NO: 16874 - DNA, 2500 bp, Zea Mays
gcgctcgtaatgcatttagatgtgttatagacctactagacaagtatttagagctagcaaaactaaaatgacaaaggaacaaatgacaaaaaaaaatccgtaaaagaagactgcagggcaggcagccagtgaagaagaagggaggggcgagtcagagagaacaagtacaacaacatcgagaccgagacggaacggagaacggccgcagctcaaacaccaggcaagcccaacccgacagcagtcagcaacctcgcaccaccacctccgtcgcagcatcaggccagcagccgccggcgccgggagccgtcgcgaagcaccccaggccttgccccctcctgcaaacgaagtgttccgtgagagcacgcttcggcgacatagcggccacagctgcagcatcctgtggagaccggcgagaacagcaccaggagctgctcccgatcactcctgcaacacacggcctcgcccgtgcctgcgcgcgcgcagaagtagcaaagttcagttgtagatatatggaattcttttcctgagaaatgccgtcctctacaccaccatcagtacaacccactccaagccttcagacattaacatctcctgcagtagcccagaatactcatattgatgttagtgagatcaagtccaagatttttaagaggataggacatgaacgaggaaataaatactttcagcacctggaaaggttcttatcttcaagattgagcaagaatgaattcgagaagctctgtcttgtggcacttggccgtgaaaacctcccattgcacaaccaccttatctgttccattctacataatgccagtcgagcttgtggcccacctgtaattaatgaccctaagctggtcagaggtgccaccacttctggccatgcagttgttcctcctgtctgggacaatggtggtgccttgaacctaaatgccaaagagaaaaaaccattaatcagaagggaaaatgtactaacccaaaagtcatcactgaatcattgtgagactattatgctggagaatggtgttcatcatttgagtgatctgaagagatgtacacaatttcaaaaaaaagaccatgtagagctgctcatcaagcgaccgcgtgtggagaaggaaccagtcagtttacataattctctacacagcaataggttttctaaggcttcaagagaaaacctgggtcaagaaattatacaccaattccaaggtccagttcaagcaccacttggcattcagttacgtcatggcagttttggtgtggcccaaatacctttaccccttgcttctgtgagttcaaaggatacctctgatacttgtattgaagatggtgaactctgtgatacttcgtcagtgaagaaaaggatggacaaagtggcaggagcaaatgggttggaaggggtctcgatagagtgtgctaatttgttgaataatggcattgatgttttcatgaagcagttaattggatcttgcattgaattagttagagcaaggtctcgacatggcaaactaaggcatgagacattgaagcagcagctgtgccgaaagctaataaatggtgtatcagtgcataaccatgttcctgggcagagttctgttatacctccagagacaaattccatctccatgcaggacttaaaggcagtaatagagttaaacccttgtttgcttgggattaatgcatcactgctacacgaaaagatcaattcatatgactagtaggatggagctagttgtattcatctcgtcacaagatcctatgatcttgatggtctgtcttgtttcatggctgttgtaatcaagccataagtttattgatgggtggcggtgaaggcaagcgcattctgtgcagtaccctgattgttttgcatgtcatctccagtgcaatcttccagaatgaacaaaaaactgtgtacctgctgggtgcagtactaaaataattcatttcatccacctaaggagtaaggactacgatgggcgaaagtgctccagagataactatgttgctggactccagacaaattgaggaaccatatcaaagatttgatctatgggttatgtccaggtttgggtgtcacggccccacaaagctttcctctgcaattgatacaaagatagggtagtgtgaaacaaagcctggtggctgtttcttcgtgctgtttgcccgagcgttggcaaagcatttgttcttaatcatggtttattggcacgctcagtgttgcgtccccaggcactctccttacagaagtgcaataatgcggacaaaccactccactggtttttctatgttgattgttgtgtaaacgccgattgatttgtacaagtaaatcaatgtatcatgtctaaataactcatacatagtgttggtttcatgttttagttcccaagttttgcaaatatatgtttacggtattatgtttgtataaacaagttttgtgacgacacttctcgattcttcatgactacttgcattgtaatgcaataaagtcgtcatagtatccaca

SEQ ID NO: 16875 - DNA, 2564 bp, Zea Mays
gcgctcgtaatgcatttagatgtgttatagacctactagacaagtatttagagctagcaaaactaaaatgacaaaggaacaaatgacaaaaaaaaatccgtaaaagaagactgcagggcaggcagccagtgaagaagaagggaggggcgagtcagagagaacaagtacaacaacatcgagaccgagacggaacggagaacggccgcagctcaaacaccaggcaagcccaacccgacagcagtcagcaacctcgcaccaccacctccgtcgcagcatcaggccagcagccgccggcgccgggagccgtcgcgaagcaccccaggccttgccccctcctgcaaacgaagtgttccgtgagagcacgcttcggcgacatagcggccacagctgcagcatcctgtggagaccggcgagaacagcaccaggagctgctcccgatcactcctgcaacacacggcctcgcccgtgcctgcgcgcgcgcagaagtagcaaagtgattttccatgattggcagtgtagtatcggattcagagttcttcgtggtattctactttgcagttcagttgtagatatatggaattcttttcctgagaaatgccgtcctctacaccaccatcagtacaacccactccaagccttcagacattaacatctcctgcagtagcccagaatactcatattgatgttagtgagatcaagtccaagatttttaagaggataggacatgaacgaggaaataaatactttcagcacctggaaaggttcttatcttcaagattgagcaagaatgaattcgagaagctctgtcttgtggcacttggccgtgaaaacctcccattgcacaaccaccttatctgttccattctacataatgccagtcgagcttgtggcccacctgtaattaatgaccctaagctggtcagaggtgccaccacttctggccatgcagttgttcctcctgtctgggacaatggtggtgccttgaacctaaatgccaaagagaaaaaaccattaatcagaagggaaaatgtactaacccaaaagtcatcactgaatcattgtgagactattatgctggagaatggtgttcatcatttgagtgatctgaagagatgtacacaatttcaaaaaaaagaccatgtagagctgctcatcaagcgaccgcgtgtggagaaggaaccagtcagtttacataattctctacacagcaataggttttctaaggcttcaagagaaaacctgggtcaagaaattatacaccaattccaaggtccagttcaagcaccacttggcattcagttacgtcatggcagttttggtgtggcccaaatacctttaccccttgcttctgtgagttcaaaggatacctctgatacttgtattgaagatggtgaactctgtgatacttcgtcagtgaagaaaaggatggacaaagtggcaggagcaaatgggttggaaggggtctcgatagagtgtgctaatttgttgaataatggcattgatgttttcatgaagcagttaattggatcttgcattgaattagttagagcaaggtctcgacatggcaaactaaggcatgagacattgaagcagcagctgtgccgaaagctaataaatggtgtatcagtgcataaccatgttcctgggcagagttctgttatacctccagagacaaattccatctccatgcaggacttaaaggcagtaatagagttaaacccttgtttgcttgggattaatgcatcactgctacacgaaaagatcaattcatatgactagtaggatggagctagttgtattcatctcgtcacaagatcctatgatcttgatggtctgtcttgtttcatggctgttgtaatcaagccataagtttattgatgggtggcggtgaaggcaagcgcattctgtgcagtaccctgattgttttgcatgtcatctccagtgcaatcttccagaatgaacaaaaaactgtgtacctgctgggtgcagtactaaaataattcatttcatccacctaaggagtaaggactacgatgggcgaaagtgctccagagataactatgttgctggactccagacaaattgaggaaccatatcaaagatttgatctatgggttatgtccaggtttgggtgtcacggccccacaaagctttcctctgcaattgatacaaagatagggtagtgtgaaacaaagcctggtggctgtttcttcgtgctgtttgcccgagcgttggcaaagcatttgttcttaatcatggtttattggcacgctcagtgttgcgtccccaggcactctccttacagaagtgcaataatgcggacaaaccactccactggtttttctatgttgattgttgtgtaaacgccgattgatttgtacaagtaaatcaatgtatcatgtctaaataactcatacatagtgttggtttcatgttttagttcccaagttttgcaaatatatgtttacggtattatgtttgtataaacaagttttgtgacgacacttctcgattcttcatgactacttgcattgtaatgcaataaagtcgtcatagtatccaca

SEQ ID NO: 16876 - DNA, 2593 bp, Zea Mays
tcaaagcctagtaccaatggtatgtttcgctcgcaatgttacgtgcgctcgtaatgcatttagatgtgttatagacctactagacaagtatttagagctagcaaaactaaaatgacaaaggaacaaatgacaaaaaaaaatccgtaaaagaagactgcagggcaggcagccagtgaagaagaagggaggggcgagtcagagagaacaagtacaacaacatcgagaccgagacggaacggagaacggccgcagctcaaacaccaggcaagcccaacccgacagcagtcagcaacctcgcaccaccacctccgtcgcagcatcaggccagcagccgccggcgccgggagccgtcgcgaagcaccccaggccttgccccctcctgcaaacgaagtgttccgtgagagcacgcttcggcgacatagcggccacagctgcagcatcctgtggagaccggcgagaacagcaccaggagctgctcccgatcactcctgcaacacacggcctcgcccgtgcctgcgcgcgcgcagaagtagcaaagtgattttccatgattggcagtgtagtatcggattcagagttcttcgtggtattctactttgcagttcagttgtagatatatggaattcttttcctgagaaatgccgtcctctacaccaccatcagtacaacccactccaagccttcagacattaacatctcctgcagtagcccagaatactcatattgatgttagtgagatcaagtccaagatttttaagaggataggacatgaacgaggaaataaatactttcagcacctggaaaggttcttatcttcaagattgagcaagaatgaattcgagaagctctgtcttgtggcacttggccgtgaaaacctcccattgcacaaccaccttatctgttccattctacataatgccagtcgagcttgtggcccacctgtaattaatgaccctaagctggtcagaggtgccaccacttctggccatgcagttgttcctcctgtctgggacaatggtggtgccttgaacctaaatgccaaagagaaaaaaccattaatcagaagggaaaatgtactaacccaaaagtcatcactgaatcattgtgagactattatgctggagaatggtgttcatcatttgagtgatctgaagagatgtacacaatttcaaaaaaaagaccatgtagagctgctcatcaagcgaccgcgtgtggagaaggaaccagtcagtttacataattctctacacagcaataggttttctaaggcttcaagagaaaacctgggtcaagaaattatacaccaattccaaggtccagttcaagcaccacttggcattcagttacgtcatggcagttttggtgtggcccaaatacctttaccccttgcttctgtgagttcaaaggatacctctgatacttgtattgaagatggtgaactctgtgatacttcgtcagtgaagaaaaggatggacaaagtggcaggagcaaatgggttggaaggggtctcgatagagtgtgctaatttgttgaataatggcattgatgttttcatgaagcagttaattggatcttgcattgaattagttagagcaaggtctcgacatggcaaactaaggcatgagacattgaagcagcagctgtgccgaaagctaataaatggtgtatcagtgcataaccatgttcctgggcagagttctgttatacctccagagacaaattccatctccatgcaggacttaaaggcagtaatagagttaaacccttgtttgcttgggattaatgcatcactgctacacgaaaagatcaattcatatgactagtaggatggagctagttgtattcatctcgtcacaagatcctatgatcttgatggtctgtcttgtttcatggctgttgtaatcaagccataagtttattgatgggtggcggtgaaggcaagcgcattctgtgcagtaccctgattgttttgcatgtcatctccagtgcaatcttccagaatgaacaaaaaactgtgtacctgctgggtgcagtactaaaataattcatttcatccacctaaggagtaaggactacgatgggcgaaagtgctccagagataactatgttgctggactccagacaaattgaggaaccatatcaaagatttgatctgtttgggtgtcacggccccacaaagctttcctctgcaattgatacaaagatagggtagtgtgaaacaaagcctggtggctgtttcttcgtgctgtttgcccgagcgttggcaaagcatttgttcttaatcatggtttattggcacgctcagtgttgcgtccccaggcactctccttacagaagtgcaataatgcggacaaaccactccactggtttttctatgttgattgttgtgtaaacgccgattgatttgtacaagtaaatcaatgtatcatgtctaaataactcatacatagtgttggtttcatgttttagttcccaagttttgcaaatatatgtttacggtattatgtttgtataaacaagttttgtgacgacacttctcgattcttcatgactacttgcattgtaatgcaataaagtcgtcatagtatccaca

SEQ ID NO: 16877 - DNA, 3461 bp, Zea Mays
gcgctcgtaatgcatttagatgtgttatagacctactagacaagtatttagagctagcaaaactaaaatgacaaaggaacaaatgacaaaaaaaaatccgtaaaagaagactgcagggcaggcagccagtgaagaagaagggaggggcgagtcagagagaacaagtacaacaacatcgagaccgagacggaacggagaacggccgcagctcaaacaccaggcaagcccaacccgacagcagtcagcaacctcgcaccaccacctccgtcgcagcatcaggccagcagccgccggcgccgggagccgtcgcgaagcaccccaggccttgccccctcctgcaaacgaagtgttccgtgagagcacgcttcggcgacatagcggccacagctgcagcatcctgtggagaccggcgagaacagcaccaggagctgctcccgatcactcctgcaacacacggcctcgcccgtgcctgcgcgcgcgcagaagtagcaaagtgattttccatgattggcagtgtagtatcggattcagagttcttcgtggtattctactttgcagttcagttgtagatatatggaattcttttcctgagaaatgccgtcctctacaccaccatcagtacaacccactccaagccttcagacattaacatctcctgcagtagcccagaatactcatattgatgttagtgagatcaagtccaagatttttaagaggataggacatgaacgaggaaataaatactttcagcacctggaaaggttcttatcttcaagattgagcaagaatgaattcgagaagctctgtcttgtggcacttggccgtgaaaacctcccattgcacaaccaccttatctgttccattctacataatgccagtcgagcttgtggcccacctgtaattaatgaccctaagctggtcagaggtgccaccacttctggccatgcagttgttcctcctgtctgggacaatggtggtgccttgaacctaaatgccaaagagaaaaaaccattaatcagaagggaaaatgtactaacccaaaagtcatcactgaatcattgtgagactattatgctggagaatggtgttcatcatttgagtgatctgaagagatgtacacaatttcaaaaaaaagaccatgtagagctgctcatcaagcgaccgcgtgtggagaaggaaccagtcagtttacataattctctacacagcaataggttttctaaggcttcaagagaaaacctgggtcaagaaattatacaccaattccaaggtccagttcaagcaccacttggcattcagttacgtcatggcagttttggtgtggcccaaatacctttaccccttgcttctgtgagttcaaaggatacctctgatacttgtattgaagatggtgaactctgtgatacttcgtcagtgaagaaaaggatggacaaagtggcaggagcaaatgggttggaaggggtctcgatagagtgtgctaatttgttgaataatggcattgatgttttcatgaagcagttaattggatcttgcattgaattagttagagcaaggtctcgacatggcaaactaaggcatgagacattgaagcagcagctgtgccgaaagctaataaatggtgtatcagtgcataaccatgttcctgggcagagttctgttatacctccagagacaaattccatctccatgcaggacttaaaggcagtaatagagttaaacccttgtttgcttgggattaatgcatcactgctacacgaaaagatcaattcatatgactagtaggatggagctagttgtattcatctcgtcacaagatcctatgatcttgatggtctgtcttgtttcatggctgttgtaatcaagccataagtttattgatgggtggcggtgaaggcaagcgcattctgtgcagtaccctgattgttttgcatgtcatctccagtgcaatcttccagaatgaacaaaaaactgtgtacctgctgggtgcagtactaaaataattcatttcatccacctaaggagtaaggactacgatgggcgaaagtgctccagagataactatgttgctggactccagacaaattgaggaaccatatcaaagatttgatcttttgaatgaatatattaaaaaaaactcgaccggggagggtaagaccaccctcgcggctttccatggatagaagatcacagcgaacgatcctgaccgagaaacccccgaaccctgccctcccgtcactaacgggtcgactcacaggctttccacactgcaaaggcccacccaggccagagccagccacagccgagtcgctcccctgagagcgggtgaggacagcaagcagatttttttgtgagaaatcggggatcgaatccccgacctggtgaaggggacctcgccgccttcaccacccgggctaagcctggtcctctttgaatgaatagattgtttcttactattatgaatttgtgcttaattggccattattcttcagtagcactgctaatcaatgggatcgtagcagtcagcacctggttcagagagatttatccatgttccctagaaatttcatcctagtgaagttttcaagcggtttagtaaggttaatggatcctgtttttcagaactttacctatcattatcattaataaagaatatggatgaacaacttttgaggattggtagctatagataagggtatcaagtgcagaaagggcaaacttttctgtgggatagaagggatccacttggaaggtgtataatattggactgaatagctaaatgtaaataatgataaactatatatgtctttgtgatgggcttagattggtaggggatgagaagcgtagattgtagtggaaggaggttggagggcaaaggacgacggggacatggcggtggccatggtgcccgtgccgtaggaggctggcagcctgggcagcaggggcagggacagtgtgcggcacaggagggagggggaatctagtatctcagtctgaaccactttgttattccgctatgataaatgacagggcaaacctcgtttaccaatgcaatttaatattttaatctgaacacctttgaggtggaatacacatgttggtagatgcacttttatgcaggcttatgaattagaggcctaatcttgtcatgttatacaattgcattaatatctacacacctattcgtggttcatatatcacccacactgtttctgcaaaacccaccagcaccttgtgagttgaaaactagagataagaacagttctgttagtttggaaggtttctttttctatatgttctatgtattaggcatatgtttcttcagtctaaagatctctgtttcaaaggtgttgcctaggcacttaggcttatgtttcttcagtctagagttctctctcccttaggcacctaggtgtccaggtggctgcagctcaccttcggtgtctagttatgccttgccgcct

SEQ ID NO: 16878 - DNA, 3144 bp, Zea Mays
gaaagccaacactccctctctctctctcttggagttgctgtgaaaatacgacctatcggggacagctcgatctccctcccttggctggagcctggagccgacggagcagaacgacggttccttgcggcggcagcgacctcgagctgagggcggcgagaaggcgggaacaactcgatctccctttgctagctagctagtcccgatggagccgagggttccttgcggcgacggcggccccgaacctagggccgcgagaacgcatcgacgggagggcgagcgaaaccacgtcctcgatgcgcgaatcctggagcctcagcgacagagatcgaatccaatcaggaacatctttcatctattaactcaacgagaggtctcacctcgattgaaacaccatgctaaaagaatgtggaatgagtccccaaaatatgatcctgattcaattgagttaaggtctgcagatgctaaacttgatattttttcatgggcagaatcacagtccctgcatagctggtctgccaagtattgccctcttttgccacctcctaggtcaactattgcagctgctttcagtccagatggaaaaacacttgcgtccacacatggtgaccataccgtgaaaataattgactgccaaacagggaaatgtttgaaggttttgactggacatcgacgcactccttgggtggtcaggtatcatccattacattctgacatcctggctagcggaagtttggatcatgaagttcgtctatgggatgctaatacttcagactgtattgggtcacaagacttccatcggccaattgcttccattgcatttcatggaagtggggagattttggcagttgcatcaggtcacaaattgtacatatggaactacaataagagagatggcacttctgtaccagccatcatactaaaaacccgccgctcgctgagagctgttcattttcatccgcgtggggctccatatcttctaacagcagaggttaataatatagaatctgcagactcaccgctgactctggcaagatcctctggatatctaaattacccatcggccctgctggtgacaaacactaattctagattctgtacacttcctgagtccaatgtggtgtcaccttgcttactgtggcctgcatacctcagagatggtggaattttacatgtgctcggcaatgacagtagttcaaccattgtgcagcagagatcatcattagttcaaccttccacatcagatactgcaaatgtacagcttgaacagtttgctacccctatggatgtatgtccgggagagccaacttcatctaatgacatacccgatgcagtaactgttcctacttcaaatggaaatgaaatgcatggtgctggaggccagtctaactcaagactgcagggcagcagctctactagtaatcttgagaggttcagtgctagagatgatttgcaagtgtcttccctgagcaggactgacccaatcccattaacagcagggccttcaggatccgatttacaccgtgctatgccactaaatatgctcctcactggcggattagatgttcaaatgttcctaagaaatgtaggaagtggacagcaggatcattctctcttcggcgactcacgtaactgggaggtaccatttttgcagggtttcttgatggccccaaaccatgcaggtgcttcatcttcgattccccttaccactggcagttctaggggaccaaatcgacgctatgcttcacgctctgtacctggggttgggaatttgctcctaggtcctcaaattgacgaagctgaagctcatgctgtttcactaggtgctggttctgaaatcactgcgtccatgcttgctcctggtactgaattgccttgtacagtgaagctcagaatatggcggcacggtaccaatgaaccatgtgttcctttagaacctgaggcatgctgtctgacgatttctcatgccgttctctgcagtgaaatgggtgcccatttttccccatgtggacgatttctggtagcatgtgttgcgtgtttgttgccacaaacagaagacgaccgtggtagccaattgcctgtgtcttacgaaggggctggatcatcaccaactcgtcacccgcttccctctcatcgagttatttatgagctccgggtttattcccttgaggctgagacatttggggatattcttgcttccagagcaatacgggcagcacattgcttaacatccattcagttctcacctacatccgaacacatacttttggcatatggtcgtcgtcatagctcgctccttaggagcatagttgtggaaggcgaaaatggggttcccgtatatactattttggaggtatatagagtttcagatatggagcttgtgagagtgcttcctagcgctgaagatgaagttaatgttgcatgctttcatccttcaccaggaggtggccttgtttatggcactaaggaagggaagctcaggatccttcagcacaatggcgcagacatgacaaacatgggggtgggttgcttcattgaggaaaatatggttgagatccagaggtacgcattggaatgctgaagaagcttcaccacaccatgtgtttttaggcttacttccatggaatttttttctgcaggcttcatctgtgtgatccatccaaggggaaacattagatccatctctaactaagtgccttggggattggtctgtgcagaggtggtaggagatgtaaatctacatggccatcgtcgtggctgccataacgatgctgtaattataccgttgtacatgtatttccaattagcttaactcgattgctgttgtatttcagaaagttgacgatgctaatccttttaaagtcaaaagttactttttgttgtatacttcacctttccgtacaagctgtcgatgatgcaagaagttacacaggcgaatggaattgcctgggcttgcttttacacttgtgaaaatcgtgtattttattttcctgctctcgtctgagcgtatcttatgggcatgggcttgcacatctccaatcctgtcccttcaaccatgatcctatggtcattgttaacactttggtcgctgatgaagatgaaaagtagcctctacttattgtttgcttttagtttgttctgagaagt

SEQ ID NO: 16879 - DNA, 3070 bp, Zea Mays
gaaagccaacactccctctctctctctcttggagttgctgtgaaaatacgacctatcggggacagctcgatctccctcccttggctggagcctggagccgacggagcagaacgacggttccttgcggcggcagcgacctcgagctgagggcggcgagaaggcgggaacaactcgatctccctttgctagctagctagtcccgatggagccgagggttccttgcggcgacggcggccccgaacctagggccgcgagaacgcatcgacgggagggcgagcgaaaccacgtcctcgatgcgcgaatcctggagcctcagcgacagagatcgaatccaatcaggaacatctttcatctattaactcaacgagaggtctcacctcgattgaaacaccatgctaaaagaatgtggaatgagtccccaaaatatgatcctgattcaattgagttaaggtctgcagatgctaaacttgatattttttcatgggcagaatcacagtccctgcatagctggtctgccaagtattgccctcttttgccacctcctaggtcaactattgcagctgctttcagtccagatggaaaaacacttgcgtccacacatggtgaccataccgtgaaaataattgactgccaaacagggaaatgtttgaaggttttgactggacatcgacgcactccttgggtggtcaggtatcatccattacattctgacatcctggctagcggaagtttggatcatgaagttcgtctatgggatgctaatacttcagactgtattgggtcacaagacttccatcggccaattgcttccattgcatttcatggaagtggggagattttggcagttgcatcaggtcacaaattgtacatatggaactacaataagagagatggcacttctgtaccagccatcatactaaaaacccgccgctcgctgagagctgttcattttcatccgcgtggggctccatatcttctaacagcagaggttaataatatagaatctgcagactcaccgctgactctggcaagatcctctggatatctaaattacccatcggccctgctggtgacaaacactaattctagattctgtacacttcctgagtccaatgtggtgtcaccttgcttactgtggcctgcatacctcagagatggtggaattttacatgtgctcggcaatgacagtagttcaaccattgtgcagcagagatcatcattagttcaaccttccacatcagatactgcaaatgtacagcttgaacagtttgctacccctatggatgtatgtccgggagagccaacttcatctaatgacatacccgatgcagtaactgttcctacttcaaatggaaatgaaatgcatggtgctggaggccagtctaactcaagactgcagggcagcagctctactagtaatcttgagaggttcagtgctagagatgatttgcaagtgtcttccctgagcaggactgacccaatcccattaacagcagggccttcaggatccgatttacaccgtgctatgccactaaatatgctcctcactggcggattagatgttcaaatgttcctaagaaatgtaggaagtggacagcaggatcattctctcttcggcgactcacgtaactgggaggtaccatttttgcagggtttcttgatggccccaaaccatgcaggtgcttcatcttcgattccccttaccactggcagttctaggggaccaaatcgacgctatgcttcacgctctgtacctggggttgggaatttgctcctaggtcctcaaattgacgaagctgaagctcatgctgtttcactaggtgctggttctgaaatcactgcgtccatgcttgctcctggtactgaattgccttgtacagtgaagctcagaatatggcggcacggtaccaatgaaccatgtgttcctttagaacctgaggcatgctgtctgacgatttctcatgccgttctctgcagtgaaatgggtgcccatttttccccatgtggacgatttctggtagcatgtgttgcgtgtttgttgccacaaacagaagacgaccgtggtagccaattgcctgtgtcttacgaaggggctggatcatcaccaactcgtcacccgcttccctctcatcgagttatttatgagctccgggtttattcccttgaggctgagacatttggggatattcttgcttccagagcaatacgggcagcacattgcttaacatccattcagttctcacctacatccgaacacatacttttggcatatggtcgtcgtcatagctcgctccttaggagcatagttgtggaaggcgaaaatggggttcccgtatatactattttggaggtatatagagtttcagatatggagcttgtgagagtgcttcctagcgctgaagatgaagttaatgttgcatgctttcatccttcaccaggaggtggccttgtttatggcactaaggaagggaagctcaggatccttcagcacaatggcgcagacatgacaaacatgggggtgggttgcttcattgaggaaaatatggttgagatccagaggtacgcattggaatgctgaagaagcttcaccacaccatgtgtttttaggcttacttccatggaatttttttctgcaggcttcatctgtgtgatccatccaaggggaaacattagatccatctctaactaagtgccttggggattggtctgtgcagaggtggtaggagatgtaaatctacatggccatcgtcgtggctgccataacgatgctgtaattataccgttgtacatgtatttccaattagcttaactcgattgctgttgtatttcagaaagttgacgatgctaatccttttaaagtcaaaagttactttttgttgtatacttcacctttccgtacaagctgtcgatgatgcaagaagttacacaggcgaatggaattgcctgggcttgcttttacacttgtgaaaatcgtgtattttattttcctgctctcgtctgagcatacggataccatgagaagtctacaagggctagaatgccgtgctattgtcatcaaagcttgttttat

SEQ ID NO: 16880 - DNA, 2841 bp, Zea Mays
ctccctctctctctctcttggagttgctgtgaaaatacgacctatcggggacagctcgatctccctcccttggctggagcctggagccgacggagcagaacgacggttccttgcggcggcagcgacctcgagctgagggcggcgagaaggcgggaacaactcgatctccctttgctagctagctagtcccgatggagccgagggttccttgcggcgacggcggccccgaacctagggccgcgagaacgcatcgacgggagggcgagcgaaaccacgtcctcgatgcgcgaatcctggagcctcagcgacagagatcgaatccaatcaggtcaggtatcatccattacattctgacatcctggctagcggaagtttggatcatgaagttcgtctatgggatgctaatacttcagactgtattgggtcacaagacttccatcggccaattgcttccattgcatttcatggaagtggggagattttggcagttgcatcaggtcacaaattgtacatatggaactacaataagagagatggcacttctgtaccagccatcatactaaaaacccgccgctcgctgagagctgttcattttcatccgcgtggggctccatatcttctaacagcagaggttaataatatagaatctgcagactcaccgctgactctggcaagatcctctggatatctaaattacccatcggccctgctggtgacaaacactaattctagattctgtacacttcctgagtccaatgtggtgtcaccttgcttactgtggcctgcatacctcagagatggtggaattttacatgtgctcggcaatgacagtagttcaaccattgtgcagcagagatcatcattagttcaaccttccacatcagatactgcaaatgtacagcttgaacagtttgctacccctatggatgtatgtccgggagagccaacttcatctaatgacatacccgatgcagtaactgttcctacttcaaatggaaatgaaatgcatggtgctggaggccagtctaactcaagactgcagggcagcagctctactagtaatcttgagaggttcagtgctagagatgatttgcaagtgtcttccctgagcaggactgacccaatcccattaacagcagggccttcaggatccgatttacaccgtgctatgccactaaatatgctcctcactggcggattagatgttcaaatgttcctaagaaatgtaggaagtggacagcaggatcattctctcttcggcgactcacgtaactgggaggtaccatttttgcagggtttcttgatggccccaaaccatgcaggtttgcaccctgcacttgtgaacaatagtgtccttgaagacatgtctattgctggtactgcagggactaataacttgaaatcaccacacatgcgcaactttggatgtccaggtgcttcatcttcgattccccttaccactggcagttctaggggaccaaatcgacgctatgcttcacgctctgtacctggggttgggaatttgctcctaggtcctcaaattgacgaagctgaagctcatgctgtttcactaggtgctggttctgaaatcactgcgtccatgcttgctcctggtactgaattgccttgtacagtgaagctcagaatatggcggcacggtaccaatgaaccatgtgttcctttagaacctgaggcatgctgtctgacgatttctcatgccgttctctgcagtgaaatgggtgcccatttttccccatgtggacgatttctggtagcatgtgttgcgtgtttgttgccacaaacagaagacgaccgtggtagccaattgcctgtgtcttacgaaggggctggatcatcaccaactcgtcacccgcttccctctcatcgagttatttatgagctccgggtttattcccttgaggctgagacatttggggatattcttgcttccagagcaatacgggcagcacattgcttaacatccattcagttctcacctacatccgaacacatacttttggcatatggtcgtcgtcatagctcgctccttaggagcatagttgtggaaggcgaaaatggggttcccgtatatactattttggaggtatatagagtttcagatatggagcttgtgagagtgcttcctagcgctgaagatgaagttaatgttgcatgctttcatccttcaccaggaggtggccttgtttatggcactaaggaagggaagctcaggatccttcagcacaatggcgcagacatgacaaacatgggggtgggttgcttcattgaggaaaatatggttgagatccagaggtacgcattggaatgctgaagaagcttcaccacaccatgtgtttttaggcttacttccatggaatttttttctgcaggcttcatctgtgtgatccatccaaggggaaacattagatccatctctaactaagtgccttggggattggtctgtgcagaggtggtaggagatgtaaatctacatggccatcgtcgtggctgccataacgatgctgtaattataccgttgtacatgtatttccaattagcttaactcgattgctgttgtatttcagaaagttgacgatgctaatccttttaaagtcaaaagttactttttgttgtatacttcacctttccgtacaagctgtcgatgatgcaagaagttacacaggcgaatggaattgcctgggcttgcttttacacttgtgaaaatcgtgtattttattttcctgctctcgtctgaggttagtgtaataattcaacgtttggagtttcttgttttaactgtattttacatgaaataccacctcaaaatcctgttgtggaatc

SEQ ID NO: 16881 - DNA, 3191 bp, Zea Mays
ctccctctctctctctcttggagttgctgtgaaaatacgacctatcggggacagctcgatctccctcccttggctggagcctggagccgacggagcagaacgacggttccttgcggcggcagcgacctcgagctgagggcggcgagaaggcgggaacaactcgatctccctttgctagctagctagtcccgatggagccgagggttccttgcggcgacggcggccccgaacctagggccgcgagaacgcatcgacgggagggcgagcgaaaccacgtcctcgatgcgcgaatcctggagcctcagcgacagagatcgaatccaatcaggaacatctttcatctattaactcaacgagaggtctcacctcgattgaaacaccatgctaaaagaatgtggaatgagtccccaaaatatgatcctgattcaattgagttaaggtctgcagatgctaaacttgatattttttcatgggcagaatcacagtccctgcatagctggtctgccaagtattgccctcttttgccacctcctaggtcaactattgcagctgctttcagtccagatggaaaaacacttgcgtccacacatggtgaccataccgtgaaaataattgactgccaaacagggaaatgtttgaaggttttgactggacatcgacgcactccttgggtggtcaggtatcatccattacattctgacatcctggctagcggaagtttggatcatgaagttcgtctatgggatgctaatacttcagactgtattgggtcacaagacttccatcggccaattgcttccattgcatttcatggaagtggggagattttggcagttgcatcaggtcacaaattgtacatatggaactacaataagagagatggcacttctgtaccagccatcatactaaaaacccgccgctcgctgagagctgttcattttcatccgcgtggggctccatatcttctaacagcagaggttaataatatagaatctgcagactcaccgctgactctggcaagatcctctggatatctaaattacccatcggccctgctggtgacaaacactaattctagattctgtacacttcctgagtccaatgtggtgtcaccttgcttactgtggcctgcatacctcagagatggtggaattttacatgtgctcggcaatgacagtagttcaaccattgtgcagcagagatcatcattagttcaaccttccacatcagatactgcaaatgtacagcttgaacagtttgctacccctatggatgtatgtccgggagagccaacttcatctaatgacatacccgatgcagtaactgttcctacttcaaatggaaatgaaatgcatggtgctggaggccagtctaactcaagactgcagggcagcagctctactagtaatcttgagaggttcagtgctagagatgatttgcaagtgtcttccctgagcaggactgacccaatcccattaacagcagggccttcaggatccgatttacaccgtgctatgccactaaatatgctcctcactggcggattagatgttcaaatgttcctaagaaatgtaggaagtggacagcaggatcattctctcttcggcgactcacgtaactgggaggtaccatttttgcagggtttcttgatggccccaaaccatgcaggtttgcaccctgcacttgtgaacaatagtgtccttgaagacatgtctattgctggtactgcagggactaataacttgaaatcaccacacatgcgcaactttggatgtccaggtgcttcatcttcgattccccttaccactggcagttctaggggaccaaatcgacgctatgcttcacgctctgtacctggggttgggaatttgctcctaggtcctcaaattgacgaagctgaagctcatgctgtttcactaggtgctggttctgaaatcactgcgtccatgcttgctcctggtactgaattgccttgtacagtgaagctcagaatatggcggcacggtaccaatgaaccatgtgttcctttagaacctgaggcatgctgtctgacgatttctcatgccgttctctgcagtgaaatgggtgcccatttttccccatgtggacgatttctggtagcatgtgttgcgtgtttgttgccacaaacagaagacgaccgtggtagccaattgcctgtgtcttacgaaggggctggatcatcaccaactcgtcacccgcttccctctcatcgagttatttatgagctccgggtttattcccttgaggctgagacatttggggatattcttgcttccagagcaatacgggcagcacattgcttaacatccattcagttctcacctacatccgaacacatacttttggcatatggtcgtcgtcatagctcgctccttaggagcatagttgtggaaggcgaaaatggggttcccgtatatactattttggaggtatatagagtttcagatatggagcttgtgagagtgcttcctagcgctgaagatgaagttaatgttgcatgctttcatccttcaccaggaggtggccttgtttatggcactaaggaagggaagctcaggatccttcagcacaatggcgcagacatgacaaacatgggggtgggttgcttcattgaggaaaatatggttgagatccagaggtacgcattggaatgctgaagaagcttcaccacaccatgtgtttttaggcttacttccatggaatttttttctgcaggcttcatctgtgtgatccatccaaggggaaacattagatccatctctaactaagtgccttggggattggtatgtctgtgcagaggtggtaggagatgtaaatctacatggccatcgtcgtggctgccataacgatgctgtaattataccgttgtacatgtatttccaattagcttaactcgattgctgttgtatttcagaaagttgacgatgctaatccttttaaagtcaaaagttactttttgttgtatacttcacctttccgtacaagctgtcgatgatgcaagaagttacacaggcgaatggaattgcctgggcttgcttttacacttgtgaaaatcgtgtattttattttcctgctctcgtctgaggttagtgtaataattcaacgtttggagtttcttgttttaactgtattttacatgaaataccacctcaaaatcctgttgtggaatc

SEQ ID NO: 16882 - DNA, 2992 bp, Zea Mays
ctccctctctctctctcttggagttgctgtgaaaatacgacctatcggggacagctcgatctccctcccttggctggagcctggagccgacggagcagaacgacggttccttgcggcggcagcgacctcgagctgagggcggcgagaaggcgggaacaactcgatctccctttgctagctagctagtcccgatggagccgagggttccttgcggcgacggcggccccgaacctagggccgcgagaacgcatcgacgggagggcgagcgaaaccacgtcctcgatgcgcgaatcctggagcctcagcgacagagatcgaatccaatcaggaacatctttcatctattaactcaacgagaggtctcacctcgattgaaacaccatgctaaaagaatgtggaatgagtccccaaaatatgatcctgattcaattgagttaaggtctgcagatgctaaacttgatattttttcatgggcagaatcacagtccctgcatagctggtctgccaagtattgccctcttttgccacctcctaggtcaactattgcagctgctttcagtccagatggaaaaacacttgcgtccacacatggtgaccataccgtgaaaataattgactgccaaacagggaaatgtttgaaggttttgactggacatcgacgcactccttgggtggtcaggtatcatccattacattctgacatcctggctagcggaagtttggatcatgaagttcgtctatgggatgctaatacttcagactgtattgggtcacaagacttccatcggccaattgcttccattgcatttcatggaagtggggagattttggcagttgcatcaggtcacaaattgtacatatggaactacaataagagagatggcacttctgtaccagccatcatactaaaaacccgccgctcgctgagagctgttcattttcatccgcgtggggctccatatcttctaacagcagaggttaataatatagaatctgcagactcaccgctgactctggcaagatcctctggatatctaaattacccatcggccctgctggtgacaaacactaattctagattctgtacacttcctgagtccaatgtggtgtcaccttgcttactgtggcctgcatacctcagagatggtggaattttacatgtgctcggcaatgacagtagttcaaccattgtgcagcagagatcatcattagttcaaccttccacatcagatactgcaaatgtacagcttgaacagtttgctacccctatggatgtatgtccgggagagccaacttcatctaatgacatacccgatgcagtaactgttcctacttcaaatggaaatgaaatgcatggtgctggaggccagtctaactcaagactgcagggcagcagctctactagtaatcttgagaggttcagtgctagagatgatttgcaagtgtcttccctgagcaggactgacccaatcccattaacagcagggccttcaggatccgatttacaccgtgctatgccactaaatatgctcctcactggcggattagatgttcaaatgttcctaagaaatgtaggaagtggacagcaggatcattctctcttcggcgactcacgtaactgggaggtaccatttttgcagggtttcttgatggccccaaaccatgcaggtgcttcatcttcgattccccttaccactggcagttctaggggaccaaatcgacgctatgcttcacgctctgtacctggggttgggaatttgctcctaggtcctcaaattgacgaagctgaagctcatgctgtttcactaggtgctggttctgaaatcactgcgtccatgcttgctcctggtactgaattgccttgtacagtgaagctcagaatatggcggcacggtaccaatgaaccatgtgttcctttagaacctgaggcatgctgtctgacgatttctcatgccgttctctgcagtgaaatgggtgcccatttttccccatgtggacgatttctggtagcatgtgttgcgtgtttgttgccacaaacagaagacgaccgtggtagccaattgcctgtgtcttacgaaggggctggatcatcaccaactcgtcacccgcttccctctcatcgagttatttatgagctccgggtttattcccttgaggctgagacatttggggatattcttgcttccagagcaatacgggcagcacattgcttaacatccattcagttctcacctacatccgaacacatacttttggcatatggtcgtcgtcatagctcgctccttaggagcatagttgtggaaggcgaaaatggggttcccgtatatactattttggaggtatatagagtttcagatatggagcttgtgagagtgcttcctagcgctgaagatgaagttaatgttgcatgctttcatccttcaccaggaggtggccttgtttatggcactaaggaagggaagctcaggatccttcagcacaatggcgcagacatgacaaacatgggggtgggttgcttcattgaggaaaatatggttgagatccagaggtacgcattggaatgctgaagaagcttcaccacaccatgtgtttttaggcttacttccatggtctgtgcagaggtggtaggagatgtaaatctacatggccatcgtcgtggctgccataacgatgctgtaattataccgttgtacatgtatttccaattagcttaactcgattgctgttgtatttcagaaagttgacgatgctaatccttttaaagtcaaaagttactttttgttgtatacttcacctttccgtacaagctgtcgatgatgcaagaagttacacaggcgaatggaattgcctgggcttgcttttacacttgtgaaaatcgtgtattttattttcctgctctcgtctgaggttagtgtaataattcaacgtttggagtttcttgttttaactgtattttacatgaaataccacctcaaaatcctgttgtggaatc

SEQ ID NO: 16883 - DNA, 2737 bp, Zea Mays
ctccctctctctctctcttggagttgctgtgaaaatacgacctatcggggacagctcgatctccctcccttggctggagcctggagccgacggagcagaacgacggttccttgcggcggcagcgacctcgagctgagggcggcgagaaggcgggaacaactcgatctccctttgctagctagctagtcccgatggagccgagggttccttgcggcgacggcggccccgaacctagggccgcgagaacgcatcgacgggagggcgagcgaaaccacgtcctcgatgcgcgaatcctggagcctcagcgacagagatcgaatccaatcaggaacatctttcatctattaactcaacgagaggtctcacctcgattgaaacaccatgctaaaagaatgtggaatgagtccccaaaatatgatcctgattcaattgagttaaggtctgcagatgctaaacttgatattttttcatgggcagaatcacagtccctgcatagctggtctgccaagtattgccctcttttgccacctcctaggtcaactattgcagctgctttcagtccagatggaaaaacacttgcgtccacacatggtgaccataccgtgaaaataattgactgccaaacagggaaatgtttgaaggttttgactggacatcgacgcactccttgggtggtcaggtatcatccattacattctgacatcctggctagcggaagtttggatcatgaagttcgtctatgggatgctaatacttcagactgtattgggtcacaagacttccatcggccaattgcttccattgcatttcatggaagtggggagattttggcagttgcatcaggtcacaaattgtacatatggaactacaataagagagatggcacttctgtaccagccatcatactaaaaacccgccgctcgctgagagctgttcattttcatccgcgtggggctccatatcttctaacagcagaggttaataatatagaatctgcagactcaccgctgactctggcaagatcctctggatatctaaattacccatcggccctgctgcagagatcatcattagttcaaccttccacatcagatactgcaaatgtacagcttgaacagtttgctacccctatggatgtatgtccgggagagccaacttcatctaatgacatacccgatgcagtaactgttcctacttcaaatggaaatgaaatgcatggtgctggaggccagtctaactcaagactgcagggcagcagctctactagtaatcttgagaggttcagtgctagagatgatttgcaagtgtcttccctgagcaggactgacccaatcccattaacagcagggccttcaggatccgatttacaccgtgctatgccactaaatatgctcctcactggcggattagatgttcaaatgttcctaagaaatgtaggaagtggacagcaggatcattctctcttcggcgactcacgtaactgggaggtaccatttttgcagggtttcttgatggccccaaaccatgcaggtgcttcatcttcgattccccttaccactggcagttctaggggaccaaatcgacgctatgcttcacgctctgtacctggggttgggaatttgctcctaggtcctcaaattgacgaagctgaagctcatgctgtttcactaggtgctggttctgaaatcactgcgtccatgcttgctcctggtactgaattgccttgtacagtgaagctcagaatatggcggcacggtaccaatgaaccatgtgttcctttagaacctgaggcatgctgtctgacgatttctcatgccgttctctgcagtgaaatgggtgcccatttttccccatgtggacgatttctggtagcatgtgttgcgtgtttgttgccacaaacagaagacgaccgtggtagccaattgcctgtgtcttacgaaggggctggatcatcaccaactcgtcacccgcttccctctcatcgagttatttatgagctccgggtttattcccttgaggctgagacatttggggatattcttgcttccagagcaatacgggcagcacattgcttaacatccattcagttctcacctacatccgaacacatacttttggcatatggtcgtcgtcatagctcgctccttaggagcatagttgtggaaggcgaaaatggggttcccgtatatactattttggagatccagaggtacgcattggaatgctgaagaagcttcaccacaccatgtgtttttaggcttacttccatggaatttttttctgcaggcttcatctgtgtgatccatccaaggggaaacattagatccatctctaactaagtgccttggggattggtctgtgcagaggtggtaggagatgtaaatctacatggccatcgtcgtggctgccataacgatgctgtaattataccgttgtacatgtatttccaattagcttaactcgattgctgttgtatttcagaaagttgacgatgctaatccttttaaagtcaaaagttactttttgttgtatacttcacctttccgtacaagctgtcgatgatgcaagaagttacacaggcgaatggaattgcctgggcttgcttttacacttgtgaaaatcgtgtattttattttcctgctctcgtctgaggttagtgtaataattcaacgtttggagtttcttgttttaactgtattttacatgaaataccacctcaaaatcctgttgtggaatc

SEQ ID NO: 16884 - DNA, 3182 bp, Zea Mays
ctccctctctctctctcttggagttgctgtgaaaatacgacctatcggggacagctcgatctccctcccttggctggagcctggagccgacggagcagaacgacggttccttgcggcggcagcgacctcgagctgagggcggcgagaaggcgggaacaactcgatctccctttgctagctagctagtcccgatggagccgagggttccttgcggcgacggcggccccgaacctagggccgcgagaacgcatcgacgggagggcgagcgaaaccacgtcctcgatgcgcgaatcctggagcctcagcgacagagatcgaatccaatcaggaacatctttcatctattaactcaacgagaggtctcacctcgattgaaacaccatgctaaaagaatgtggaatgagtccccaaaatatgatcctgattcaattgagttaaggtctgcagatgctaaacttgatattttttcatgaatcacagtccctgcatagctggtctgccaagtattgccctcttttgccacctcctaggtcaactattgcagctgctttcagtccagatggaaaaacacttgcgtccacacatggtgaccataccgtgaaaataattgactgccaaacagggaaatgtttgaaggttttgactggacatcgacgcactccttgggtggtcaggtatcatccattacattctgacatcctggctagcggaagtttggatcatgaagttcgtctatgggatgctaatacttcagactgtattgggtcacaagacttccatcggccaattgcttccattgcatttcatggaagtggggagattttggcagttgcatcaggtcacaaattgtacatatggaactacaataagagagatggcacttctgtaccagccatcatactaaaaacccgccgctcgctgagagctgttcattttcatccgcgtggggctccatatcttctaacagcagaggttaataatatagaatctgcagactcaccgctgactctggcaagatcctctggatatctaaattacccatcggccctgctggtgacaaacactaattctagattctgtacacttcctgagtccaatgtggtgtcaccttgcttactgtggcctgcatacctcagagatggtggaattttacatgtgctcggcaatgacagtagttcaaccattgtgcagcagagatcatcattagttcaaccttccacatcagatactgcaaatgtacagcttgaacagtttgctacccctatggatgtatgtccgggagagccaacttcatctaatgacatacccgatgcagtaactgttcctacttcaaatggaaatgaaatgcatggtgctggaggccagtctaactcaagactgcagggcagcagctctactagtaatcttgagaggttcagtgctagagatgatttgcaagtgtcttccctgagcaggactgacccaatcccattaacagcagggccttcaggatccgatttacaccgtgctatgccactaaatatgctcctcactggcggattagatgttcaaatgttcctaagaaatgtaggaagtggacagcaggatcattctctcttcggcgactcacgtaactgggaggtaccatttttgcagggtttcttgatggccccaaaccatgcaggtttgcaccctgcacttgtgaacaatagtgtccttgaagacatgtctattgctggtactgcagggactaataacttgaaatcaccacacatgcgcaactttggatgtccaggtgcttcatcttcgattccccttaccactggcagttctaggggaccaaatcgacgctatgcttcacgctctgtacctggggttgggaatttgctcctaggtcctcaaattgacgaagctgaagctcatgctgtttcactaggtgctggttctgaaatcactgcgtccatgcttgctcctggtactgaattgccttgtacagtgaagctcagaatatggcggcacggtaccaatgaaccatgtgttcctttagaacctgaggcatgctgtctgacgatttctcatgccgttctctgcagtgaaatgggtgcccatttttccccatgtggacgatttctggtagcatgtgttgcgtgtttgttgccacaaacagaagacgaccgtggtagccaattgcctgtgtcttacgaaggggctggatcatcaccaactcgtcacccgcttccctctcatcgagttatttatgagctccgggtttattcccttgaggctgagacatttggggatattcttgcttccagagcaatacgggcagcacattgcttaacatccattcagttctcacctacatccgaacacatacttttggcatatggtcgtcgtcatagctcgctccttaggagcatagttgtggaaggcgaaaatggggttcccgtatatactattttggaggtatatagagtttcagatatggagcttgtgagagtgcttcctagcgctgaagatgaagttaatgttgcatgctttcatccttcaccaggaggtggccttgtttatggcactaaggaagggaagctcaggatccttcagcacaatggcgcagacatgacaaacatgggggtgggttgcttcattgaggaaaatatggttgagatccagaggtacgcattggaatgctgaagaagcttcaccacaccatgtgtttttaggcttacttccatggaatttttttctgcaggcttcatctgtgtgatccatccaaggggaaacattagatccatctctaactaagtgccttggggattggtctgtgcagaggtggtaggagatgtaaatctacatggccatcgtcgtggctgccataacgatgctgtaattataccgttgtacatgtatttccaattagcttaactcgattgctgttgtatttcagaaagttgacgatgctaatccttttaaagtcaaaagttactttttgttgtatacttcacctttccgtacaagctgtcgatgatgcaagaagttacacaggcgaatggaattgcctgggcttgcttttacacttgtgaaaatcgtgtattttattttcctgctctcgtctgaggttagtgtaataattcaacgtttggagtttcttgttttaactgtattttacatgaaataccacctcaaaatcctgttgtggaatc

SEQ ID NO: 16885 - DNA, 3069 bp, Zea Mays
ctccctctctctctctcttggagttgctgtgaaaatacgacctatcggggacagctcgatctccctcccttggctggagcctggagccgacggagcagaacgacggttccttgcggcggcagcgacctcgagctgagggcggcgagaaggcgggaacaactcgatctccctttgctagctagctagtcccgatggagccgagggttccttgcggcgacggcggccccgaacctagggccgcgagaacgcatcgacgggagggcgagcgaaaccacgtcctcgatgcgcgaatcctggagcctcagcgacagagatcgaatccaatcaggaacatctttcatctattaactcaacgagaggtctcacctcgattgaaacaccatgctaaaagaatgtggaatgagtccccaaaatatgatcctgattcaattgagttaaggtctgcagatgctaaacttgatattttttcatgggcagaatcacagtccctgcatagctggtctgccaagtattgccctcttttgccacctcctaggtcaactattgcagctgctttcagtccagatggaaaaacacttgcgtccacacatggtgaccataccgtgaaaataattgactgccaaacagggaaatgtttgaaggttttgactggacatcgacgcactccttgggtggtcaggtatcatccattacattctgacatcctggctagcggaagtttggatcatgaagttcgtctatgggatgctaatacttcagactgtattgggtcacaagacttccatcggccaattgcttccattgcatttcatggaagtggggagattttggcagttgcatcaggtcacaaattgtacatatggaactacaataagagagatggcacttctgtaccagccatcatactaaaaacccgccgctcgctgagagctgttcattttcatccgcgtggggctccatatcttctaacagcagaggttaataatatagaatctgcagactcaccgctgactctggcaagatcctctggatatctaaattacccatcggccctgctggtgacaaacactaattctagattctgtacacttcctgagtccaatgtggtgtcaccttgcttactgtggcctgcatacctcagagatggtggaattttacatgtgctcggcaatgacagtagttcaaccattgtgcagcagagatcatcattagttcaaccttccacatcagatactgcaaatgtacagcttgaacagtttgctacccctatggatgtatgtccgggagagccaacttcatctaatgacatacccgatgcagtaactgttcctacttcaaatggaaatgaaatgcatggtgctggaggccagtctaactcaagactgcagggcagcagctctactagtaatcttgagaggttcagtgctagagatgatttgcaagtgtcttccctgagcaggactgacccaatcccattaacagcagggccttcaggatccgatttacaccgtgctatgccactaaatatgctcctcactggcggattagatgttcaaatgttcctaagaaatgtaggaagtggacagcaggatcattctctcttcggcgactcacgtaactgggaggtaccatttttgcagggtttcttgatggccccaaaccatgcaggtttgcaccctgcacttgtgaacaatagtgtccttgaagacatgtctattgctggtactgcagggactaataacttgaaatcaccacacatgcgcaactttggatgtccaggtgcttcatcttcgattccccttaccactggcagttctaggggaccaaatcgacgctatgcttcacgctctgtacctggggttgggaatttgctcctaggtcctcaaattgacgaagctgaagctcatgctgtttcactaggtgctggttctgaaatcactgcgtccatgcttgctcctgtgaaatgggtgcccatttttccccatgtggacgatttctggtagcatgtgttgcgtgtttgttgccacaaacagaagacgaccgtggtagccaattgcctgtgtcttacgaaggggctggatcatcaccaactcgtcacccgcttccctctcatcgagttatttatgagctccgggtttattcccttgaggctgagacatttggggatattcttgcttccagagcaatacgggcagcacattgcttaacatccattcagttctcacctacatccgaacacatacttttggcatatggtcgtcgtcatagctcgctccttaggagcatagttgtggaaggcgaaaatggggttcccgtatatactattttggaggtatatagagtttcagatatggagcttgtgagagtgcttcctagcgctgaagatgaagttaatgttgcatgctttcatccttcaccaggaggtggccttgtttatggcactaaggaagggaagctcaggatccttcagcacaatggcgcagacatgacaaacatgggggtgggttgcttcattgaggaaaatatggttgagatccagaggtacgcattggaatgctgaagaagcttcaccacaccatgtgtttttaggcttacttccatggaatttttttctgcaggcttcatctgtgtgatccatccaaggggaaacattagatccatctctaactaagtgccttggggattggtctgtgcagaggtggtaggagatgtaaatctacatggccatcgtcgtggctgccataacgatgctgtaattataccgttgtacatgtatttccaattagcttaactcgattgctgttgtatttcagaaagttgacgatgctaatccttttaaagtcaaaagttactttttgttgtatacttcacctttccgtacaagctgtcgatgatgcaagaagttacacaggcgaatggaattgcctgggcttgcttttacacttgtgaaaatcgtgtattttattttcctgctctcgtctgaggttagtgtaataattcaacgtttggagtttcttgttttaactgtattttacatgaaataccacctcaaaatcctgttgtggaatc

SEQ ID NO: 16886 - DNA, 3171 bp, Zea Mays
ctccctctctctctctcttggagttgctgtgaaaatacgacctatcggggacagctcgatctccctcccttggctggagcctggagccgacggagcagaacgacggttccttgcggcggcagcgacctcgagctgagggcggcgagaaggcgggaacaactcgatctccctttgctagctagctagtcccgatggagccgagggttccttgcggcgacggcggccccgaacctagggccgcgagaacgcatcgacgggagggcgagcgaaaccacgtcctcgatgcgcgaatcctggagcctcagcgacagagatcgaatccaatcaggaacatctttcatctattaactcaacgagaggtctcacctcgattgaaacaccatgctaaaagaatgtggaatgagtccccaaaatatgatcctgattcaattgagttaaggtctgcagatgctaaacttgatattttttcatgggcagaatcacagtccctgcatagctggtctgccaagtattgccctcttttgccacctcctaggtcaactattgcagctgctttcagtccagatggaaaaacacttgcgtccacacatggtgaccataccgtgaaaataattgactgccaaacagggaaatgtttgaaggttttgactggacatcgacgcactccttgggtggtcaggtatcatccattacattctgacatcctggctagcggaagtttggatcatgaagttcgtctatgggatgctaatacttcagactgtattgggtcacaagacttccatcggccaattgcttccattgcatttcatggaagtggggagattttggcagttgcatcaggtcacaaattgtacatatggaactacaataagagagatggcacttctgtaccagccatcatactaaaaacccgccgctcgctgagagctgttcattttcatccgcgtggggctccatatcttctaacagcagaggttaataatatagaatctgcagactcaccgctgactctggcaagatcctctggatatctaaattacccatcggccctgctggtgacaaacactaattctagattctgtacacttcctgagtccaatgtggtgtcaccttgcttactgtggcctgcatacctcagagatggtggaattttacatgtgctcggcaatgacagtagttcaaccattgtgcagcagagatcatcattagttcaaccttccacatcagatactgcaaatgtacagcttgaacagtttgctacccctatggatgtatgtccgggagagccaacttcatctaatgacatacccgatgcagtaactgttcctacttcaaatggaaatgaaatgcatggtgctggaggccagtctaactcaagactgcagggcagcagctctactagtaatcttgagaggttcagtgctagagatgatttgcaagtgtcttccctgagcaggactgacccaatcccattaacagcagggccttcaggatccgatttacaccgtgctatgccactaaatatgctcctcactggcggattagatgttcaaatgttcctaagaaatgtaggaagtggacagcaggatcattctctcttcggcgactcacgtaactgggaggtaccatttttgcagggtttcttgatggccccaaaccatgcaggtttgcaccctgcacttgtgaacaatagtgtccttgaagacatgtctattgctggtactgcagggactaataacttgaaatcaccacacatgcgcaactttggatgtccaggtgcttcatcttcgattccccttaccactggcagttctaggggaccaaatcgacgctatgcttcacgctctgtacctggggttgggaatttgctcctaggtcctcaaattgacgaagctgaagctcatgctgtttcactaggtgctggttctgaaatcactgcgtccatgcttgctcctggtactgaattgccttgtacagtgaagctcagaatatggcggcacggtaccaatgaaccatgtgttcctttagaacctgaggcatgctgtctgacgatttctcatgccgttctctgcagtgaaatgggtgcccatttttccccatgtggacgatttctggtagcatgtgttgcgtgtttgttgccacaaacagaagacgaccgtggtagccaattgcctgtgtcttacgaaggggctggatcatcaccaactcgtcacccgcttccctctcatcgagttatttatgagctccgggtttattcccttgaggctgagacatttggggatattcttgcttccagagcaatacgggcagcacattgcttaacatccattcagttctcacctacatccgaacacatacttttggcatatggtcgtcgtcatagctcgctccttaggagcatagttgtggaaggcgaaaatggggttcccgtatatactattttggaggtatatagagtttcagatatggagcttgtgagagtgcttcctagcgctgaagatgaagttaatgttgcatgctttcatccttcaccaggaggtggccttgtttatggcactaaggaagggaagctcaggatccttcagcacaatggcgcagacatgacaaacatgggggtgggttgcttcattgaggaaaatatggttgagatccagaggtacgcattggaatgctgaagaagcttcaccacaccatgtgtttttaggcttacttccatggcttcatctgtgtgatccatccaaggggaaacattagatccatctctaactaagtgccttggggattggtctgtgcagaggtggtaggagatgtaaatctacatggccatcgtcgtggctgccataacgatgctgtaattataccgttgtacatgtatttccaattagcttaactcgattgctgttgtatttcagaaagttgacgatgctaatccttttaaagtcaaaagttactttttgttgtatacttcacctttccgtacaagctgtcgatgatgcaagaagttacacaggcgaatggaattgcctgggcttgcttttacacttgtgaaaatcgtgtattttattttcctgctctcgtctgaggttagtgtaataattcaacgtttggagtttcttgttttaactgtattttacatgaaataccacctcaaaatcctgttgtggaatc

SEQ ID NO: 16887 - DNA, 3141 bp, Zea Mays
ctccctctctctctctcttggagttgctgtgaaaatacgacctatcggggacagctcgatctccctcccttggctggagcctggagccgacggagcagaacgacggttccttgcggcggcagcgacctcgagctgagggcggcgagaaggcgggaacaactcgatctccctttgctagctagctagtcccgatggagccgagggttccttgcggcgacggcggccccgaacctagggccgcgagaacgcatcgacgggagggcgagcgaaaccacgtcctcgatgcgcgaatcctggagcctcagcgacagagatcgaatccaatcaggaacatctttcatctattaactcaacgagaggtctcacctcgattgaaacaccatgctaaaagaatgtggaatgagtccccaaaatatgatcctgattcaattgagttaaggtctgcagatgctaaacttgatattttttcatgggcagaatcacagtccctgcatagctggtctgccaagtattgccctcttttgccacctcctaggtcaactattgcagctgctttcagtccagatggaaaaacacttgcgtccacacatggtgaccataccgtgaaaataattgactgccaaacagggaaatgtttgaaggttttgactggacatcgacgcactccttgggtggtcaggtatcatccattacattctgacatcctggctagcggaagtttggatcatgaagttcgtctatgggatgctaatacttcagactgtattgggtcacaagacttccatcggccaattgcttccattgcatttcatggaagtggggagattttggcagttgcatcaggtcacaaattgtacatatggaactacaataagagagatggcacttctgtaccagccatcatactaaaaacccgccgctcgctgagagctgttcattttcatccgcgtggggctccatatcttctaacagcagaggttaataatatagaatctgcagactcaccgctgactctggcaagatcctctggatatctaaattacccatcggccctgctggtgacaaacactaattctagattctgtacacttcctgagtccaatgtggtgtcaccttgcttactgtggcctgcatacctcagagatggtggaattttacatgtgctcggcaatgacagtagttcaaccattgtgcagcagagatcatcattagttcaaccttccacatcagatactgcaaatgtacagcttgaacagtttgctacccctatggatgtatgtccgggagagccaacttcatctaatgacatacccgatgcagtaactgttcctacttcaaatggaaatgaaatgcatggtgctggaggccagtctaactcaagactgcagggcagcagctctactagtaatcttgagaggttcagtgctagagatgatttgcaagtgtcttccctgagcaggactgacccaatcccattaacagcagggccttcaggatccgatttacaccgtgctatgccactaaatatgctcctcactggcggattagatgttcaaatgttcctaagaaatgtaggaagtggacagcaggatcattctctcttcggcgactcacgtaactgggaggtaccatttttgcagggtttcttgatggccccaaaccatgcaggtttgcaccctgcacttgtgaacaatagtgtccttgaagacatgtctattgctggtactgcagggactaataacttgaaatcaccacacatgcgcaactttggatgtccaggtgcttcatcttcgattccccttaccactggcagttctaggggaccaaatcgacgctatgcttcacgctctgtacctggggttgggaatttgctcctaggtcctcaaattgacgaagctgaagctcatgctgtttcactaggtgctggttctgaaatcactgcgtccatgcttgctcctggtactgaattgccttgtacagtgaagctcagaatatggcggcacggtaccaatgaaccatgtgttcctttagaacctgaggcatgctgtctgacgatttctcatgccgttctctgcagtgaaatgggtgcccatttttccccatgtggacgatttctggtagcatgtgttgcgtgtttgttgccacaaacagaagacgaccgtggtagccaattgcctgtgtcttacgaaggggctggatcatcaccaactcgtcacccgcttccctctcatcgagttatttatgagctccgggtttattcccttgaggctgagacatttggggatattcttgcttccagagcaatacgggcagcacattgcttaacatccattcagttctcacctacatccgaacacatacttttggcatatggtcgtcgtcatagctcgctccttaggagcatagttgtggaaggcgaaaatggggttcccgtatatactattttggaggtatatagagtttcagatatggagcttgtgagagtgcttcctagcgctgaagatgaagttaatgttgcatgctttcatccttcaccaggaggtggccttgtttatggcactaaggaagggaagctcaggatccttcagcacaatggcgcagacatgacaaacatggggatccagaggtacgcattggaatgctgaagaagcttcaccacaccatgtgtttttaggcttacttccatggaatttttttctgcaggcttcatctgtgtgatccatccaaggggaaacattagatccatctctaactaagtgccttggggattggagccttgaattcagaaggtggtcttaggggtgtgtggagcaaccaaagagtggaggcaaacctaaagatactggcggaacgaagaagtccaaatggctattaaggagaagaaagaatgctacatacgtttataccatgacaagagtgtggacaacatagagaaatacaaggtagcaaaaaagacatcaaagcgaaatgtggcaaagggtagggtgtacaagtacaacgtttgggtacaagaaggaaggaacgaaggacatatatagaatggctaggttccgtaagagtaagacaaaggacttcaaccaaacaaagtacattatggatagggttttacacatttcagcatggtatcaagccaaattcttc

SEQ ID NO: 16888 - DNA, 2861 bp, Zea Mays
ctccctctctctctctcttggagttgctgtgaaaatacgacctatcggggacagctcgatctccctcccttggctggagcctggagccgacggagcagaacgacggttccttgcggcggcagcgacctcgagctgagggcggcgagaaggcgggaacaactcgatctccctttgctagctagctagtcccgatggagccgagggttccttgcggcgacggcggccccgaacctagggccgcgagaacgcatcgacgggagggcgagcgaaaccacgtcctcgatgcgcgaatcctggagcctcagcgacagagatcgaatccaatcaggaacatctttcatctattaactcaacgagaggtctcacctcgattgaaacaccatgctaaaagaatgtggaatgagtccccaaaatatgatcctgattcaattgagttaaggtctgcagatgctaaacttgatattttttcatggtcaggtatcatccattacattctgacatcctggctagcggaagtttggatcatgaagttcgtctatgggatgctaatacttcagactgtattgggtcacaagacttccatcggccaattgcttccattgcatttcatggaagtggggagattttggcagttgcatcaggtcacaaattgtacatatggaactacaataagagagatggcacttctgtaccagccatcatactaaaaacccgccgctcgctgagagctgttcattttcatccgcgtggggctccatatcttctaacagcagaggttaataatatagaatctgcagactcaccgctgactctggcaagatcctctggatatctaaattacccatcggccctgctggtgacaaacactaattctagattctgtacacttcctgagtccaatgtggtgtcaccttgcttactgtggcctgcatacctcagagatggtggaattttacatgtgctcggcaatgacagtagttcaaccattgtgcagcagagatcatcattagttcaaccttccacatcagatactgcaaatgtacagcttgaacagtttgctacccctatggatgtatgtccgggagagccaacttcatctaatgacatacccgatgcagtaactgttcctacttcaaatggaaatgaaatgcatggtgctggaggccagtctaactcaagactgcagggcagcagctctactagtaatcttgagaggttcagtgctagagatgatttgcaagtgtcttccctgagcaggactgacccaatcccattaacagcagggccttcaggatccgatttacaccgtgctatgccactaaatatgctcctcactggcggattagatgttcaaatgttcctaagaaatgtaggaagtggacagcaggatcattctctcttcggcgactcacgtaactgggaggtaccatttttgcagggtttcttgatggccccaaaccatgcaggtgcttcatcttcgattccccttaccactggcagttctaggggaccaaatcgacgctatgcttcacgctctgtacctggggttgggaatttgctcctaggtcctcaaattgacgaagctgaagctcatgctgtttcactaggtgctggttctgaaatcactgcgtccatgcttgctcctggtactgaattgccttgtacagtgaagctcagaatatggcggcacggtaccaatgaaccatgtgttcctttagaacctgaggcatgctgtctgacgatttctcatgccgttctctgcagtgaaatgggtgcccatttttccccatgtggacgatttctggtagcatgtgttgcgtgtttgttgccacaaacagaagacgaccgtggtagccaattgcctgtgtcttacgaaggggctggatcatcaccaactcgtcacccgcttccctctcatcgagttatttatgagctccgggtttattcccttgaggctgagacatttggggatattcttgcttccagagcaatacgggcagcacattgcttaacatccattcagttctcacctacatccgaacacatacttttggcatatggtcgtcgtcatagctcgctccttaggagcatagttgtggaaggcgaaaatggggttcccgtatatactattttggaggtatatagagtttcagatatggagcttgtgagagtgcttcctagcgctgaagatgaagttaatgttgcatgctttcatccttcaccaggaggtggccttgtttatggcactaaggaagggaagctcaggatccttcagcacaatggcgcagacatgacaaacatgggggtgggttgcttcattgaggaaaatatggttgagatccagaggtacgcattggaatgctgaagaagcttcaccacaccatgtgtttttaggcttacttccatggaatttttttctgcaggcttcatctgtgtgatccatccaaggggaaacattagatccatctctaactaagtgccttggggattggagccttgaattcagaaggtggtcttaggggtgtgtggagcaaccaaagagtggaggcaaacctaaagatactggcggaacgaagaagtccaaatggctattaaggagaagaaagaatgctacatacgtttataccatgacaagagtgtggacaacatagagaaatacaaggtagcaaaaaagacatcaaagcgaaatgtggcaaagggtagggtgtacaagtacaacgtttgggtacaagaaggaaggaacgaaggacatatatagaatggctaggttccgtaagagtaagacaaaggacttcaaccaaacaaagtacattatggatagggttttacacatttcagcatggtatcaagccaaattcttc

SEQ ID NO: 16889 - DNA, 3067 bp, Zea Mays
aacactccctctctctctctcttggagttgctgtgaaaatacgacctatcggggacagctcgatctccctcccttggctggagcctggagccgacggagcagaacgacggttccttgcggcggcagcgacctcgagctgagggcggcgagaaggcgggaacaactcgatctccctttgctagctagctagtcccgatggagccgagggttccttgcggcgacggcggccccgaacctagggccgcgagaacgcatcgacgggagggcgagcgaaaccacgtcctcgatgcgcgaatcctggagcctcagcgacagagatcgaatccaatcaggaacatctttcatctattaactcaacgagaggtctcacctcgattgaaacaccatgctaaaagaatgtggaatgagtccccaaaatatgatcctgattcaattgagttaaggtctgcagatgctaaacttgatattttttcatgggcagaatcacagtccctgcatagctggtctgccaagtattgccctcttttgccacctcctaggtcaactattgcagctgctttcagtccagatggaaaaacacttgcgtccacacatggtgaccataccgtgaaaataattgactgccaaacagggaaatgtttgaaggttttgactggacatcgacgcactccttgggtggtcaggtatcatccattacattctgacatcctggctagcggaagtttggatcatgaagttcgtctatgggatgctaatacttcagactgtattgggtcacaagacttccatcggccaattgcttccattgcatttcatggaagtggggagattttggcagttgcatcaggtcacaaattgtacatatggaactacaataagagagatggcacttctgtaccagccatcatactaaaaacccgccgctcgctgagagctgttcattttcatccgcgtggggctccatatcttctaacagcagaggttaataatatagaatctgcagactcaccgctgactctggcaagatcctctggatatctaaattacccatcggccctgctggtgacaaacactaattctagattctgtacacttcctgagtccaatgtggtgtcaccttgcttactgtggcctgcatacctcagagatggtggaattttacatgtgctcggcaatgacagtagttcaaccattgtgcagcagagatcatcattagttcaaccttccacatcagatactgcaaatgtacagcttgaacagtttgctacccctatggatgtatgtccgggagagccaacttcatctaatgacatacccgatgcagtaactgttcctacttcaaatggaaatgaaatgcatggtgctggaggccagtctaactcaagactgcagggcagcagctctactagtaatcttgagaggttcagtgctagagatgatttgcaagtgtcttccctgagcaggactgacccaatcccattaacagcagggccttcaggatccgatttacaccgtgctatgccactaaatatgctcctcactggcggattagatgttcaaatgttcctaagaaatgtaggaagtggacagcaggatcattctctcttcggcgactcacgtaactgggaggtaccatttttgcagggtttcttgatggccccaaaccatgcaggtgcttcatcttcgattccccttaccactggcagttctaggggaccaaatcgacgctatgcttcacgctctgtacctggggttgggaatttgctcctaggtcctcaaattgacgaagctgaagctcatgctgtttcactaggtgctggttctgaaatcactgcgtccatgcttgctcctggtactgaattgccttgtacagtgaagctcagaatatggcggcacggtaccaatgaaccatgtgttcctttagaacctgaggcatgctgtctgacgatttctcatgccgttctctgcagtgaaatgggtgcccatttttccccatgtggacgatttctggtagcatgtgttgcgtgtttgttgccacaaacagaagacgaccgtggtagccaattgcctgtgtcttacgaaggggctggatcatcaccaactcgtcacccgcttccctctcatcgagttatttatgagctccgggtttattcccttgaggctgagacatttggggatattcttgcttccagagcaatacgggcagcacattgcttaacatccattcagttctcacctacatccgaacacatacttttggcatatggtcgtcgtcatagctcgctccttaggagcatagttgtggaaggcgaaaatggggttcccgtatatactattttggaggtatatagagtttcagatatggagcttgtgagagtgcttcctagcgctgaagatgaagttaatgttgcatgctttcatccttcaccaggaggtggccttgtttatggcactaaggaagggaagctcaggatccttcagcacaatggcgcagacatgacaaacatgggggtgggttgcttcattgaggaaaatatggttgagatccagaggtacgcattggaatgctgaagaagcttcaccacaccatgtgtttttaggcttacttccatggaatttttttctgcaggcttcatctgtgtgatccatccaaggggaaacattagatccatctctaactaagtgccttggggattggagccttgaattcagaaggtggtcttaggggtgtgtggagcaaccaaagagtggaggcaaacctaaagatactggcggaacgaagaagtccaaatggctattaaggagaagaaagaatgctacatacgtttataccatgacaagagtgtggacaacatagagaaatacaaggtagcaaaaaagacatcaaagcgaaatgtggcaaagggtagggtgtacaagtacaacgtttgggtacaagaaggaaggaacgaaggacatatatagaatggctaggttccgtaagagtaagacaaaggacttcaaccaaacaaagtacattatggatagggttttacacatttcagcatggtatcaagccaaattcttc

SEQ ID NO: 16890 - DNA, 2255 bp, Zea Mays
ctccctctctctctctcttggagttgctgtgaaaatacgacctatcggggacagctcgatctccctcccttggctggagcctggagccgacggagcagaacgacggttccttgcggcggcagcgacctcgagctgagggcggcgagaaggcgggaacaactcgatctccctttgctagctagctagtcccgatggagccgagggttccttgcggcgacggcggccccgaacctagggccgcgagaacgcatcgacgggagggcgagcgaaaccacgtcctcgatgcgcgaatcctggagcctcagcgacagagatcgaatccaatcaggaacatctttcatctattaactcaacgagaggtctcacctcgattgaaacaccatgctaaaagaatgtggaatgagtccccaaaatatgatcctgattcaattgagttaaggtctgcagatgctaaacttgatattttttcatgggcagaatcacagtccctgcatagctggtctgccaagtattgccctcttttgccacctcctaggtcaactattgcagctgctttcagtccagatggaaaaacacttgcgtccacacatggtgaccataccgtgaaaataattgactgccaaacagggaaatgtttgaaggttttgactggacatcgacgcactccttgggtggtcaggtatcatccattacattctgacatcctggctagcggaagtttggatcatgaagttcgtctatgggatgctaatacttcagactgtattgggtcacaagacttccatcggccaattgcttccattgcatttcatggaagtggggagattttggcagttgcatcaggtcacaaattgtacatatggaactacaataagagagatggcacttctgtaccagccatcatactaaaaacccgccgctcgctgagagctgttcattttcatccgcgtggggctccatatcttctaacagcagaggttaataatatagaatctgcagactcaccgctgactctggcaagatcctctggatatctaaattacccatcggccctgctggtgacaaacactaattctagattctgtacacttcctgagtccaatgtggtgtcaccttgcttactgtggcctgcatacctcagagatggtggaattttacatgtgctcggcaatgacagtagttcaaccattgtgcagcagagatcatcattagttcaaccttccacatcagatactgcaaatgtacagcttgaacagtttgctacccctatggatgtatgtccgggagagccaacttcatctaatgacatacccgatgcagtaactgttcctacttcaaatggaaatgaaatgcatggtgctggaggccagtctaactcaagactgcagggcagcagctctactagtaatcttgagaggttcagtgctagagatgatttgcaagtgtcttccctgagcaggactgacccaatcccattaacagcagggccttcaggatccgatttacaccgtgctatgccactaaatatgctcctcactggcggattagatgttcaaatgttcctaagaaatgtaggaagtggacagcaggatcattctctcttcggcgactcacgtaactgggaggtaccatttttgcagggtttcttgatggccccaaaccatgcaggtgcttcatcttcgattccccttaccactggcagttctaggggaccaaatcgacgctatgcttcacgctctgtacctggggttgggaatttgctcctaggtcctcaaattgacgaagctgaagctcatgctgtttcactaggtgctggttctgaaatcactgcgtccatgcttgctcctggtactgaattgccttgtacagtgaagctcagaatatggcggcacggtaccaatgaaccatgtgttcctttagaacctgaggcatgctgtctgacgatttctcatgccgttctctgcagtgaaatgggtgcccatttttccccatgtggacgatttctggtagcatgtgttgcgtgtttgttgccacaaacagaagacgaccgtggtagccaattgcctgtgtcttacgaaggggctggatcatcaccaactcgtcacccgcttccctctcatcgagttatttatgagctccgggtttattcccttgaggctgagacatttggggatattcttgcttccagagcaatacgggcagcacattgcttaacatccattcagttttcatcattgaattggatcctgtttgtc

SEQ ID NO: 16891 - DNA, 1007 bp, Zea Mays
caattacccagtttgggatgtccaacccagttggccattactttgctagtgcttcacatgacaggactgttagaatttggtcagttgataaaatccaacctttgcgaataatggctgggcacctttctgatgttgatgtaagtgaacttgttggtcctatactctgtgaatagagctttggttaaattgaattattggtgtttgtaattcttttatgtttggatatctacttgtttttatcaatgccctgtattgccagcatgatttggctgatctttttttctgcctgaaaatgttttgcataacagtgtgtccagtggcacgtaaactgtaactacattggtaccggctctagcgacaaaactgtaagactatgggatgttcagacgggtgaatgtatacggatgtttattggtcataggagtatggttttgtcactggcaatgtcacctgatggacgatacatggcctctggagatgaagatggaacaatcatgatatgggatctctcgactggctgttgtgtttcaccactgctaggacacagctcttgtgtgtggacacttgctttcagctgtgaaggagcattgcttgcatcggggtcggccgactgtactgttaagctctgggacgtcgctttcagcacaaaagccatgaagacagaggataccaaaggcagctcatcagctaaccgactgagactgcttaaatccctgcctacaaaatcagctcctgtctatagcctgcggattcagtacctaggatgatgaagtttcagggctgccagatttcagtttcagagccgcaagatttatgcagaatttgaagactatgctaccaaaaaagctttcctagtttacctatgatgcagttcagtgttatttaggatgagtcatatgtttatatctgtctccaaaaatatttgtacacgcttgaagtagtgattattttaagttgtgctactctgtatattgactattttatttcaatgagaaatggtttgtcca

SEQ ID NO: 16892 - DNA, 2183 bp, Zea Mays
tgtcaggttacacgtttgtgacacactaagagcgagtgtgactagtctaggatgcagggagaataatggcctggttatctctaatgacaacacattgaagcagaccgtggaggtagaaaaacaggggaggcaaggtaaggaggtcttagtggttcatgaattggatgagtcgaatgaggattctgggtcattggatgagccgccgggttggcttcctgacggttggactatggaggtttgtcaagaagacaatggctccatctacaagtactacacttccccaatgtccggatacatgttcacatcaaagatggagacattgcattatcttttctcaggggtggaagaacgcatgttggagttgcaggcaagcgccgaggacaacgagcttcatgagtcacatacatggcttccacgtgggtgggtgattgaagtcagagccggtgggaagaaaatggacaaaatgtacaagcgattcttatcaaaagcagaagtattgcactttgttaataagggcatggtttctacatgtgatatggatgtgctgtgcgacactagcactgatgataatatacttgctcatgtggaattcaatcctgatggtttaccagatggatgggtgaaagaaacgatatctagaaagttcaatgatggaatcagaaaagaccagtactataccgatcctgttagtcaccgtgtatttcgcacgcttaagtctgtattgagctaccttggaaccggagaaatatctaggcattcctatttaccaaggagaaatgtcattgacatgtattcatttgataagtgtgcagatctgcccaaaagcatggtgaaaagattgaaagcaaaaggacaagcaaagaaaaaattcatgagagcacaggttttagacaaggacttatctaatgggcagacttcaaatcactgtgaaggtgctattgggttaactcaatctgacccggaaggagataagtttggatctatggaagcggcatgcgaaaaggggaccagttcagagactatgaaacagcgaatagggaggccaaagaaaatcttgaagcaaacaaatgatagcatttcggatcgtgacaagggttcacatcaggagcacatcgaggccaaagaggaagttgatatctgtggtgggaaagacttgacgcatttgaaaactctggagcgtaccgaggctcagaatagcacaatgataaccaaggaagtaaacaacaacgacacagcagagaaaaacctatccaagatagagggagacaactcggatctggtaaccggcacgggtttgcacaagcaagagaatagcagattaactgaagttagtgagaaggcaacattctccacaggttacaaattttacaagaggagaagttgcaataagacatgaggttcaagaaaagcataaaattagatcaagttatctggtcagtagtccagaatacaggcactttgttatactatcaaggaacgttcttgcggcttctgtagcaatcaactcaactgtgagcagttgtaaggagccaggctattttgcttttcatatcctaactgacgctcagaacttctatgccatgaaacactggtttgccaggaattcgtataaaaatgcagctatctgtgtcataaactacgaagcaattattttggagaaacttccaaagtatactatccggcagctgtatttgccagaggagttccgtgttctcattaggagcattaagcggcctactgaaaacacaagaatgaaatacctgtcactgttcagcccctcacatttcgttattccagaaatattcaagtatctaaaccttgacgcatccacaacgttggaatatatatgtactcatattcggattatagaatacaggcttatctgtagaaaattaatataaaaataacaaatttgatgtttgtgtactgatgctaacacaggaatatgggaatagtttttttttcatgtgcttttatataaaatcaaactggtgagactacaaaattcatgtattaatttatataataaccttgcattccaaataggccatcgtataagatagtcaattccataggagttttaaaaaaattaatacgtaagattcaataatttattccagagactcttagaaacctctggcagcaaaagccccaagacaaaaaatatacctaatgagttattt

SEQ ID NO: 16893 - DNA, 3579 bp, Zea Mays
gtcatgtgacgatcaacttgatgaggatgaagacgaactgaagcactagtctgttggaaatatctggatatctatcaacatcctatgtcccagcctggaacaccatatattctctgtcaggttacacgtttgtgacacactaagagcgagtgtgactagtctaggatgcagggagaataatggcctggttatctctaatgacaacacattgaagcagaccgtggaggtagaaaaacaggggaggcaaggtaaggaggtcttagtggttcatgaattggatgagtcgaatgaggattctgggtcattggatgagccgccgggttggcttcctgacggttggactatggaggtttgtcaagaagacaatggctccatctacaagtactacacttccccaatgtccggatacatgttcacatcaaagatggagacattgcattatcttttctcaggggtggaagaacgcatgttggagttgcaggcaagcgccgaggacaacgagcttcatgagtcacatacatggcttccacgtgggtgggtgattgaagtcagagccggtgggaagaaaatggacaaaatgtacaaggtaggttggagatttgttgcacaataacatctagggatgcaaggaggcttgtccgtgaacccactaacagccttaatttttgaagttctccgcggaacccacaaaaatcaagcatatttgcaggttcacggataagctcacctgtgtgggcctttcattacatccatatggtgtggtactttactgcaactatacatattggatataaaaaatacaacagtcttccaataagatgtagctggcaagacaagatgttcccttctaaaagcgagtacaaaaccgaaagaacaattggggtaggtattggctgcaggcacacactggcatgcttggtcaggagccaaggtgatgaagcttgatgtcacctcaaccttggatggtggctcatagcatcctctggttttaccagatagatgcagaggatacatgtcatggagggttaggtgagtgaggcaatgccacagctgtggatggaatggaagaagatatccaaagaaaaaaaataaagcaggagttcacttgtgactctctcaatgcttattattttcagctcaacataaaccatgatatcaatcaacattgtacacgtagttaccatatcaatggaattctagggttcaaggggatcatctgcagttgtttgaatggttgaaataaatcttctcttttataattcagggttgaattttatgtctttaagagtgggtgttgttagaatacaagtgaattgcccatctcttctatcagcttgagcttttgggttgaattggttggataaaagattgaagtctcgagttcgaatcttggttagcgcaattaaataaaataattgttgcttgcttttattccacgtctgaggcttgagagagcctcggcatcaggagtgttagaatacaagtgaattgccatgacttaatttgtgtaggggcaggaggtataaatctttgctcgttcagaagaaagctgttaggttgagagtgaggaggaagttttagttacatggtggatatgttagttccttggaggaaattgaagtcacacaaacgttagatgagatatgagcatatgacatttctttttgttttgaagcttatgccttctgcagttttatgttcacctacctactgggcagcgattcttatcaaaagcatggtggatatgttagttccttggaggaaattgaagtcacacaaacgttagatgagatatgagcatatgacatttctttttgttttgaagcttatgccttctgcagttttatgttcacctacctactgggcagcgattcttatcaaaagcagaagtattgcactttgttaataagggcatggtttctacatgtgatatggatgtgctgtgcgacactagcactgatgataatatacttgctcatgtggaattcaatcctgatggtttaccagatggatgggtgaaagaaacgatatctagaaagttcaatgatggaatcagaaaagaccagtactataccgatcctgttagtcaccgtgtatttcgcacgcttaagtctgtattgagctaccttggaaccggagaaatatctaggcattcctatttaccaaggagaaatgtcattgacatgtattcatttgataagtgtgcagatctgcccaaaagcatggtgaaaagattgaaagcaaaaggacaagcaaagaaaaaattcatgagagcacaggttttagacaaggacttatctaatgggcagacttcaaatcactgtgaaggtgctattgggttaactcaatctgacccggaaggagataagtttggatctatggaagcggcatgcgaaaaggggaccagttcagagactatgaaacagcgaatagggaggccaaagaaaatcttgaagcaaacaaatgatagcatttcggatcgtgacaagggttcacatcaggagcacatcgaggccaaagaggaagttgatatctgtggtgggaaagacttgacgcatttgaaaactctggagcgtaccgaggctcagaatagcacaatgataaccaaggaagtaaacaacaacgacacagcagagaaaaacctatccaagatagagggagacaactcggatctggtaaccggcacgggtttgcacaagcaagagaatagcagattaactgaagttagtgagaaggcaacattctccacaggttacaaattttacaagaggagaagttgcaataagacatgaggttcaagaaaagcataaaattagatcaagttatctggtcagtagtccagaatacaggcactttgttatactatcaaggaacgttcttgcggcttctgtagcaatcaactcaactgtgagcagttgtaaggagccaggctattttgcttttcatatcctaactgacgctcagaacttctatgccatgaaacactggtttgccaggaattcgtataaaaatgcagctatctgtgtcataaactacgaagcaattattttggagaaacttccaaagtatactatccggcagctgtatttgccagaggagttccgtgttctcattaggagcattaagcggcctactgaaaacacaagaatgaaatacctgtcactgttcagcccctcacatttcgttattccagaaatattcaagtatctaaaccttgacgcatccacaacgttggaatatatatgtactcatattcggattatagaatacaggcttatctgtagaaaattaatataaaaataacaaatttgatgtttgtgtactgatgctaacacaggaatatgggaatagtttttttttcatgtgcttttatataaaatcaaactggtgagactacaaaattcatgtattaatttatataataaccttgcattccaaataggccatcgtataagatagtcaattccataggagttttaaaaaaattaatacgtaagattcaataatttattccagagactcttagaaacctctggcagcaaaagccccaagacaaaaaatatacctaatgagttattt

SEQ ID NO: 16894 - DNA, 3846 bp, Zea Mays
cccatcagtgggtttgtaacacaaatggatgaagtgaggagagttaacaaatggatgaagtgaggagagttagcagaagatgcagcactgtagactgaccaaattccccccgcgggcgacgaagaacatcactgtagggctgatttggtgaccggggatcccgaggggaagaaatcctcttgctattcaaaattgaattgcaaggggattcctcccccatggatcccctagggatccctaatcaccaaatcagcccgtagactgaccaaattccccgcgggcttgcggccaaacctttcaccgaggccgcaccctcccgtgcatgtcactcctgccggcgccgggcgtcctatggtagagactcgccgctcagcgcggaggagcggcagcggttcgctcccggccgacggagcgccgtccgagccggcctccgacctctcaggggagaataatggcctggttatctctaatgacaacacattgaagcagaccgtggaggtagaaaaacaggggaggcaaggtaaggaggtcttagtggttcatgaattggatgagtcgaatgaggattctgggtcattggatgagccgccgggttggcttcctgacggttggactatggaggtttgtcaagaagacaatggctccatctacaagtactacacttccccaatgtccggatacatgttcacatcaaagatggagacattgcattatcttttctcaggggtggaagaacgcatgttggagttgcaggcaagcgccgaggacaacgagcttcatgagtcacatacatggcttccacgtgggtgggtgattgaagtcagagccggtgggaagaaaatggacaaaatgtacaaggtaggttggagatttgttgcacaataacatctagggatgcaaggaggcttgtccgtgaacccactaacagccttaatttttgaagttctccgcggaacccacaaaaatcaagcatatttgcaggttcacggataagctcacctgtgtgggcctttcattacatccatatggtgtggtactttactgcaactatacatattggatataaaaaatacaacagtcttccaataagatgtagctggcaagacaagatgttcccttctaaaagcgagtacaaaaccgaaagaacaattggggtaggtattggctgcaggcacacactggcatgcttggtcaggagccaaggtgatgaagcttgatgtcacctcaaccttggatggtggctcatagcatcctctggttttaccagatagatgcagaggatacatgtcatggagggttaggtgagtgaggcaatgccacagctgtggatggaatggaagaagatatccaaagaaaaaaaataaagcaggagttcacttgtgactctctcaatgcttattattttcagctcaacataaaccatgatatcaatcaacattgtacacgtagttaccatatcaatggaattctagggttcaaggggatcatctgcagttgtttgaatggttgaaataaatcttctcttttataattcagggttgaattttatgtctttaagagtgggtgttgttagaatacaagtgaattgcccatctcttctatcagcttgagcttttgggttgaattggttggataaaagattgaagtctcgagttcgaatcttggttagcgcaattaaataaaataattgttgcttgcttttattccacgtctgaggcttgagagagcctcggcatcaggagtgttagaatacaagtgaattgccatgacttaatttgtgtaggggcaggaggtataaatctttgctcgttcagaagaaagctgttaggttgagagtgaggaggaagttttagttacatggtggatatgttagttccttggaggaaattgaagtcacacaaacgttagatgagatatgagcatatgacatttctttttgttttgaagcttatgccttctgcagttttatgttcacctacctactgggcagcgattcttatcaaaagcatggtggatatgttagttccttggaggaaattgaagtcacacaaacgttagatgagatatgagcatatgacatttctttttgttttgaagcttatgccttctgcagttttatgttcacctacctactgggcagcgattcttatcaaaagcagaagtattgcactttgttaataagggcatggtttctacatgtgatatggatgtgctgtgcgacactagcactgatgataatatacttgctcatgtggaattcaatcctgatggtttaccagatggatgggtgaaagaaacgatatctagaaagttcaatgatggaatcagaaaagaccagtactataccgatcctgttagtcaccgtgtatttcgcacgcttaagtctgtattgagctaccttggaaccggagaaatatctaggcattcctatttaccaaggagaaatgtcattgacatgtattcatttgataagtgtgcagatctgcccaaaagcatggtgaaaagattgaaagcaaaaggacaagcaaagaaaaaattcatgagagcacaggttttagacaaggacttatctaatgggcagacttcaaatcactgtgaaggtgctattgggttaactcaatctgacccggaaggagataagtttggatctatggaagcggcatgcgaaaaggggaccagttcagagactatgaaacagcgaatagggaggccaaagaaaatcttgaagcaaacaaatgatagcatttcggatcgtgacaagggttcacatcaggagcacatcgaggccaaagaggaagttgatatctgtggtgggaaagacttgacgcatttgaaaactctggagcgtaccgaggctcagaatagcacaatgataaccaaggaagtaaacaacaacgacacagcagagaaaaacctatccaagatagagggagacaactcggatctggtaaccggcacgggtttgcacaagcaagagaatagcagattaactgaagttagtgagaaggcaacattctccacaggttacaaattttacaagaggagaagttgcaataagacatgaggttcaagaaaagcataaaattagatcaagttatctgtagtccagaatacaggcactttgttatactatcaaggaacgttcttgcggcttctgtagcaatcaactcaactgtgagcagttgtaaggagccaggctattttgcttttcatatcctaactgacgctcagaacttctatgccatgaaacactggtttgccaggaattcgtataaaaatgcagctatctgtgtcataaactacgaagcaattattttggagaaacttccaaagtatactatccggcagctgtatttgccagaggagttccgtgttctcattaggagcattaagcggcctactgaaaacacaagaatgaaatacctgtcactgttcagcccctcacatttcgttattccagaaatattcaagtatctaaaccttgacgcatccacaacgttggaatatatatgtactcatattcggattatagaatacaggcttatctgtagaaaattaatataaaaataacaaatttgatgtttgtgtactgatgctaacacaggaatatgggaatagtttttttttcatgtgcttttatataaaatcaaactggtgagactacaaaattcatgtattaatttatataataaccttgcattccaaataggccatcgtataagatagtcaattccataggagttttaaaaaaattaatacgtaagattcaataatttattccagagactcttagaaacctctggcagcaaaagccccaagacaaaaaatatacctaatgagttattt

SEQ ID NO: 16895 - DNA, 2609 bp, Zea Mays
cccatcagtgggtttgtaacacaaatggatgaagtgaggagagttaacaaatggatgaagtgaggagagttagcagaagatgcagcactgtagactgaccaaattccccccgcgggcgacgaagaacatcactgtagggctgatttggtgaccggggatcccgaggggaagaaatcctcttgctattcaaaattgaattgcaaggggattcctcccccatggatcccctagggatccctaatcaccaaatcagcccgtagactgaccaaattccccgcgggcttgcggccaaacctttcaccgaggccgcaccctcccgtgcatgtcactcctgccggcgccgggcgtcctatggtagagactcgccgctcagcgcggaggagcggcagcggttcgctcccggccgacggagcgccgtccgagccggcatccagctcccctgcaacctccctccccccgcgggagaataatggcctggttatctctaatgacaacacattgaagcagaccgtggaggtagaaaaacaggggaggcaaggtaaggaggtcttagtggttcatgaattggatgagtcgaatgaggattctgggtcattggatgagccgccgggttggcttcctgacggttggactatggaggtttgtcaagaagacaatggctccatctacaagtactacacttccccaatgtccggatacatgttcacatcaaagatggagacattgcattatcttttctcaggggtggaagaacgcatgttggagttgcaggcaagcgccgaggacaacgagcttcatgagtcacatacatggcttccacgtgggtgggtgattgaagtcagagccggtgggaagaaaatggacaaaatgtacaagttttatgttcacctacctactgggcagcgattcttatcaaaagcagaagtattgcactttgttaataagggcatggtttctacatgtgatatggatgtgctgtgcgacactagcactgatgataatatacttgctcatgtggaattcaatcctgatggtttaccagatggatgggtgaaagaaacgatatctagaaagttcaatgatggaatcagaaaagaccagtactataccgatcctgttagtcaccgtgtatttcgcacgcttaagtctgtattgagctaccttggaaccggagaaatatctaggcattcctatttaccaaggagaaatgtcattgacatgtattcatttgataagtgtgcagatctgcccaaaagcatggtgaaaagattgaaagcaaaaggacaagcaaagaaaaaattcatgagagcacaggttttagacaaggacttatctaatgggcagacttcaaatcactgtgaaggtgctattgggttaactcaatctgacccggaaggagataagtttggatctatggaagcggcatgcgaaaaggggaccagttcagagactatgaaacagcgaatagggaggccaaagaaaatcttgaagcaaacaaatgatagcatttcggatcgtgacaagggttcacatcaggagcacatcgaggccaaagaggaagttgatatctgtggtgggaaagacttgacgcatttgaaaactctggagcgtaccgaggctcagaatagcacaatgataaccaaggaagtaaacaacaacgacacagcagagaaaaacctatccaagatagagggagacaactcggatctggtaaccggcacgggtttgcacaagcaagagaatagcagattaactgaagttagtgagaaggcaacattctccacaggttacaaattttacaagaggagaagttgcaataagacatgaggttcaagaaaagcataaaattagatcaagttatctgtagtccagaatacaggcactttgttatactatcaaggaacgttcttgcggcttctgtagcaatcaactcaactgtgagcagttgtaaggagccaggctattttgcttttcatatcctaactgacgctcagaacttctatgccatgaaacactggtttgccaggaattcgtataaaaatgcagctatctgtgtcataaactacgaagcaattattttggagaaacttccaaagtatactatccggcagctgtatttgccagaggagttccgtgttctcattaggagcattaagcggcctactgaaaacacaagaatgaaatacctgtcactgttcagcccctcacatttcgttattccagaaatattcaagtatctaaaccttgacgcatccacaacgttggaatatatatgtactcatattcggattatagaatacaggcttatctgtagaaaattaatataaaaataacaaatttgatgtttgtgtactgatgctaacacaggaatatgggaatagtttttttttcatgtgcttttatataaaatcaaactggtgagactacaaaattcatgtattaatttatataataaccttgcattccaaataggccatcgtataagatagtcaattccataggagttttaaaaaaattaatacgtaagattcaataatttattccagagactcttagaaacctctggcagcaaaagccccaagacaaaaaatatacctaatgagttattt

SEQ ID NO: 16896 - DNA, 3402 bp, Zea Mays
cccatcagtgggtttgtaacacaaatggatgaagtgaggagagttaacaaatggatgaagtgaggagagttagcagaagatgcagcactgtagactgaccaaattccccccgcgggcgacgaagaacatcactgtagggctgatttggtgaccggggatcccgaggggaagaaatcctcttgctattcaaaattgaattgcaaggggattcctcccccatggatcccctagggatccctaatcaccaaatcagcccgtagactgaccaaattccccgcgggcttgcggccaaacctttcaccgaggccgcaccctcccgtgcatgtcactcctgccggcgccgggcgtcctatggtagagactcgccgctcagcgcggaggagcggcagcggttcgctcccggccgacggagcgccgtccgagccggcctccgacctctcaggggagaataatggcctggttatctctaatgacaacacattgaagcagaccgtggaggtagaaaaacaggggaggcaaggtaaggaggtcttagtggttcatgaattggatgagtcgaatgaggattctgggtcattggatgagccgccgggttggcttcctgacggttggactatggaggtttgtcaagaagacaatggctccatctacaagtactacacttccccaatgtccggatacatgttcacatcaaagatggagacattgcattatcttttctcaggggtggaagaacgcatgttggagttgcaggcaagcgccgaggacaacgagcttcatgagtcacatacatggcttccacgtgggtgggtgattgaagtcagagccggtgggaagaaaatggacaaaatgtacaaggtaggttggagatttgttgcacaataacatctagggatgcaaggaggcttgtccgtgaacccactaacagccttaatttttgaagttctccgcggaacccacaaaaatcaagcatatttgcaggttcacggataagctcacctgtgtgggcctttcattacatccatatggtgtggtactttactgcaactatacatattggatataaaaaatacaacagtcttccaataagatgtagctggcaagacaagatgttcccttctaaaagcgagtacaaaaccgaaagaacaattggggtaggtattggctgcaggcacacactggcatgcttggtcaggagccaaggtgatgaagcttgatgtcacctcaaccttggatggtggctcatagcatcctctggttttaccagatagatgcagaggatacatgtcatggagggttaggtgagtgaggcaatgccacagctgtggatggaatggaagaagatatccaaagaaaaaaaataaagcaggagttcacttgtgactctctcaatgcttattattttcagctcaacataaaccatgatatcaatcaacattgtacacgtagttaccatatcaatggaattctagggttcaaggggatcatctgcagttgtttgaatggttgaaataaatcttctcttttataattcagggttgaattttatgtctttaagagtgggtgttgttagaatacaagtgaattgcccatctcttctatcagcttgagcttttgggttgaattggttggataaaagattgaagtctcgagttcgaatcttggttagcgcaattaaataaaataattgttgcttgcttttattccacgtctgaggcttgagagagcctcggcatcaggagtgttagaatacaagtgaattgccatgacttaatttgtgtaggggcaggaggtataaatctttgctcgttcagaagaaagctgttaggttgagagtgaggaggaagttttagttacatggtggatatgttagttccttggaggaaattgaagtcacacaaacgttagatgagatatgagcatatgacatttctttttgttttgaagcttatgccttctgcagttttatgttcacctacctactgggcagcgattcttatcaaaagcatggtggatatgttagttccttggaggaaattgaagtcacacaaacgttagatgagatatgagcatatgacatttctttttgttttgaagcttatgccttctgcagttttatgttcacctacctactgggcagcgattcttatcaaaagcagaagtattgcactttgttaataagggcatggtttctacatgtgatatggatgtgctgtgcgacactagcactgatgataatatacttgctcatgtggaattcaatcctgatggtttaccagatggatgggtgaaagaaacgatatctagaaagttcaatgatggaatcagaaaagaccagtactataccgatcctgttagtcaccgtgtatttcgcacgcttaagtctgtattgagctaccttggaaccggagaaatatctaggcattcctatttaccaaggagaaatgtcattgacatgtattcatttgataagtgtgcagatctgcccaaaagcatggtgaaaagattgaaagcaaaaggacaagcaaagaaaaaattcatgagagcacaggttttagacaaggacttatctaatgggcagacttcaaatcactgtgaaggtgctattgggttaactcaatctgacccggaaggagataagtttggatctatggaagcggcatgcgaaaaggggaccagttcagagactatgaaacagcgaatagggaggccaaagaaaatcttgaagcaaacaaatgatagcatttcggatcgtgacaagggttcacatcaggagcacatcgaggccaaagaggaagttgatatctgtggtgggaaagacttgacgcatttgaaaactctggagcgtaccgaggctcagaatagcacaatgataaccaaggaagtaaacaacaacgacacagcagagaaaaacctatccaagatagagggagacaactcggatctggtaaccggcacgggtttgcacaagcaagagaatagcagattaactgaagttagtgagaaggcaacattctccacaggttacaaattttacaagaggagaagttgcaataagacatgaggttcaagaaaagcataaaattagatcaagttatctggtgagttttatgggtcgccgcccaaaagttgtatcatacttcttcagggaacaaatggaaccaaagttgatctggtgtgtccaggttttcatttttttcgttttgtttattcccttctgcatgcttctgcttctagttgatgtggagggtgtctagtggaagtaatctgtttgattcttgtatcataggaattaatactggttgtagagagcaggatttaacacttgacagcaggagcatcaaaggaatcaaatttaagaagctttcgttaacctgagggctgagacataaatgccgtcaa

SEQ ID NO: 16897 - DNA, 2248 bp, Zea Mays
gatatctcaccccgtttgagtcacttagaaatatgacaagctgtttcaccactatctgtttgatagaaaaacctaaaaaagctgcttcaccacgatctatttgataaaaaaacataaaaaatgtgttgggacagaagttataccaaatttcgatttttaattaatagcactaatagaaaacgacactttctttctcataatgtgttggcaatcccctgtgcacgagtccctcccacgaatggtgggagctgcagtgctgcaccccacccgcggcagcaccaccggcgacgccggcacgcctaaatgcatcctcccctcgcctccgcggccctccgcctcctctccttcacctcccgtacccgcctcctctcgcactgcccatttttcctatcccgccgtgacgacgacggcggccgcgagggcccctcgtcgccgctgcccccgctctcgccttctggctcgactttctggccccgctcgctcctcttgtctgcgtcagatgccgcgggcctcttcagcctccgtggcgggtggcggagacgggctcttcctcccgcggcgtcacggccccccggcgccgtcactgacgcagctcccgtccggctcaccgtctcccgcaaatattctctgcgtgtggccaaggggaagaagaaggcgcattttgacgatgaacacagccatcgagcggttaacatggcactatggtgcaactttctcgtcttctctctaaagtttggagtgtggatttcaacttcaagtcatgttatgctagctgagctagtgcattccattgcagactttgctaaccaggctcttcttgcttatggtttgagcagctcaagacgtgctccagatgctctacacccctatggttattcgaaggaaagatttgtatggtctctcatatctgcagttggaatattttgcttgggttcaggtgctaccatagtgcatggagttcaaaatttatggaattgtcaacctccagagaatattcactgggctgcattagtgattggtgggtccttcctaattgaaggtgcttcactgcttgttgctataaacgctgttaggaaaggtgcagaagcagagggaatgggtatttgggactatatctggcgtggtcatgatccaacttctgttgctgttatgactgaagatggtgcggctgttacaggccttgctattgctgcaacatctttggtagctgttcaaatgacaggaaatgctatgtatgatccaattggttcaatcattgttggcaatttactagggctggttgctatttttctgattcagaggaataggcatgctttaattggccgggccattgatgatcatgacatgcagcgagtccttgaatttcttaagtctgatcaggtcgtagatgctctttatgattgcaaaagcgaggtgattgggccaggattttttagattcaaggctgaaattgatttcaatggagttgttctggtacaaaattatttggaaaggactggacgtgggacttgggcaaaacagttcagggaagctgcaatgtccaaggatgatacggaattactaagggtcatggctaactacggtgaggatgtagttgaagctctgggatatgaagtggatcggctggagtctgagatcaaaaagcttgtgcctgggattaaacatgttgacatcgaggcacacaatccagaaggacttactcttagagcagaagttttgtagattacctatgtacattgcatttgatttaaacaacttacacatagaacatctgtatactactaaacagaaaccacacaactagagagcatgcatgaacaacataagagagcggctacacaagttgcataaaatccacacgactttacatatacatatacatcacacaatcagtaaatatagagatgactggattgctcgacttgttggatagacatctcatgtaaaatagctatatgcctatatcaagaatgaacaagatgctgtcttgttacacacagaaaacattttgaagtactatgcttacatgaatactgttgggccttctttgtctgaaggtcatcaaaatattaacttaacaattactctttagtctgttttaagtgtaacatgacgattgccgaagaagaccttcggttggagctgtcgcgtaaacatcacatcaaaaacaaaggcacttttcaattagtggacgaagctgaccttcgaccgaaggaacatgtaaagaagcttcatctatacacgcaag

SEQ ID NO: 16898 - DNA, 1959 bp, Zea Mays
ctcgcatattcacatatatggcatggaaactttacagatgaactcatttcgtgtgtaatttaggtacaacacacagacttggtagtcatccaatacgctattgcaatcaattccacacaatctcgctcaccttatttgcctcccgatcagtacatccgcacctatctgaatagtcttctctgcccaccaatccaaatgacttgatcacctctttactgccacaaatacagtgaagaaccacaatctaatcacctacataatctgcacctatctgaatagtcttctctgcccaccaatccaaatgacttgatcacctctttactgtcacaaatacagtaaagaaccacaatctaatcacctacataacataagcagcttgtggtgatgctgcatgggaggaggagttggagtattctacatcttcagaaagaatgaggtcaagagcagagatagtgagacttggacctgatcccggcccatcctcaccggcaactgcagcctttgctgcccgcgcggcgctccagcagcacgttgctggactggacggatgtacatctcgtgtaggcgccgaaagccgccaagaggaagcacgacactgcgaagcatctgctcggagaatccaatgcaggcccactcccgcacgcacgccgcctcccagcggccgagtgcgtgagcggcggcctaccgcaccgtaactccaggcggccgagcgcgtgggatgacaggctacttctccggggagctggtgcgcgttgatggcagcctcggatccccgtaatcatggagcagagggggaggagggtgggggatccgcggcaaccttccatgacgggcggtgggtgggggcggatcggcgtcgtggaaaccttccatgcgacgtcgtggggaggaggtgcgcgttgatggcggcctcggatccccgtaatcgtggagcagatgggggaggagaacgggggatccgtggcaaccttccatgacgggcgttgatggcggatcggcgttgatggcggggagcactcggcagaaccgtgcaccagtatagattgtggacgcctacagtagtgtcttaagaagtagtatagatatagattcattcattctgacattgttgggacctcagcatgttttgctgatgtttttgattttctgtccatgacttgttggaaagcagctattcaatagatttgctctccgtgtaggttgctatttttctgattcagaggaataggcatgctttaattggccgggccattgatgatcatgacatgcagcgagtccttgaatttcttaagtctgatcaggtcgtagatgctctttatgattgcaaaagcgaggtgattgggccaggattttttagattcaaggctgaaattgatttcaatggagttgttctggtacaaaattatttggaaaggactggacgtgggacttgggcaaaacagttcagggaagctgcaatgtccaaggatgatacggaattactaagggtcatggctaactacggtgaggatgtagttgaagctctgggatatgaagtggatcggctggagtctgagatcaaaaagcttgtgcctgggattaaacatgttgacatcgaggcacacaatccagaaggacttactcttagagcagaagttttgtagattacctatgtacattgcatttgatttaaacaacttacacatagaacatctgtatactactaaacagaaaccacacaactagagagcatgcatgaacaacataagagagcggctacacaagttgcataaaatccacacgactttacatatacatatacatcacacaatcagtaaatatagagatgactggattgctcgacttgttggatagacatctcatgtaaaatagctatatgcctatatcaagaatgaacaagatgctgtcttgttacacacagaaaacattttgaagtactatgcttacatgaatactgtt

SEQ ID NO: 16899 - DNA, 1322 bp, Zea Mays
gatatctcaccccgtttgagtcacttagaaatatgacaagctgtttcaccactatctgtttgatagaaaaacctaaaaaagctgcttcaccacgatctatttgataaaaaaacataaaaaatgtgttgggacagaagttataccaaatttcgatttttaattaatagcactaatagaaaacgacactttctttctcataatgtgttggcaatcccctgtgcacgagtccctcccacgaatggtgggagctgcagtgctgcaccccacccgcggcagcaccaccggcgacgccggcacgcctaaatgcatcctcccctcgcctccgcggccctccgcctcctctccttcacctcccgtacccgcctcctctcgcactgcccatttttcctatcccgccgtgacgacgacggcggccgcgagggcccctcgtcgccgctgcccccgctctcgccttctggctcgactttctggccccgctcgctcctcttgtctgcgtcagatgccgcgggcctcttcagcctccgtggcgggtggcggagacgggctcttcctcccgcggcgtcacggccccccggcgccgtcactgacgcagctcccgtccggctcaccgtctcccgcaaatattctctgcgtgtggccaaggggaagaagaaggcgcattttgacgatgaacacagtttggagtgtggatttcaacttcaagtcatgttatgctagctgagctagtgcattccattgcagactttgctaaccaggctcttcttgcttatggtttgagcagctcaagacgtgctccagatgctctacacccctatggttattcgaaggaaagatttgtatggtctctcatatctgcagttggaatattttgcttgggttcaggtgctaccatagtgcatggagttcaaaatttatggaattgtcaacctccagagaatattcactgggctgcattagtgattggtgggtccttcctaattgaaggtgcttcactgcttgttgctataaacgctgttaggaaaggtgcagaagcagagggaatgggtatttgggactatatctggcgtggtcatgatccaacttctgttgctgttatgactgaagatggtgcggctgttacaggccttgctattgctgcaacatctttggtagctgttcaaatgacaggaaatgctatgtatgatccaattggttcaatcattgttggcaatttactagggctgcgaagcaaaaaaccacgtctttcacaatttggaccatctctaattgccacactgaaacttgttacatggcatataatagaaggggtgtttggttcttga

SEQ ID NO: 16900 - DNA, 1987 bp, Zea Mays
tagaagctctatcatatctttgtccccagttccagtgttcattcataatctgtttgctgaagtttgtgattacttgaaactattagctagactactactaattaataaagtacattaatgccagtgcaggggtgcctccgccaatgctgacatcccagccgcttgggcagaatccttttccagaggtcggggcggcgacggcgtttgcaggcagagatgagcaggaggatgagatgcagctggcgctctgcaccgagtgcaccaagaactacgagagggaggcgacgctcgtgaaggcagaggctgatgcggagggcccacgtgccagcctcccgggctggctggtgctggacagaccaccggcagaccaaacaccacacgagaagtatctgaccgtgttgaagaggaaatggagccggctgtgcaggaagcttcacctctgctctgatccaggctcccctcagtgtccatggtggtctggttcttgctcgcaaccggccagcaagggtaagccaagcgagccgaggttcttgggcttggatggcttgatggggcaacacacgagcaggaggtccccgccgtcaccatcgaggagtcctcgttgggctccgagtccaccgatggggtcgggatgccagggcgtgggaactacgcttgctctcgccagccacctgctctcggactcggcgacctccgacagccgcgccccgggaagcggtgatggatccgcggcggcgcgcgagctggagcagaggctgcgcaggaacatcccgtggcaaccccgagccatcgtcgcggagattgccaatgcggtggtcgctagccgagagagcgacgacggggcgacgggcgtgtggctgtacgtgaaggggagcgaccacgtcgccacgcggcgcgctgtcacggtgatcgcggagacgcgctgcggctcggctgaccgcgtgatctgcgcggacccgagcaagttcagctccgcagagaggttgtgctcagatgttgtctccagggcgtccgcgatgggtggcaagatggtggtggtggtcgtcgacgatgtcgagaacgcgtcacgcgacgtcgccgactgcctagtcgccgcatcgaagagcggttctctgaaggatcgtcagtccggacaagcactggatctctccggctgcatcgtgatcctgctagcatcgaagtggaccggcggctccagcgaccagatcagcctgcgtctgtgggcggagaacgaggcgtcgtccgccgctctcaagaggaagacggagtcaccgctgcgcgagagcaagcgagcacggcacgacgccgggctgggcggccttgatctcaacctctgcgccgaggatgacccagcagacgaagacgacgaagcccttcccagcgacataaccgacgaaggcgactctagcgacacgagtgagcacggacaaccccacggcctcctcgaggccctcgcggcccgcgtggtcaccctcgacaatgacgacggcgacggcgacgccacagcctccatccgcgcgaggcttgccagggccatcggccaaggatggacacgtgtggaggagacggcggtgcaaatgcttgcagcggcgtccggacagttcctcgaggacgagtttgagagttggacgtcggaggtgcttgaaccggcagtggcgctggcaacggtcaaaaatggcgggaaagggaaggtgatagtacttggattggggccctgtggcgagagccgggagacaccagggtttatgggctctgtccttccaagtagggtccaggtggactgagctgtgtactgttttttagttctcatttttttagaggggaagtggtttgtatgtatggtatgtaaagcgtgggattggggcctggaaatgaaagggatcaaatgtactattattatatataagtagttttgcaggattaattatcactacggactaatttggaaacttaaatcctctggagattagagagcattgaggtgaaa

SEQ ID NO: 16901 - DNA, 1934 bp, Zea Mays
ccgctctgtgcctgtgttcaaggcgtggtcgcgtggaggaagaggatgagaatggcggcgtaatacgatggccttccagtctccgtcgaaactcgagcaaggcccaagggactcccgaaagctcgatttcgtgccaaatccagcgaaactattatgcgcgccttctttcttttctctttcgcgcgctgcttctccccacacgttcgtactggccgccagaacaactccgccgcccgccaactctagccttgtagtgccgagccgaactcccatcgcgtcgtcgtccgacctctgaaggtccctcgttggccgtcacagcctttggaaggacaccgccatttgaaggtcctccgtcccgcctctgaaggtcgaccgccgccatttgaaggtcccctgtcccgcctctgaaggtctccatttgaactcgccatctgaactcgtcatcagacggccccaactttttcctcttcggtggttggacagctgctgtggttgggagttgtcgaccaatttcttcccagcacattctgcttagcctgatgggagaggtggaggctggacaatcagaagaaggtggttcatacttcacgaacttgctgaatgaaggccaatatgatgcatgttttgaagaatatggaactataccatttgagtcacagcactcttgccgcctgaaaaggagagaaatccctcatcaaagccatcacaaaagcaaaaagggaaaaattttagcgtggatgaagataggcttattgtgtcagcatggttaaatgtcagtatggatccaacacaaggaacaaatcaaacaaaagatacattttggagaagaatccacaagtactatgagagcaatagaggaactttaccagaacgtagtcagaattcgttgttgcatcgttggagttctattaatgatgctgttagtaagttttgtgcttgtgtaacccaaatacacaatagaaaccagagtgggatgactattcatgacagggtggaggaggctgaaaagcttttccagtctctagacccccaaaaaaagtcttttcagtttaggcattgttggctccagctcagaaatcagccaaaatggcatgacaagctgcagcaaatggcagctgtaaaaacaagcaacaaaaaacagaaggtagccaaagatttgagtccgggattagttgatcttactactcaagttgggaatgaagtttctcctgtacagattgtccctccaaatatagctgcaccagaaagaccaatgggtaagaagaggtcaaaagaagcaatgtgtaaagggggttttgatgcatgttctgatgcattggacattttgtgggaaaagaagagacaggctgatgtagagaaggagttaaagagagaggagaggtatgcacaagcatatgctctagataaagagaggcttgagctggaacacaagaggcttacaattgaagaacagaagcatacaaatgaacaaaaaaggcttgatcaagagaaagagcgcctagccaatgaagcaaacaacctttacattaagcggattgaagaagaacagaaaattatgagtatagaccttactactatgagtgaattgcaaagacaatactatatgtgtttgcaggctgatatcgttgcacgtcgcatgaattagttgtttttttcaaattttggtcagatcacagatgcgactttagattattttgtttcattagttgtttttttcttcaaattttggtcagatcatagatgctactttagattattttgtttcactgagtacacatagagatgaacaatctatggatttttagttgcatgtgctactcttatatactgttttccgtttagttttatgtgcatctgtggatttttgtactgaataatatgactggtctgttccaacatgaggtaaaagtctagacaatgattgatacacttag

SEQ ID NO: 16902 - DNA, 1782 bp, Zea Mays
atttctttgcgtctacagccacagacaggagacggcatccaagcattatttccaggcagagtgtcccggccgctctgtgcctgtgttcaaggcgtggtcgcgtggaggaagaggatgagaatggcggcgtaatacgatggccttccagtctccgtcgaaactcgagcctttggaaggacaccgccatttgaaggtcctccgtcccgcctctgaaggtcgaccgccgccatttgaaggtcccctgtcccgcctctgaaggtctccatttgaactcgccatctgaactcgtcatcagacggccccaactttttcctcttcggtggttggacagctgctgtggttgggagttgtcgaccaatttcttcccagcacattctgcttagcctgatgggagaggtggaggctggacaatcagaagaaggtggttcatacttcacgaacttgctgaatgaaggccaatatgatgcatgttttgaagaatatggaactataccatttgagtcacagcactcttgccgcctgaaaaggagagaaatccctcatcaaagccatcacaaaagcaaaaagggaaaaattttagcgtggatgaagataggcttattgtgtcagcatggttaaatgtcagtatggatccaacacaaggaacaaatcaaacaaaagatacattttggagaagaatccacaagtactatgagagcaatagaggaactttaccagaacgtagtcagaattcgttgttgcatcgttggagttctattaatgatgctgttagtaagttttgtgcttgtgtaacccaaatacacaatagaaaccagagtgggatgactattcatgacagggtggaggaggctgaaaagcttttccagtctctagacccccaaaaaaagtcttttcagtttaggcattgttggctccagctcagaaatcagccaaaatggcatgacaagctgcagcaaatggcagctgtaaaaacaagcaacaaaaaacagaaggtagccaaagatttgagtccgggattagttgatcttactactcaagttgggaatgaagtttctcctgtacagattgtccctccaaatatagctgcaccagaaagaccaatgggtaagaagaggtcaaaagaagcaatgtgtaaagggggttttgatgcatgttctgatgcattggacattttgtgggaaaagaagagacaggctgatgtagagaaggagttaaagagagaggagaggtatgcacaagcatatgctctagataaagagaggcttgagctggaacacaagaggcttacaattgaagaacagaagcatacaaatgaacaaaaaaggcttgatcaagagaaagagcgcctagccaatgaagcaaacaacctttacattaagcggattgaagaagaacagaaaattatgagtatagaccttactactatgagtgaattgcaaagacaatactatatgtgtttgcaggctgatatcgttgcacgtcgcatgaattagttgtttttttcaaattttggtcagatcacagatgcgactttagattattttgtttcattagttgtttttttcttcaaattttggtcagatcatagatgctactttagattattttgtttcactgagtacacatagagatgaacaatctatggatttttagttgcatgtgctactcttatatactgttttccgtttagttttatgtgcatctgtggatttttgtactgaataatatgactggtctgttccaacatgaggtaaaagtctagacaatgattgatacacttag

SEQ ID NO: 16903 - DNA, 2250 bp, Zea Mays
cagacacccaggcgctttatttctttgcgtctacagccacagacaggagacggcatccaagcattatttccaggcagagtgtcccggccgctctgtgcctgtgttcaaggcgtggtcgcgtggaggaagaggatgagaatggcggcgtaatacgatggccttccagtctccgtcgaaactcgaggtagacagactgatcgatgagacacacagtcgaaactcgccggcacatatataggtcctgtttcaatcttactggataaactttaatagcttttttttagctatttagtgatctaaacagtagagctaatggtggtgtgataaaatttagcaactattatttaataaactgcttaaagcatctccaacaacagttacttaaacaggtttctaaatctcagtttaaagagttattagaaaaaacttatctccagtggtgttgtaaatgttattgctaaatttataaagttgctacatttctctatctggtcgctacatgtagcaaggcccaagggactcccgaaagctcgatttcgtgccaaatccagcgaaactattatgcgcgccttctttcttttctctttcgcgcgctgcttctccccacacgttcgtactggccgccagaacaactccgccgcccgccaactctagccttgtagtgccgagccgaactcccatcgcgtcgtcgtccgacctctgaaggtccctcgttggccgtcacagcctttggaaggacaccgccatttgaaggtcctccgtcccgcctctgaaggtcgaccgccgccatttgaaggtcccctgtcccgcctctgaaggtctccatttgaactcgccatctgaactcgtcatcagacggccccaactttttcctcttcggtggttggacagctgctgtggttgggagttgtcgaccaatttcttcccagcacattctgcttagcctgatgggagaggtggaggctggacaatcagcactcttgccgcctgaaaaggagagaaatccctcatcaaagccatcacaaaagcaaaaagggaaaaattttagcgtggatgaagataggcttattgtgtcagcatggttaaatgtcagtatggatccaacacaaggaacaaatcaaacaaaagatacattttggagaagaatccacaagtactatgagagcaatagaggaactttaccagaacgtagtcagaattcgttgttgcatcgttggagttctattaatgatgctgttagtaagttttgtgcttgtgtaacccaaatacacaatagaaaccagagtgggatgactattcatgacagggtggaggaggctgaaaagcttttccagtctctagacccccaaaaaaagtcttttcagtttaggcattgttggctccagctcagaaatcagccaaaatggcatgacaagctgcagcaaatggcagctgtaaaaacaagcaacaaaaaacagaaggtagccaaagatttgagtccgggattagttgatcttactactcaagttgggaatgaagtttctcctgtacagattgtccctccaaatatagctgcaccagaaagaccaatgggtaagaagaggtcaaaagaagcaatgtgtaaagggggttttgatgcatgttctgatgcattggacattttgtgggaaaagaagagacaggctgatgtagagaaggagttaaagagagaggagaggtatgcacaagcatatgctctagataaagagaggcttgagctggaacacaagaggcttacaattgaagaacagaagcatacaaatgaacaaaaaaggcttgatcaagagaaagagcgcctagccaatgaagcaaacaacctttacattaagcggattgaagaagaacagaaaattatgagtatagaccttactactatgagtgaattgcaaagacaatactatatgtgtttgcaggctgatatcgttgcacgtcgcatgaattagttgtttttttcaaattttggtcagatcacagatgcgactttagattattttgtttcattagttgtttttttcttcaaattttggtcagatcatagatgctactttagattattttgtttcactgagtacacatagagatgaacaatctatggatttttagttgcatgtgctactcttatatactgttttccgtttagttttatgtgcatctgtggatttttgtactgaataatatgactggtctgttccaacatgaggtaaaagtctagacaatgattgatacacttag

SEQ ID NO: 16904 - DNA, 2422 bp, Zea Mays
ccggtcctccagcggtccagcctctttagcacacacatccacgtcgcatctgctgcacctgcacctggactaccgcagacagccagacacccaggcgctttatttctttgcgtctacagccacagacaggagacggcatccaagcattatttccaggcagagtgtcccggccgctctgtgcctgtgttcaaggcgtggtcgcgtggaggaagaggatgagaatggcggcgtaatacgatggccttccagtctccgtcgaaactcgaggtagacagactgatcgatgagacacacagtcgaaactcgccggcacatatataggtcctgtttcaatcttactggataaactttaatagcttttttttagctatttagtgatctaaacagtagagctaatggtggtgtgataaaatttagcaactattatttaataaactgcttaaagcatctccaacaacagttacttaaacaggtttctaaatctcagtttaaagagttattagaaaaaacttatctccagtggtgttgtaaatgttattgctaaatttataaagttgctacatttctctatctggtcgctacatgtagcaaggcccaagggactcccgaaagctcgatttcgtgccaaatccagcgaaactattatgcgcgccttctttcttttctctttcgcgcgctgcttctccccacacgttcgtactggccgccagaacaactccgccgcccgccaactctagccttgtagtgccgagccgaactcccatcgcgtcgtcgtccgacctctgaaggtccctcgttggccgtcacagcctttggaaggacaccgccatttgaaggtcctccgtcccgcctctgaaggtcgaccgccgccatttgaaggtcccctgtcccgcctctgaaggtctccatttgaactcgccatctgaactcgtcatcagacggccccaactttttcctcttcggtggttggacagctgctgtggttgggagttgtcgaccaatttcttcccagcacattctgcttagcctgatgggagaggtggaggctggacaatcagaaggtggttcatacttcacgaacttgctgaatgaaggccaatatgatgcatgttttgaagaatatggaactataccatttgagtcacagcactcttgccgcctgaaaaggagagaaatccctcatcaaagccatcacaaaagcaaaaagggaaaaattttagcgtggatgaagataggcttattgtgtcagcatggttaaatgtcagtatggatccaacacaaggaacaaatcaaacaaaagatacattttggagaagaatccacaagtactatgagagcaatagaggaactttaccagaacgtagtcagaattcgttgttgcatcgttggagttctattaatgatgctgttagtaagttttgtgcttgtgtaacccaaatacacaatagaaaccagagtgggatgactattcatgacagggtggaggaggctgaaaagcttttccagtctctagacccccaaaaaaagtcttttcagtttaggcattgttggctccagctcagaaatcagccaaaatggcatgacaagctgcagcaaatggcagctgtaaaaacaagcaacaaaaaacagaaggtagccaaagatttgagtccgggattagttgatcttactactcaagttgggaatgaagtttctcctgtacagattgtccctccaaatatagctgcaccagaaagaccaatgggtaagaagaggtcaaaagaagcaatgtgtaaagggggttttgatgcatgttctgatgcattggacattttgtgggaaaagaagagacaggctgatgtagagaaggagttaaagagagaggagaggtatgcacaagcatatgctctagataaagagaggcttgagctggaacacaagaggcttacaattgaagaacagaagcatacaaatgaacaaaaaaggcttgatcaagagaaagagcgcctagccaatgaagcaaacaacctttacattaagcggattgaagaagaacagaaaattatgagtatagaccttactactatgagtgaattgcaaagacaatactatatgtgtttgcaggctgatatcgttgcacgtcgcatgaattagttgtttttttcaaattttggtcagatcacagatgcgactttagattattttgtttcattagttgtttttttcttcaaattttggtcagatcatagatgctactttagattattttgtttcactgagtacacatagagatgaacaatctatggatttttagttgcatgtgctactcttatatactgttttccgtttagttttatgtgcatctgtggatttttgtactgaataatatgactggtctgttccaacatgaggtaaaagtctagacaatgattgatacacttag

SEQ ID NO: 16905 - DNA, 2443 bp, Zea Mays
gcagttttcgtggtccgtccggtcctccagcggtccagcctctttagcacacacatccacgtcgcatctgctgcacctgcacctggactaccgcagacagccagacacccaggcgctttatttctttgcgtctacagccacagacaggagacggcatccaagcattatttccaggcagagtgtcccggccgctctgtgcctgtgttcaaggcgtggtcgcgtggaggaagaggatgagaatggcggcgtaatacgatggccttccagtctccgtcgaaactcgaggtagacagactgatcgatgagacacacagtcgaaactcgccggcacatatataggtcctgtttcaatcttactggataaactttaatagcttttttttagctatttagtgatctaaacagtagagctaatggtggtgtgataaaatttagcaactattatttaataaactgcttaaagcatctccaacaacagttacttaaacaggtttctaaatctcagtttaaagagttattagaaaaaacttatctccagtggtgttgtaaatgttattgctaaatttataaagttgctacatttctctatctggtcgctacatgtagcaaggcccaagggactcccgaaagctcgatttcgtgccaaatccagcgaaactattatgcgcgccttctttcttttctctttcgcgcgctgcttctccccacacgttcgtactggccgccagaacaactccgccgcccgccaactctagccttgtagtgccgagccgaactcccatcgcgtcgtcgtccgacctctgaaggtccctcgttggccgtcacagcctttggaaggacaccgccatttgaaggtcctccgtcccgcctctgaaggtcgaccgccgccatttgaaggtcccctgtcccgcctctgaaggtctccatttgaactcgccatctgaactcgtcatcagacggccccaactttttcctcttcggtggttggacagctgctgtggttgggagttgtcgaccaatttcttcccagcacattctgcttagcctgatgggagaggtggaggctggacaatcagaagaaggtggttcatacttcacgaacttgctgaatgaaggccaatatgatgcatgttttgaagaatatggaactataccatttgagtcacagcactcttgccgcctgaaaaggagagaaatccctcatcaaagccatcacaaaagcaaaaagggaaaaattttagcgtggatgaagataggcttattgtgtcagcatggttaaatgtcagtatggatccaacacaaggaacaaatcaaacaaaagatacattttggagaagaatccacaagtactatgagagcaatagaggaactttaccagaacgtagtcagaattcgttgttgcatcgttggagttctattaatgatgctgttagtaagttttgtgcttgtgtaacccaaatacacaatagaaaccagagtgggatgactattcatgacagggtggaggaggctgaaaagcttttccagtctctagacccccaaaaaaagtcttttcagtttaggcattgttggctccagctcagaaatcagccaaaatggcatgacaagctgcagcaaatggcagctgtaaaaacaagcaacaaaaaacagaaggtagccaaagatttgagtccgggattagttgatcttactactcaagttgggaatgaagtttctcctgtacagattgtccctccaaatatagctgcaccagaaagaccaatgggtaagaagaggtcaaaagaagcaatgtgtaaagggggttttgatgcatgttctgatgcattggacattttgtgggaaaagaagagacaggctgatgtagagaaggagttaaagagagaggagaggtatgcacaagcatatgctctagataaagagaggcttgagctggaacacaagaggcttacaattgaagaacagaagcatacaaatgaacaaaaaaggcttgatcaagagaaagagcgcctagccaatgaagcaaacaacctttacattaagcggattgaagaagaacagaaaattatgagtatagaccttactactatgagtgaattgcaaagacaatactatatgtgtttgcaggctgatatcgttgcacgtcgcatgaattagttgtttttttcaaattttggtcagatcacagatgcgactttagattattttgtttcattagttgtttttttcttcaaattttggtcagatcatagatgctactttagattattttgtttcactgagtacacatagagatgaacaatctatggatttttagttgcatgtgctactcttatatactgttttccgtttagttttatgtgcatctgtggatttttgtactgaataatatgactggtctgttccaacatgaggtaaaagtctagacaatgattgatacacttag

SEQ ID NO: 16906 - DNA, 2148 bp, Zea Mays
aaggccccacacgtcagcgtcaagggtcggagcctataaagaggctcgagagagacgagcaagcaggcaagctcactcaaggacaaaaaaaaaaaaacagagcgcagcattggaggcgaggaagagctgtcggccggagatggacaagtactgggaggagacgcagcgctacctggagtacgaggagctcagcatctacttggaggcgcaggaggacgccatgtcttgctacgactccagctcgccggacggctccatctcccactcgtcgtcgtcggcggcggcgtgcggcaacaagaacatcctgatggagcgcgaccgccgccgcaagctcaacgacaagctctacgcgctccgcagcgtcgtgccgaacatcaccaagatggacaaggcgtcgatcatcaaggacgccatcgagtacatccagcagctgcaggtggaggagcggcgggtgctgcaggagctgcgcgtgctcgacgacgacaccgccgccgccgccaccgcgcaggtggagtgctgcgacgtcgacgggggcctgctgcgacgggaagccgagcgcgcgaagaagatgaagcgcgcgcagtccgtcgccagcggcgcgcagtctgctccgcctccgcccccgccgccgcacgtcgaggtgctggagctgcgcgtgtcggaggtgggcgaccacgtgctggtggtcagcgtgacgtgccgcaagcgacgcgacgccatggccagggtgtgccgcgccatcgaggacctccggctccgtgtcatcactgccaacgtcacctccgtcgccggctgccacgtgcacaccgtcttcgtcgaggtacgtcgccggtggcatggcatttggcatcacatgggatcgggatactctgtttttttttctccttttttcatccttgacgatggatatgactgacatgacatgggcgtcgtgctgatgtcacgggccggccgaatacgtgttgacactgacgctgacttttaccacggcaacacccactgttcactacgccttttcgtttccggttttcagtgtggaaatggaaatctggatagtcacgtgctcgatcagtcgatcggatccccacattcacatggcgtactgtagtagtactagcaaccactttttgcctttttttggtgattcagacttgatgaaaatgaaacagattaagcgcgtgggggaggacatttgtaagaaatggacttagcggctgtttgtttaagatcataatttaacttagggctagtttggtaactctatttttttaaaggatttctatttttctaagtaaaaataaactaatttttcttggaaaaattaaaaattttgggaaaatggggttgccaaactagcccttattttgagctaagtgtcggtttgtttgagattatataatctctataggttatataatctaacttattttaatctagcacttaattcaaaataagttatattatataatctggacatattagaatcctgaacaaacaaactctaagcgtaagttaaaaataagttataaactacataatctaagcaattataaactcaaacaaacaagcatcatagggaactcaaaaccccaagttatcctcaatgggttttgtagtttcattttttcgacgtaacaaaaaaaagcaacaaattaaaactcactatggttagacagaaacatcatcttgaatacggtatggacgcttactctcaatgcactgtctgtatattcaggtagataaaatcgaccacatccaagtgaagaacatgattgaggctgctctcacgttgctcgacgcccccggaagcccccacagctcgatgagctattacgagacctaactatgttgagcaatgcttttcggacgtctactaggtcaacaactcagtccacaattaaccagaaaggagtatgtcgtgttttgctacaatgtgcttgttgtgttttttttcaacatcacccctaagagatgatggttgtttcctctaagatgcagctagtgtaccaagcaatgtttggacttcgtgtcatacatcaccacgagagtgacatgtatttgtgtactataacatgtatatgctaaagaaaataacaaggggacttgtctttcgaatgaagagctatcaaatatgctatgataatataa

SEQ ID NO: 16907 - DNA, 1449 bp, Zea Mays
ctggaacctattccccactccgtcgcgcactcgcgcctcctcaacttcgtctgcccgcgagccgggaaacatttccctcagatccaccggccctggagctcccgccgctccactgtaagacccgcccttgcctccgcgaaatcctgcgacatcacagacgagccgggggtggtggtgggggtgggggagcggaggtaggtcgcagcagccatggcggccgcagaggagaacagctcgctgttcctgattttcgtcctcaccatgatcgcgctgcccctcgtgccctacacgatcctgcgcctgtgtcgcgctgcctccgagaaggtcaagaccatccactgccgctgttcgggttgccaccgctccgatatccaacttgtccacgtgcagtaacctaacaatccttctgctctggattgttatgatattgctggtttactacataaagcatgttagccgcgaggtccaagtttttgagcctttcagtattcttggactggaatctggggcatctgaatctgatatcaagaaatcatataggaggctttctattcagtaccatcctgataaaaatcctgatccagaggctcataagtactttgttgaatatatatccaaggcatatcaagcattaactgatcctatatctcgagagaattatgaaaaatatggtcaccctgatgggcggcaggggttgcaaatgggcattgctttgcccaagttcttactaaatattgatggtgcatctggtgggataatgcttcttggaatagtcggattttgtatattattgcctttgatgatagctgttatttatttgtcaagatcgtcaaaatatactggaaactatgtcatgcatcaaactctgtccacttactactactttatgaagccatctcttgctccaagcaaagttatggatgtcttcatcaaggctgcagaatatatggagatgccagttcgacgcagtgatgatgaaccccttcaaaaattgtttgtagctgttagaagtgagttaaatctggacttaaagaacattaagacagaacaagcaaagttctggaagcagcatccatccctagtaaagatggaactgctgattcaggcacatctcactcgtgagtcatttgctttgaccccagcacttcttaaagattacagacacatgcttgaacttgcacctcgtcttttggaagaactcgttaagaggaaaatgcagaagtcttcaagaaaggaccataaaagagggcacttgtaaggaagaagataacacaaacaacatgtgcgagaagatggcagcctgcattctgaaggtgtcctcaaaggtgtgtggagtaactaaagggagtggagattgagctaaagatacttgttgtggaatgaggaagtccaaagggctattaaggagaagaaagaatgctatagacgtctgtacatgacagaagtgtg

SEQ ID NO: 16908 - DNA, 2260 bp, Zea Mays
ttgagccatgtccctcttgtcgcggcacgcgcgtcaccccactacgccgccgcccgcctctttctccggcggcgttgagaccccacctcgtcgccgcgtccccaaagagaacgttgacccctcctccccggcgcgcaaccaccactctgccctcgaccacggcgcctcccccttccgctccccgtcctccgcggccaagccgctctccgcccgcaaccgcttgccaccgcgtccgccgtcctctaatccactaaagaggaagctcgaagtctcccctgcagcggccgcggtgggctccgcgcacgatgccgcacccgggctcgactccggcgtccaggtggtggtgaggatacggccgtcgtgctgggtcgatgaagaggaggcaggcgaggatgggaggggaccggaggcctgcgtgcgcaagacggcggccaactcggttgcgatccaggggcaggacttcacgtttgatgctgtcgctgactcggtctccacgcaggaggatatcttcacccttgttgggctgccacttgttgaaaattgcttatcaggtttcaacagctccatatttgcctatggacagactggcagtgggaaaacctacactatgtgggggcctctatctgcattgtcagaagattcattgagcagcgagaggggcttaacacctcgtgtatttgagcagttgttctcccgcattaacgaagaacaagttaaacatgctgacaaagagcttacttacaattgtatctgctcgtttctcgagatctacaatgaacagataactgatttgctagatccctcgcagaagaatcttcaggttagagaggatgtcagaactgcctgtgtttatgttgaatcattgacaaaggagttggttttcaccttgaaggatgtaactcagttgttggttaagggcctggcaaaccggaggactggggcaacgagcgcaaatgctgatagctcacgctcgcattgtgtttttacgtgtgtcattaagatggattctaagaatccagaggatggctcaagcatcacaagatcaagtaggataaacttggtagaccttgctggatcagagcgacaaaaactaacacatgcagctggggatcgactgaaagaagctggaaacataaaccgttcactttcacagctcggaaatatcgcagtctggaaaacaaaggcaccatgttccatatcgtgattccaagcttacatttctattacaagaatcccttggaggcaatgccaaactggcaatgatttgtgctgtttcaccgtcccaaagctgtaagagtgaaacgttaagcacacttaggtttgctcaacgtgcgaaagctataaaaaacaatgccgtagttaatgaagagaaaattgaagatgtaaatgcgttgcgtgagcaaatcaggcaattgaaggatgaacttcaccgaatgaaatctaatggaggcatagaagggaacagcggcagctttgccactggatggaaccctaggcgcagtttgcatctgttgaaaatgagtttgggtcatcctacaacattccaatgtataaaagaagatagtgacgaggaaatggaaattgatgagaatgatgttgagaagccctacaatcatgaaaatatggcaatgtcttctattaatgttaaagaatccaaacgtttccaagcttcaatgaatgtaagtgctggaacttcacaggttgaagatcttgacagggataagattttgatatccataaaaaggtcctgctgtagtgctaataaatttaatactggtactgatgttggagatggaaaatgcaaattaaacattgccgccagtatacagaggggacttcaagtcattgaaagtcaccaaaataatagtgcatggaagagagcatcggttggattaaatgctagaatcatggatattcaaccttgcaaggttgatgttgcaattcagactgatcctgaagaatacgaaactagagataaccctctagctctggttcctagttgtctgcttgaagcttctgcaaatgagagtagggatcccagtacttgcagggacctacaactagtaccagttgatgtgacagtaccatctgatgaccaaaagcagcgacattttctgaaagctgtggagaaggtcttggctggagctatcaggcgagagatggctcgtgatgaacagtgtgcaaagcaagctgcagaaattcaacaactgaatcgtctggtgcaacagtacaagcatgaacgcgaatgtaatgctgtaat

SEQ ID NO: 16909 - DNA, 2249 bp, Zea Mays
ttgagccatgtccctcttgtcgcggcacgcgcgtcaccccactacgccgccgcccgcctctttctccggcggcgttgagaccccacctcgtcgccgcgtccccaaagagaacgttgacccctcctccccggcgcgcaaccaccactctgccctcgaccacggcgcctcccccttccgctccccgtcctccgcggccaagccgctctccgcccgcaaccgcttgccaccgcgtccgccgtcctctaatccactaaagaggaagctcgaagtctcccctgcagcggccgcggtgggctccgcgcacgatgccgcacccgggctcgactccggcgtccaggtggtggtgaggatacggccgtcgtgctgggtcgatgaagaggaggcaggcgaggatgggaggggaccggaggcctgcgtgcgcaagacggcggccaactcggttgcgatccaggggcaggacttcacgtttgatgctgtcgctgactcggtctccacgcaggaggatatcttcacccttgttgggctgccacttgttgaaaattgcttatcaggtttcaacagctccatatttgcctatggacagactggcagtgggaaaacctacactatgtgggggcctctatctgcattgtcagaagattcattgagcagcgagaggggcttaacacctcgtgtatttgagcagttgttctcccgcattaacgaagaacaagttaaacatgctgacaaagagcttacttacaattgtatctgctcgtttctcgagatctacaatgaacagataactgatttgctagatccctcgcagaagaatcttcaggttagagaggatgtcagaactgcctgtgtttatgttgaatcattgacaaaggagttggttttcaccttgaaggatgtaactcagttgttggttaagggcctggcaaaccggaggactggggcaacgagcgcaaatgctgatagctcacgctcgcattgtgtttttacgtgtgtcattaagatggattctaagaatccagaggatggctcaagcatcacaagatcaagtaggataaacttggtagaccttgctggatcagagcgacaaaaactaacacatgcagctggggatcgactgaaagaagctggaaacataaaccgttcactttcacagctcggtctggaaaacaaaggcaccatgttccatatcgtgattccaagcttacatttctattacaagaatcccttggaggcaatgccaaactggcaatgatttgtgctgtttcaccgtcccaaagctgtaagagtgaaacgttaagcacacttaggtttgctcaacgtgcgaaagctataaaaaacaatgccgtagttaatgaagagaaaattgaagatgtaaatgcgttgcgtgagcaaatcaggcaattgaaggatgaacttcaccgaatgaaatctaatggaggcatagaagggaacagcggcagctttgccactggatggaaccctaggcgcagtttgcatctgttgaaaatgagtttgggtcatcctacaacattccaatgtataaaagaagatagtgacgaggaaatggaaattgatgagaatgatgttgagaagccctacaatcatgaaaatatggcaatgtcttctattaatgttaaagaatccaaacgtttccaagcttcaatgaatgtaagtgctggaacttcacaggttgaagatcttgacagggataagattttgatatccataaaaaggtcctgctgtagtgctaataaatttaatactggtactgatgttggagatggaaaatgcaaattaaacattgccgccagtatacagaggggacttcaagtcattgaaagtcaccaaaataatagtgcatggaagagagcatcggttggattaaatgctagaatcatggatattcaaccttgcaaggttgatgttgcaattcagactgatcctgaagaatacgaaactagagataaccctctagctctggttcctagttgtctgcttgaagcttctgcaaatgagagtagggatcccagtacttgcagggacctacaactagtaccagttgatgtgacagtaccatctgatgaccaaaagcagcgacattttctgaaagctgtggagaaggtcttggctggagctatcaggcgagagatggctcgtgatgaacagtgtgcaaagcaagctgcagaaattcaacaactgaatcgtctggtgcaacagtacaagcatgaacgcgaatgtaatgctgtaat

SEQ ID NO: 16910 - DNA, 2275 bp, Zea Mays
ttgagccatgtccctcttgtcgcggcacgcgcgtcaccccactacgccgccgcccgcctctttctccggcggcgttgagaccccacctcgtcgccgcgtccccaaagagaacgttgacccctcctccccggcgcgcaaccaccactctgccctcgaccacggcgcctcccccttccgctccccgtcctccgcggccaagccgctctccgcccgcaaccgcttgccaccgcgtccgccgtcctctaatccactaaagaggaagctcgaagtctcccctgcagcggccgcggtgggctccgcgcacgatgccgcacccgggctcgactccggcgtccaggtggtggtgaggatacggccgtcgtgctgggtcgatgaagaggaggcaggcgaggatgggaggggaccggaggcctgcgtgcgcaagacggcggccaactcggttgcgatccaggggcaggacttcacgtttgatgctgtcgctgactcggtctccacgcaggaggatatcttcacccttgttgggctgccacttgttgaaaattgcttatcaggtttcaacagctccatatttgcctatggacagtgggaaaacctacactatgtgggggcctctatctgcattgtcagaagattcattgagcagcgagaggggcttaacacctcgtgtatttgagcagttgttctcccgcattaacgaagaacaagttaaacatgctgacaaagagcttacttacaattgtatctgctcgtttctcgagatctacaatgaacagataactgatttgctagatccctcgcagaagaatcttcaggttagagaggatgtcagaactgcctgtgtttatgttgaatcattgacaaaggagttggttttcaccttgaaggatgtaactcagttgttggttaagggcctggcaaaccggaggactggggcaacgagcgcaaatgctgatagctcacgctcgcattgtgtttttacgtgtgtcattaagatggattctaagaatccagaggatggctcaagcatcacaagatcaagtaggataaacttggtagaccttgctggatcagagcgacaaaaactaacacatgcagctggggatcgactgaaagaagctggaaacataaaccgttcactttcacagctcggaaacttgattaatatacttgcagaaatatcgcagtctggaaaacaaaggcaccatgttccatatcgtgattccaagcttacatttctattacaagaatcccttggaggcaatgccaaactggcaatgatttgtgctgtttcaccgtcccaaagctgtaagagtgaaacgttaagcacacttaggtttgctcaacgtgcgaaagctataaaaaacaatgccgtagttaatgaagagaaaattgaagatgtaaatgcgttgcgtgagcaaatcaggcaattgaaggatgaacttcaccgaatgaaatctaatggaggcatagaagggaacagcggcagctttgccactggatggaaccctaggcgcagtttgcatctgttgaaaatgagtttgggtcatcctacaacattccaatgtataaaagaagatagtgacgaggaaatggaaattgatgagaatgatgttgagaagccctacaatcatgaaaatatggcaatgtcttctattaatgttaaagaatccaaacgtttccaagcttcaatgaatgtaagtgctggaacttcacaggttgaagatcttgacagggataagattttgatatccataaaaaggtcctgctgtagtgctaataaatttaatactggtactgatgttggagatggaaaatgcaaattaaacattgccgccagtatacagaggggacttcaagtcattgaaagtcaccaaaataatagtgcatggaagagagcatcggttggattaaatgctagaatcatggatattcaaccttgcaaggttgatgttgcaattcagactgatcctgaagaatacgaaactagagataaccctctagctctggttcctagttgtctgcttgaagcttctgcaaatgagagtagggatcccagtacttgcagggacctacaactagtaccagttgatgtgacagtaccatctgatgaccaaaagcagcgacattttctgaaagctgtggagaaggtcttggctggagctatcaggcgagagatggctcgtgatgaacagtgtgcaaagcaagctgcagaaattcaacaactgaatcgtctggtgcaacagtacaagcatgaacgcgaatgtaatgctgtaat

SEQ ID NO: 16911 - DNA, 2224 bp, Zea Mays
ccgcagccagccattgagccatgtccctcttgtcgcggcacgcgcgtcaccccactacgccgccgcccgcctctttctccggcggcgttgagaccccacctcgtcgccgcgtccccaaagagaacgttgacccctcctccccggcgcgcaaccaccactctgccctcgaccacggcgcctcccccttccgctccccgtcctccgcggccaagccgctctccgcccgcaaccgcttgccaccgcgtccgccgtcctctaatccactaaagaggaagctcgaagtctcccctgcagcggccgcggtgggctccgcgcacgatgccgcacccgggctcgactccggcgtccaggtggtggtgaggatacggccgtcgtgctgggtcgatgaagaggaggcaggcgaggatgggaggggaccggaggcctgcgtgcgcaagacggcggccaactcggttgcgatccaggggcaggacttcacgtttgatgctgtcgctgactcggtctccacgcaggaggatatcttcacccttgttgggctgccacttgttgaaaattgcttatcaggtttcaacagctccatatttgcctatggacagactggcagtgggaaaacctacactatgtgggggcctctatctgcattgtcagaagattcattgagcagcgagaggggcttaacacctcgtgtatttgagcagttgttctcccgcattaacgaagaacaagttaaacatgctgacaaagagcttacttacaattgtatctgctcgtttctcgagatctacaatgaacagataactgatttgctagatccctcgcagaagaatcttcaggatgtaactcagttgttggttaagggcctggcaaaccggaggactggggcaacgagcgcaaatgctgatagctcacgctcgcattgtgtttttacgtgtgtcattaagatggattctaagaatccagaggatggctcaagcatcacaagatcaagtaggataaacttggtagaccttgctggatcagagcgacaaaaactaacacatgcagctggggatcgactgaaagaagctggaaacataaaccgttcactttcacagctcggaaacttgattaatatacttgcagaaatatcgcagtctggaaaacaaaggcaccatgttccatatcgtgattccaagcttacatttctattacaagaatcccttggaggcaatgccaaactggcaatgatttgtgctgtttcaccgtcccaaagctgtaagagtgaaacgttaagcacacttaggtttgctcaacgtgcgaaagctataaaaaacaatgccgtagttaatgaagagaaaattgaagatgtaaatgcgttgcgtgagcaaatcaggcaattgaaggatgaacttcaccgaatgaaatctaatggaggcatagaagggaacagcggcagctttgccactggatggaaccctaggcgcagtttgcatctgttgaaaatgagtttgggtcatcctacaacattccaatgtataaaagaagatagtgacgaggaaatggaaattgatgagaatgatgttgagaagccctacaatcatgaaaatatggcaatgtcttctattaatgttaaagaatccaaacgtttccaagcttcaatgaatgtaagtgctggaacttcacaggttgaagatcttgacagggataagattttgatatccataaaaaggtcctgctgtagtgctaataaatttaatactggtactgatgttggagatggaaaatgcaaattaaacattgccgccagtatacagaggggacttcaagtcattgaaagtcaccaaaataatagtgcatggaagagagcatcggttggattaaatgctagaatcatggatattcaaccttgcaaggttgatgttgcaattcagactgatcctgaagaatacgaaactagagataaccctctagctctggttcctagttgtctgcttgaagcttctgcaaatgagagtagggatcccagtacttgcagggacctacaactagtaccagttgatgtgacagtaccatctgatgaccaaaagcagcgacattttctgaaagctgtggagaaggtcttggctggagctatcaggcgagagatggctcgtgatgaacagtgtgcaaagcaagctgcagaaattcaacaactgaatcgtctggtgcaacagtacaagcatgaacgcgaatgtaatgctgtaat

SEQ ID NO: 16912 - DNA, 2317 bp, Zea Mays
ctcgttctccccaagcggcctccgcagccagccattgagccatgtccctcttgtcgcggcacgcgcgtcaccccactacgccgccgcccgcctctttctccggcggcgttgagaccccacctcgtcgccgcgtccccaaagagaacgttgacccctcctccccggcgcgcaaccaccactctgccctcgaccacggcgcctcccccttccgctccccgtcctccgcggccaagccgctctccgcccgcaaccgcttgccaccgcgtccgccgtcctctaatccactaaagaggaagctcgaagtctcccctgcagcggccgcggtgggctccgcgcacgatgccgcacccgggctcgactccggcgtccaggtggtggtgaggatacggccgtcgtgctgggtcgatgaagaggaggcaggcgaggatgggaggggaccggaggcctgcgtgcgcaagacggcggccaactcggttgcgatccaggggcaggacttcacgtttgatgctgtcgctgactcggtctccacgcaggaggatatcttcacccttgttgggctgccacttgttgaaaattgcttatcaggtttcaacagctccatatttgcctatggacagactggcagtgggaaaacctacactatgtgggggcctctatctgcattgtcagaagattcattgagcagcgagaggggcttaacacctcgtgtatttgagcagttgttctcccgcattaacgaagaacaagttaaacatgctgacaaagagcttacttacaattgtatctgctcgtttctcgagatctacaatgaacagataactgatttgctagatccctcgcagaagaatcttcaggttagagaggatgtcagaactgcctgtgtttatgttgaatcattgacaaaggagttggttttcaccttgaaggatgtaactcagttgttggttaagggcctggcaaaccggaggactggggcaacgagcgcaaatgctgatagctcacgctcgcattgtgtttttacgtgtgtcattaagatggattctaagaatccagaggatggctcaagcatcacaagatcaagtaggataaacttggtagaccttgctggatcagagcgacaaaaactaacacatgcagctggggatcgactgaaagaagctggaaacataaaccgttcactttcacagctcggaaacttgattaatatacttgcagaaatatcgcagtctggaaaacaaaggcaccatgttccatatcgtgattccaagcttacatttctattacaagaatcccttggaggcaatgccaaactggcaatgatttgtgctgtttcaccgtcccaaagctgtaagagtgaaacgttaagcacacttaggtttgctcaacgtgcgaaagctataaaaaacaatgccgtagttaatgaagagaaaattgaagatgtaaatgcgttgcgtgagcaaatcaggcaattgaaggatgaacttcaccgaatgaaatctaatggaggcatagaagggaacagcggcagctttgccactggatggaaccctaggcgcagtttgcatctgttgaaaatgagtttgggtcatcctacaacattccaatgtataaaagaagatagtgacgaggaaatggaaattgatgagaatgatgttgagaagccctacaatcatgaaaatatggcaatgtcttctattaatgttaaagaatccaaacgtttccaagcttcaatgaatgtaagtgctggaacttcacaggttgaagatcttgacagggataagattttgatatccataaaaaggtcctgctgtagtgctaataaatttaatactggtactgatgttggagatggaaaatgcaaattaaacattgccgccagtatacagaggggacttcaagtcattgaaagtcaccaaaataatagtgcatggaagagagcatcggttggattaaatgctagaatcatggatattcaaccttgcaaggttgatgttgcaattcagactgatcctgaagaatacgaaactagagataaccctctagctctggttcctagttgtctgcttgaagcttctgcaaatgagagtagggatcccagtacttgcagggacctacaactagtaccagttgatgtgacagtaccatctgatgaccaaaagcagcgacattttctgaaagctgtggagaaggtcttggctggagctatcaggcgagagatggctcgtgatgaacagtgtgcaaagcaagctgcagaaattcaacaactgaatcgtctggtgcaacagtacaagcatgaacgcgaatgtaatgctgtaat

SEQ ID NO: 16913 - DNA, 2308 bp, Zea Mays
ctcgttctccccaagcggcctccgcagccagccattgagccatgtccctcttgtcgcggcacgcgcgtcaccccactacgccgccgcccgcctctttctccggcggcgttgagaccccacctcgtcgccgcgtccccaaagagaacgttgacccctcctccccggcgcgcaaccaccactctgccctcgaccacggcgcctcccccttccgctccccgtcctccgcggccaagccgctctccgcccgcaaccgcttgccaccgcgtccgccgtcctctaatccactaaagaggaagctcgaagtctcccctgcagcggccgcggtgggctccgcgcacgatgccgcacccgggctcgactccggcgtccaggtggtggtgaggatacggccgtcgtgctgggtcgatgaagaggaggcaggcgaggatgggaggggaccggaggcctgcgtgcgcaagacggcggccaactcggttgcgatccaggggcaggacttcacgtttgatgctgtcgctgactcggtctccacgcaggaggatatcttcacccttgttgggctgccacttgttgaaaattgcttatcaggtttcaacagctccatatttgcctatggacagactggcagtgggaaaacctacactatgtgggggcctctatctgcattgtcagaagattcattgagcagcgagaggggcttaacacctcgtgtatttgagcagttgttctcccgcattaacgaagaacaagttaaacatgctgacaaagagcttacttacaattgtatctgctcgtttctcgagatctacaatgaacagataactgatttgctagatccctcgcagaagaatcttcaggttagagaggatgtcagaactgcctgtgtttatgttgaatcattgacaaaggagttggttttcaccttgaaggatgtaactcagttgttggttaagggcctggcaaaccggaggactggggcaacgagcgcaaatgctgatagctcacgctcgcattgtgtttttacgtgtgtcattaagatggattctaagaatccagaggatggctcaagcatcacaagatcaagtaggataaacttggtagaccttgctggatcagagcgacaaaaactaacacatgcagctggggatcgactgaaagaagctggaaacataaaccgttcactttcacagctcggaaacttgattaatatacttgcagaaatatcgcagtctggaaaacaaaggcaccatgttccatatcgtgattccaagcttacatttctattacaagaatcccttggaggcaatgccaaactggcaatgatttgtgctgtttcaccgtcccaaagctgtaagagtgaaacgttaagcacacttaggtttgctcaacgtgcgaaagctataaaaaacaatgccgtagttaatgaagagaaaattgaagatgtaaatgcgttgcgtgagcaaatcaggcaattgaaggatgaacttcaccgaatgaaatctaatggaggcatagaagggaacagcggcagctttgccactggatggaaccctaggcgcagtttgcatctgttgaaaatgagtttgggtcatcctacaacattccaatgtataaaagaagatagtgacgaggaaatggaaattgatgagaatgatgttgagaagccctacaatcatgaaaatatggcaatgtcttctattaatgttaaagaatccaaacgtttccaagcttcaatgaatgtaagtgctggaacttcacaggttgaagatcttgacagggataagattttgatatccataaaaaggtcctgctgtagtgctaataaatttaatactggtactgatgttggagatggaaaatgcaaattaaacattgccgccagtatacagaggggacttcaagtcattgaaagtcaccaaaataatagtgcatggaagagagcatcggttggattaaatgctagaatcatggatattcaaccttgcaaggttgatgttgcaattcagactgatcctgaagaatacgaaactagagataaccctctagctctggttcctagttgtctgcttgaagcttctgcaaatgagagtagggatcccagtacttgcagggacctacaactagtaccagttgatgtgacagtaccatctgatgaccaaaagcagcgacattttctgaaagctgtggagaaggtcttggctggagctatcaggcgagagatggctcgtgatgaacagtgtgcaaagcaagctgcagaaattcaacaactgaatcgtctgtacaagcatgaacgcgaatgtaatgctgtaat

SEQ ID NO: 16914 - DNA, 1855 bp, Zea Mays
ctcagatgaagaggaaaactctatcccaagaaaataatgaagaggtccaagatcagacatgagaaacagacggaggacaacaaatacagagatatcttgaagcagtagaaatgtattctcagttgggattgcgaaccttatgtttggggtggcgtgatttaaaagaaaatgaatataaggaatggtccaaaaactttcaaaaggctagctgctcattggacaatagagagtttaaaattgctgaagtttgtaatagcttagagcaagaccttcaaattcttggtgttactgctatagaggatcgtcttcaggatggtgttcctgaaaccattaaattgttgaggaatgctggaattaatgtgtggatgctaaccggtgataagcaaaatacagcaattcagattggacttctctgtaacctcataacttctgggtcttgcatttgttttggatggttgggcacttgaattaattttgaagcattccaaggagtcttttactaggttggcgatgctgtcaaaaacagcaatatgctgtcgaatgacacctttgcagaaagcacagcttgttgctatcctaaaatccgttggctacctaactctagcaattggtgatggtggtaatgatgttagaatgattcaagaggctaacattggagtagggattagtggtagggaaggactgcaagctgcaagagctgctgattatagcattgggaagttcaagtttcttaagagattgatacttattcatgggcgttattcatacaatcgaacagcatttatttcacagtactccttctacaagtcacttcttatgtgctttattcagattctgtttgcctttttgtcggggctatctgggactagcttattcaactcaattagcttgatggcttataacgttttctatacaagtttacccgtcatgactataatctttgacaaggatatctctgaaacaacggttatgcagtacccccagattttactgcattctcaagctgggaggcttttaaatctcactacattttgcggatggtttgggcgctcgctatatcacgcactcgtcgttttcttcattacgatatgcgcctactcagatgagaaaagtgagatgcaggaactgtcaatggtagcactgtccggttgcatttggttacaggcttttgttgtgacaatggatacaaactcattcacttgcccgcaaatccttctcatctggggaaactttgtggccttctacatgatcaacttaatactcagtaccgtcccaagtctccaactgtacacaatcacgttccgcctgtgtagccaaccttcctactggatctccatggctctgacggttgcagtaggaatgggaccggtggtggctttcaggtacttgaagaacctgtatcagcctagcgccgttaacatactccagcaggtcgagcagcgcaatggatctatcagaacttctgggaatctggagtcggcgggagccaatctcactaatctactgactggctcacgtaaaaacagggattctaattatcgccctctgctttcagagtctgcggagtctgtaagtgcaagcggcagctaagaattgtctaggctttccgtactagcatgacagtcatacactcatacagacggcagaacagtgaactgtaacagaatcatgcttgtactaaaaaatatttcgtcggggtcaaagccaataattgttttgttggcctaaatttgatcatttttctcagtctgcgctgtggcaccgtctgtgctgtccgctgtcgcacgtagggatggtaataggatctaaattttacgctataaaatttaattatcaaatcatattaggatttaat

SEQ ID NO: 16915 - DNA, 2560 bp, Zea Mays
aaggcacataccgaagagaaacaacaccatcccgtacctgtgctcgtgtataatgagcatcagcaccaatatgcttggtaggctcatgcttcaccggatcacgagcaatactaatagtacctgtactgtcagacaaaagaggagtcggtatgcaaatagagacaacaaaatcctcaagcaaccaccgcaaccaagtaacctccgtagtcataagagccatagcacacaactctgcgtcttcactcgaacgagaaaccgctacctgtttcttagtcttccaagcaatgagggaaccaggaaccaccaagaaaaacacaataggcagaaagagaacgacgaccagaggaatcaatagcccaagtagcatcacaatacgcttggagctgtaaagagttgcatcgtggaaagaacaaacgacgagatatagttccatgaagataatgcagaacccgaagcaagtgattatagtgaagctgagtggggcggaaacaaactgaccgagaatatgtacagaatatgaggtatcatgacgaatcacaccaaggtaaacaagactcaacaatgtgacgataacaagtaggatcctcaagaggcttaccatccgtggcacgaagatgaacattgagttctataggagtttcaattgtccgctgatcagtaagagaggcccgatcaaaaagatccagaatgtacttctcttgacaacgtgacgataacaagtaggatcctcaagaggctttccatccatggcacgaagatgaacattgagttccataggagtttcaattgtccgctgatcagtaagagaggcccgatcaagaagatccagaatgtacttctcttgagacagataaagcccctcagatgaagaggaaaactctatcccaagaaaataatgaagaggtccaagatcagacatgagaaacagacggaggacaacaaatacagagatatcttgaagcagtagaaatgtattctcagttgggattgcgaaccttatgtttggggtggcgtgatttaaaagaaaatgaatataaggaatggtccaaaaactttcaaaaggctagctgctcattggacaatagagagtttaaaattgctgaagtttgtaatagcttagagcaagaccttcaaattcttggtgttactgctatagaggatcgtcttcaggatggtgttcctgaaaccattaaattgttgaggaatgctggaattaatgtgtggatgctaaccggtgataagcaaaatacagcaattcagattggacttctctgtaacctcataacttctgggtcttgcatttgttttggatggttgggcacttgaattaattttgaagcattccaaggagtcttttactaggttggcgatgctgtcaaaaacagcaatatgctgtcgaatgacacctttgcagaaagcacagagttcaagtttcttaagagattgatacttattcatgggcgttattcatacaatcgaacagcatttatttcacagtactccttctacaagtcacttcttatgtgctttattcagattctgtttgcctttttgtcggggctatctgggactagcttattcaactcaattagcttgatggcttataacgttttctatacaagtttacccgtcatgactataatctttgacaaggatatctctgaaacaacggttatgcagtacccccagattttactgcattctcaagctgggaggcttttaaatctcactacattttgcggatggtttgggcgctcgctatatcacgcactcgtcgttttcttcattacgatatgcgcctactcagatgagaaaagtgagatgcaggaactgtcaatggtagcactgtccggttgcatttggttacaggcttttgttgtgacaatggatacaaactcattcacttgcccgcaaatccttctcatctggggaaactttgtggccttctacatgatcaacttaatactcagtaccgtcccaagtctccaactgtacacaatcacgttccgcctgtgtagccaaccttcctactggatctccatggctctgacggttgcagtaggaatgggaccggtggtggctttcaggtacttgaagaacctgtatcagcctagcgccgttaacatactccagcaggtcgagcagcgcaatggatctatcagaacttctgggaatctggagtcggcgggagccaatctcactaatctactgactggctcacgtaaaaacagggattctaattatcgccctctgctttcagagtctgcggagtctgtaagtgcaagcggcagctaagaattgtctaggctttccgtactagcatgacagtcatacactcatacagacggcagaacagtgaactgtaacagaatcatgcttgtactaaaaaatatttcgtcggggtcaaagccaataattgttttgttggcctaaatttgatcatttttctcagtctgcgctgtggcaccgtctgtgctgtccgctgtcgcacgtagggatggtaataggatctaaattttacgctataaaatttaattatcaaatcatattaggatttaat

SEQ ID NO: 16916 - DNA, 2860 bp, Zea Mays
cagatactgttattaataattttctatacttatttgatctctgattttaaaatatttttttataattggttgtaggttactcttgatttggctaaaggtttgtatgcaaagtttattgactgggatgagcaaatgtttgattgggaaacaaatacacctgctcattcagctaacacagctattagcgaggacctcggacagattgaatatattttgagtgacaaaactgggacactcacagagaataaaatgatcttcaaacaatgctgcataagtgatactttgtatggaaatgacaacggagatgcattaaacgatgtcagacttgtaaatgcggtctcaagtaatgatcctgatgtcatcaaatttctgttggttatggctctttgcaatacagtggtccctatcaaaagcaatgatggtactgtgtcatacaaagcacaatcccaagatgaggaagctttagttaacgctgcagcaaagctgaatatgatgctcatcagtaaagacaccattacagctgagatttgtttcaatgggtctaagttttggtatgagttgttggacattttggaattcacttctgatcgcaaaagaatgtctgtagtggtaaaggaaggggagactggtaagatccttcttttatcaaaaggtgctgatgaagctctcctgcctcgtgcctgtccaggacaacaaatacagagatatcttgaagcagtagaaatgtattctcagttgggattgcgaaccttatgtttggggtggcgtgatttaaaagaaaatgaatataaggaatggtccaaaaactttcaaaaggctagctgctcattggacaatagagagtttaaaattgctgaagtttgtaatagcttagagcaagaccttcaaattcttggtgttactgctatagaggatcgtcttcaggatggtgttcctgaaaccattaaattgttgaggaatgctggaattaatgtgtggatgctaaccggtgataagcaaaatacagcaattcagattggacttctctgtaacctcataacttctgggcccaatagtcaattgttatctatcagtgggaaaactgaagaggacgtgctaagaagcctagagagggcattatttattatgaaaaatacatctgaaacaaagggtcttgcatttgttttggatggttgggcacttgaattaattttgaagcattccaaggagtcttttactaggttggcgatgctgtcaaaaacagcaatatgctgtcgaatgacacctttgcagaaagcacagcttgttgctatcctaaaatccgttggctacctaactctagcaattggtgatggtggtaatgatgttagaatgattcaagaggctaacattggagtagggattagtggtagggaaggactgcaagctgcaagagctgctgattatagcattgggagtaagcatacttctagttggcacaaataaattctatttacttccaaatatccataaacctgatctaatggttttgctagctggtacagaaatagcatattaaccagcttcaaacaagtgcagacttcttttttgttcattagtaatttcaatcttgcttatccatccaaaaagggtaccatttgcaaggttaaattggttgcggttatcctgttattttattaccctttttgcacttcacctccaaatttcaatatacttattatgtattattcctttttttttgcagagttcaagtttcttaagagattgatacttattcatgggcgttattcatacaatcgaacagcatttatttcacagtactccttctacaagtcacttcttatgtgctttattcagattctgtttgcctttttgtcggggctatctgggactagcttattcaactcaattagcttgatggcttataacgttttctatacaagtttacccgtcatgactataatctttgacaaggatatctctgaaacaacggttatgcagtacccccagattttactgcattctcaagctgggaggcttttaaatctcactacattttgcggatggtttgggcgctcgctatatcacgcactcgtcgttttcttcattacgatatgcgcctactcagatgagaaaagtgagatgcaggaactgtcaatggtagcactgtccggttgcatttggttacaggcttttgttgtgacaatggatacaaactcattcacttgcccgcaaatccttctcatctggggaaactttgtggccttctacatgatcaacttaatactcagtaccgtcccaagtctccaactgtacacaatcacgttccgcctgtgtagccaaccttcctactggatctccatggctctgacggttgcagtaggaatgggaccggtggtggctttcaggtacttgaagaacctgtatcagcctagcgccgttaacatactccagcaggtcgagcagcgcaatggatctatcagaacttctgggaatctggagtcggcgggagccaatctcactaatctactgactggctcacgtaaaaacagggattctaattatcgccctctgctttcagagtctgcggagtctgtaagtgcaagcggcagctaagaattgtctaggctttccgtactagcatgacagtcatacactcatacagacggcagaacagtgaactgtaacagaatcatgcttgtactaaaaaatatttcgtcggggtcaaagccaataattgttttgttggcctaaatttgatcatttttctcagtctgcgctgtggcaccgtctgtgctgtccgctgtcgcacgtagggatggtaataggatctaaattttacgctataaaatttaattatcaaatcatattaggatttaat

SEQ ID NO: 16917 - DNA, 3452 bp, Zea Mays
gtttggccaatgtctagataacccctaaaatcaaagcacaggaggtacatgttggagatttagtgtggctccatgagaatgatgagataccatgtgatcttgttctcattggcacttctgatcgacaaggcatttgttatgttgagactgctgctttggatggtgaaactgacttgaaaacaagaaccattcctccaatttctgctaacttgtcagtagagcagctaggaaaagtcaagggtgtaattgagtgccccaacccagacaatgacatacggaggtttgatgctaacatgcgcttgttcctccctataattgacaatgaaaaaagtcctttgactatcaacaatacacttcttcagtcatgttaccttcgatacactgaatgggcttgtggagttgcagtttacacaggcaatgaaacaaaatctggaataagtaggggagctgcggagcccaagttcactgctgctgatgtaataatagacaagctcactattgcaatattcatgttccaagttgttgttgtacttgttctgggttattttgggaatacttggaaggacactcaggggcttaagcaatggtatcttatgtatcctatggaggtagagggcccatggtatgatttcttgattatcccgttacgctttgagctgttgtgctccataatgattccaatctccataaaggttactcttgatttggctaaaggtttgtatgcaaagtttattgactgggatgagcaaatgtttgattgggaaacaaatacacctgctcattcagctaacacagctattagcgaggacctcggacagattgaatatattttgagtgacaaaactgggacactcacagagaataaaatgatcttcaaacaatgctgcataagtgatactttgtatggaaatgacaacggagatgcattaaacggttgtctacttactcattatgttctttacatcctattaagggacaatgttcatccttttcttttctctattaaggcatgcttgttatgtgtatgaattatgagaaattgcggaggtggaattgggggataagggtacatcagccctctaaatggaggagactgagctgggcgtaatacaacacgtcaacacccatggttctatttctgcaagtgagcagttgtaacactccaactactccaagataagtttccgaaaaagaagatgtcagacttgtaaatgcggtctcaagtaatgatcctgatgtcatcaaatttctgttggttatggctctttgcaatacagtggtccctatcaaaagcaatgatggtactgtgtcatacaaagcacaatcccaagatgaggaagctttagttaacgctgcagcaaagctgaatatgatgctcatcagtaaagacaccattacagctgagatttgtttcaatgggtctaagttttggtatgagttgttggacattttggaattcacttctgatcgcaaaagaatgtctgtagtggtaaaggaaggggagactggtaagatccttcttttatcaaaaggtgctgatgaagctctcctgcctcgtgcctgtccaggacaacaaatacagagatatcttgaagcagtagaaatgtattctcagttgggattgcgaaccttatgtttggggtggcgtgatttaaaagaaaatgaatataaggaatggtccaaaaactttcaaaaggctagctgctcattggacaatagagagtttaaaattgctgaagtttgtaatagcttagagcaagaccttcaaattcttggtgttactgctatagaggatcgtcttcaggatggtgttcctgaaaccattaaattgttgaggaatgctggaattaatgtgtggatgctaaccggtgataagcaaaatacagcaattcagattggacttctctgtaacctcataacttctgggcccaatagtcaattgttatctatcagtgggaaaactgaagaggacgtgctaagaagcctagagagggcattatttattatgaaaaatacatctgaaacaaagggtcttgcatttgttttggatggttgggcacttgaattaattttgaagcattccaaggagtcttttactaggttggcgatgctgtcaaaaacagcaatatgctgtcgaatgacacctttgcagaaagcacagcttgttgctatcctaaaatccgttggctacctaactctagcaattggtgatggtggtaatgatgttagaatgattcaagaggctaacattggagtagggattagtggtagggaaggactgcaagctgcaagagctgctgattatagcattgggaagttcaagtttcttaagagattgatacttattcatgggcgttattcatacaatcgaacagcatttatttcacagtactccttctacaagtcacttcttatgtgctttattcagattctgtttgcctttttgtcggggctatctgggactagcttattcaactcaattagcttgatggcttataacgttttctatacaagtttacccgtcatgactataatctttgacaaggatatctctgaaacaacggttatgcagtacccccagattttactgcattctcaagctgggaggcttttaaatctcactacattttgcggatggtttgggcgctcgctatatcacgcactcgtcgttttcttcattacgatatgcgcctactcagatgagaaaagtgagatgcaggaactgtcaatggtagcactgtccggttgcatttggttacaggcttttgttgtgacaatggatacaaactcattcacttgcccgcaaatccttctcatctggggaaactttgtggccttctacatgatcaacttaatactcagtaccgtcccaagtctccaactgtacacaatcacgttccgcctgtgtagccaaccttcctactggatctccatggctctgacggttgcagtaggaatgggaccggtggtggctttcaggtacttgaagaacctgtatcagcctagcgccgttaacatactccagcaggtcgagcagcgcaatggatctatcagaacttctgggaatctggagtcggcgggagccaatctcactaatctactgactggctcacgtaaaaacagggattctaattatcgccctctgctttcagagtctgcggagtctgtaagtgcaagcggcagctaagaattgtctaggctttccgtactagcatgacagtcatacactcatacagacggcagaacagtgaactgtaacagaatcatgcttgtactaaaaaatatttcgtcggggtcaaagccaataattgttttgttggcctaaatttgatcatttttctcagtctgcgctgtggcaccgtctgtgctgtccgctgtcgcacgtagggatggtaataggatctaaattttacgctataaaatttaattatcaaatcatattaggatttaat

SEQ ID NO: 16918 - DNA, 3181 bp, Zea Mays
gtcaagtgatattttgctttggagaagaccgaattactccctccaagtttggccaatgtctagataacccctaaaatcaaagcacaggaggtacatgttggagatttagtgtggctccatgagaatgatgagataccatgtgatcttgttctcattggcacttctgatcgacaaggcatttgttatgttgagactgctgctttggatggtgaaactgacttgaaaacaagaaccattcctccaatttctgctaacttgtcagtagagcagctaggaaaagtcaagggtgtaattgagtgccccaacccagacaatgacatacggagtcatgttaccttcgatacactgaatgggcttgtggagttgcagtttacacaggcaatgaaacaaaatctggaataagtaggggagctgcggagcccaagttcactgctgctgatgtaataatagacaagctcactattgcaatattcatgttccaagttgttgttgtacttgttctgggttattttgggaatacttggaaggacactcaggggcttaagcaatggtatcttatgtatcctatggaggtagagggcccatggtatgatttcttgattatcccgttacgctttgagctgttgtgctccataatgattccaatctccataaaggttactcttgatttggctaaaggtttgtatgcaaagtttattgactgggatgagcaaatgtttgattgggaaacaaatacacctgctcattcagctaactattagcgaggacctcggacagattgaatatattttgagtgacaaaactgggacactcacagagaataaaatgatcttcaaacaatgctgcataagtgatactttgtatggaaatgacaacggagatgcattaaacgaagcaaagctgtttttcgtccactgacaattctctcaacttagatgtcagacttgtaaatgcggtctcaagtaatgatcctgatgtcatcaaatttctgttggttatggctctttgcaatacagtggtccctatcaaaagcaatgatggtactgtgtcatacaaagcacaatcccaagatgaggaagctttagttaacgctgcagcaaagctgaatatgatgctcatcagtaaagacaccattacagctgagatttgtttcaatgggtctaagttttggtatgagttgttggacattttggaattcacttctgatcgcaaaagaatgtctgtagtggtaaaggaaggggagactggtaagatccttcttttatcaaaaggtgctgatgaagctctcctgcctcgtgcctgtccaggacaacaaatacagagatatcttgaagcagtagaaatgtattctcagttgggattgcgaaccttatgtttggggtggcgtgatttaaaagaaaatgaatataaggaatggtccaaaaactttcaaaaggctagctgctcattggacaatagagagtttaaaattgctgaagtttgtaatagcttagagcaagaccttcaaattcttggtgttactgctatagaggatcgtcttcaggatggtgttcctgaaaccattaaattgttgaggaatgctggaattaatgtgtggatgctaaccggtgataagcaaaatacagcaattcagattggacttctctgtaacctcataacttctgtcaattgttatctatcagtgggaaaactgaagaggacgtgctaagaagcctagagagggcattatttattatgaaaaatacatctgaaacaaagggtcttgcatttgttttggatggttgggcacttgaattaattttgaagcattccaaggagtcttttactaggttggcgatgctgtcaaaaacagcaatatgctgtcgaatgacacctttgcagaaagcacagcttgttgctatcctaaaatccgttggctacctaactctagcaattggtgatggtggtaatgatgttagaatgattcaagaggctaacattggagtagggattagtggtagggaaggactgcaagctgcaagagctgctgattatagcattgggaagttcaagtttcttaagagattgatacttattcatgggcgttattcatacaatcgaacagcatttatttcacagtactccttctacaagtcacttcttatgtgctttattcagattctgtttgcctttttgtcggggctatctgggactagcttattcaactcaattagcttgatggcttataacgttttctatacaagtttacccgtcatgactataatctttgacaaggatatctctgaaacaacggttatgcagtacccccagattttactgcattctcaagctgggaggcttttaaatctcactacattttgcggatggtttgggcgctcgctatatcacgcactcgtcgttttcttcattacgatatgcgcctactcagatgagaaaagtgagatgcaggaactgtcaatggtagcactgtccggttgcatttggttacaggcttttgttgtgacaatggatacaaactcattcacttgcccgcaaatccttctcatctggggaaactttgtggccttctacatgatcaacttaatactcagtaccgtcccaagtctccaactgtacacaatcacgttccgcctgtgtagccaaccttcctactggatctccatggctctgacggttgcagtaggaatgggaccggtggtggctttcaggtacttgaagaacctgtatcagcctagcgccgttaacatactccagcaggtcgagcagcgcaatggatctatcagaacttctgggaatctggagtcggcgggagccaatctcactaatctactgactggctcacgtaaaaacagggattctaattatcgccctctgctttcagagtctgcggagtctgtaagtgcaagcggcagctaagaattgtctaggctttccgtactagcatgacagtcatacactcatacagacggcagaacagtgaactgtaacagaatcatgcttgtactaaaaaatatttcgtcggggtcaaagccaataattgttttgttggcctaaatttgatcatttttctcagtctgcgctgtggcaccgtctgtgctgtccgctgtcgcacgtagggatggtaataggatctaaattttacgctataaaatttaattatcaaatcatattaggatttaat

SEQ ID NO: 16919 - DNA, 3296 bp, Zea Mays
ccatcatctgttggtgtagtaatgtggattgaaagatagaagattttttaatgcatggctagtcaagtgatattttgctttggagaagaccgaattactccctccaagtttggccaatgtctagataacccctaaaatcaaagcacaggaggtacatgttggagatttagtgtggctccatgagaatgatgagataccatgtgatcttgttctcattggcacttctgatcgacaaggcatttgttatgttgagactgctgctttggatggtgaaactgacttgaaaacaagaaccattcctccaatttctgctaacttgtcagtagagcagctaggaaaagtcaagggtgtaattgagtgccccaacccagacaatgacatacggaggtttgatgctaacatgcgcttgttcctccctataattgacaatgaaaaaagtcctttgactatcaacaatacacttcttcagtcatgttaccttcgatacactgaatgggcttgtggagttgcagtttacacaggcaatgaaacaaaatctggaataagtaggggagctgcggagcccaagttcactgctgctgatgtaataatagacaagctcactattgcaatattcatgttccaagttgttgttgtacttgttctgggttattttgggaatacttggaaggacactcaggggcttaagcaatggtatcttatgtatcctatggaggtagagggcccatggtatgatttcttgattatcccgttacgctttgagctgttgtgctccataatgattccaatctccataaaggttactcttgatttggctaaaggtttgtatgcaaagtttattgactgggatgagcaaatgtttgattgggaaacaaatacacctgctcattcagctaacacagctattagcgaggacctcggacagattgaatatattttgagtgacaaaactgggacactcacagagaataaaatgatcttcaaacaatgctgcataagtgatactttgtatggaaatgacaacggagatgcattaaacgatgtcagacttgtaaatgcggtctcaagtaatgatcctgatgtcatcaaatttctgttggttatggctctttgcaatacagtggtccctatcaaaagcaatgatggtactgtgtcatacaaagcacaatcccaagatgaggaagctttagttaacgctgcagcaaagctgaatatgatgctcatcagtaaagacaccattacagctgagatttgtttcaatgggtctaagttttggtatgagttgttggacattttggaattcacttctgatcgcaaaagaatgtctgtagtggtaaaggaaggggagactggtaagatccttcttttatcaaaaggtgctgatgaagctctcctgcctcgtgcctgtccaggacaacaaatacagagatatcttgaagcagtagaaatgtattctcagttgggattgcgaaccttatgtttggggtggcgtgatttaaaagaaaatgaatataaggaatggtccaaaaactttcaaaaggctagctgctcattggacaatagagagtttaaaattgctgaagtttgtaatagcttagagcaagaccttcaaattcttggtgttactgctatagaggatcgtcttcaggatggtgttcctgaaaccattaaattgttgaggaatgctggaattaatgtgtggatgctaaccggtgataagcaaaatacagcaattcagattggacttctctgtaacctcataacttctgggcccaatagtcaattgttatctatcagtgggaaaactgaagaggacgtgctaagaagcctagagagggcattatttattatgaaaaatacatctgaaacaaagggtcttgcatttgttttggatggttgggcacttgaattaattttgaagcattccaaggagtcttttactaggttggcgatgctgtcaaaaacagcaatatgctgtcgaatgacacctttgcagaaagcacagcttgttgctatcctaaaatccgttggctacctaactctagcaattggtgatggtggtaatgatgttagaatgattcaagaggctaacattggagtagggattagtggtagggaaggactgcaagctgcaagagctgctgattatagcattgggaagttcaagtttcttaagagattgatacttattcatgggcgttattcatacaatcgaacagcatttatttcacagtactccttctacaagtcacttcttatgtgctttattcagattctgtttgcctttttgtcggggctatctgggactagcttattcaactcaattagcttgatggcttataacgttttctatacaagtttacccgtcatgactataatctttgacaaggatatctctgaaacaacggttatgcagtacccccagattttactgcattctcaagctgggaggcttttaaatctcactacattttgcggatggtttgggcgctcgctatatcacgcactcgtcgttttcttcattacgatatgcgcctactcagatgagaaaagtgagatgcaggaactgtcaatggtagcactgtccggttgcatttggttacaggcttttgttgtgacaatggatacaaactcattcacttgcccgcaaatccttctcatctggggaaactttgtggccttctacatgatcaacttaatactcagtaccgtcccaagtctccaactgtacacaatcacgttccgcctgtgtagccaaccttcctactggatctccatggctctgacggttgcagtaggaatgggaccggtggtggctttcaggtacttgaagaacctgtatcagcctagcgccgttaacatactccagcaggtcgagcagcgcaatggatctatcagaacttctgggaatctggagtcggcgggagccaatctcactaatctactgactggctcacgtaaaaacagggattctaattatcgccctctgctttcagagtctgcggagtctgtaagtgcaagcggcagctaagaattgtctaggctttccgtactagcatgacagtcatacactcatacagacggcagaacagtgaactgtaacagaatcatgcttgtactaaaaaatatttcgtcggggtcaaagccaataattgttttgttggcctaaatttgatcatttttctcagtctgcgctgtggcaccgtctgtgctgtccgctgtcgcacgtagggatggtaataggatctaaattttacgctataaaatttaattatcaaatcatattaggatttaat

SEQ ID NO: 16920 - DNA, 3453 bp, Zea Mays
acagttcagatatggatgtttcttaataggatcaaagcacaggaggtacatgttggagatttagtgtggctccatgagaatgatgagataccatgtgatcttgttctcattggcacttctgatcgacaaggcatttgttatgttgagactgctgctttggatggtgaaactgacttgaaaacaagaaccattcctccaatttctgctaacttgtcagtagagcagctaggaaaagtcaagggtgtaattgagtgccccaacccagacaatgacatacggaggtttgatgctaacatgcgcttgttcctccctataattgacaatgaaaaaagtcctttgactatcaacaatacacttcttcagtcatgttaccttcgatacactgaatgggcttgtggagttgcagtttacacaggcaatgaaacaaaatctggaataagtaggggagctgcggagcccaagttcactgctgctgatgtaataatagacaagctcactattgcaatattcatgttccaagttgttgttgtacttgttctgggttattttgggaatacttggaaggacactcaggggcttaagcaatggtatcttatgtatcctatggaggtagagggcccatggtatgatttcttgattatcccgttacgctttgagctgttgtgctccataatgattccaatctccataaaggttactcttgatttggctaaaggtttgtatgcaaagtttattgactgggatgagcaaatgtttgattgggaaacaaatacacctgctcattcagctaacacagctattagcgaggacctcggacagattgaatatattttgagtgacaaaactgggacactcacagagaataaaatgatcttcaaacaatgctgcataagtgatactttgtatggaaatgacaacggagatgcattaaacggttgtctacttactcattatgttctttacatcctattaagggacaatgttcatccttttcttttctctattaaggcatgcttgttatgtgtatgaattatgagaaattgcggaggtggaattgggggataagggtacatcagccctctaaatggaggagactgagctgggcgtaatacaacacgtcaacacccatggttctatttctgcaagtgagcagttgtaacactccaactactccaagataagtttccgaaaaagaagatgtcagacttgtaaatgcggtctcaagtaatgatcctgatgtcatcaaatttctgttggttatggctctttgcaatacagtggtccctatcaaaagcaatgatggtactgtgtcatacaaagcacaatcccaagatgaggaagctttagttaacgctgcagcaaagctgaatatgatgctcatcagtaaagacaccattacagctgagatttgtttcaatgggtctaagttttggtatgagttgttggacattttggaattcacttctgatcgcaaaagaatgtctgtagtggtaaaggaaggggagactggtaagatccttcttttatcaaaaggtgctgatgaagctctcctgcctcgtgcctgtccaggacaacaaatacagagatatcttgaagcagtagaaatgtattctcagttgggattgcgaaccttatgtttggggtggcgtgatttaaaagaaaatgaatataaggaatggtccaaaaactttcaaaaggctagctgctcattggacaatagagagtttaaaattgctgaagtttgtaatagcttagagcaagaccttcaaattcttggtgttactgctatagaggatcgtcttcaggatggtgttcctgaaaccattaaattgttgaggaatgctggaattaatgtgtggatgctaaccggtgataagcaaaatacagcaattcagattggacttctctgtaacctcataacttctgggcccaatagtcaattgttatctatcagtgggaaaactgaagaggacgtgctaagaagcctagagagggcattatttattatgaaaaatacatctgaaacaaagggtcttgcatttgttttggatggttgggcacttgaattaattttgaagcattccaaggagtcttttactaggttggcgatgctgtcaaaaacagcaatatgctgtcgaatgacacctttgcagaaagcacagcttgttgctatcctaaaatccgttggctacctaactctagcaattggtgatggtggtaatgatgttagaatgattcaagaggctaacattggagtagggattagtggtagggaaggactgcaagctgcaagagctgctgattatagcattgggaagttcaagtttcttaagagattgatacttattcatgggcgttattcatacaatcgaacagcatttatttcacagtactccttctacaagtcacttcttatgtgctttattcagattctgtttgcctttttgtcggggctatctgggactagcttattcaactcaattagcttgatggcttataacgttttctatacaagtttacccgtcatgactataatctttgacaaggatatctctgaaacaacggttatgcagtacccccagattttactgcattctcaagctgggaggcttttaaatctcactacattttgcggatggtttgggcgctcgctatatcacgcactcgtcgttttcttcattacgatatgcgcctactcagatgagaaaagtgagatgcaggaactgtcaatggtagcactgtccggttgcatttggttacaggcttttgttgtgacaatggatacaaactcattcacttgcccgcaaatccttctcatctggggaaactttgtggccttctacatgatcaacttaatactcagtaccgtcccaagtctccaactgtacacaatcacgttccgcctgtgtagccaaccttcctactggatctccatggctctgacggttgcagtaggaatgggaccggtggtggctttcaggtacttgaagaacctgtatcagcctagcgccgttaacatactccagcaggtcgagcagcgcaatggatctatcagaacttctgggaatctggagtcggcgggagccaatctcactaatctactgactggctcacgtaaaaacagggattctaattatcgccctctgctttcagagtctgcggagtctgtaagtgcaagcggcagctaagaattgtctaggctttccgtactagcatgacagtcatacactcatacagacggcagaacagtgaactgtaacagaatcatgcttgtactaaaaaatatttcgtcggggtcaaagccaataattgttttgttggcctaaatttgatcatttttctcagtctgcgctgtggcaccgtctgtgctgtccgctgtcgcacgtagggatggtaataggatctaaattttacgctataaaatttaattatcaaatcatattaggatttaat

SEQ ID NO: 16921 - DNA, 3028 bp, Zea Mays
agaaagaaaggattgtttgctgacatgtcggaatcaaagcacaggaggtacatgttggagatttagtgtggctccatgagaatgatgagataccatgtgatcttgttctcattggcacttctgatcgacaaggcatttgttatgttgagactgctgctttggatggtgaaactgacttgaaaacaagaaccattcctccaatttctgctaacttgtcagtagagcagctaggaaaagtcaagggtgtaattgagtgccccaacccagacaatgacatacggaggtttgatgctaacatgcgcttgttcctccctataattgacaatgaaaaaagtcctttgactatcaacaatacacttcttcagtcatgttaccttcgatacactgaatgggcttgtggagttgcagtttacacaggcaatgaaacaaaatctggaataagtaggggagctgcggagcccaagttcactgctgctgatgtaataatagacaagctcactattgcaatattcatgttccaagttgttgttgtacttgttctgggttattttgggaatacttggaaggacactcaggggcttaagcaatggtatcttatgtatcctatggaggtagagggcccatggtatgatttcttgattatcccgttacgctttgagctgttgtgctccataatgattccaatctccataaaggttactcttgatttggctaaaggtttgtatgcaaagtttattgactgggatgagcaaatgtttgattgggaaacaaatacacctgctcattcagctaacacagctattagcgaggacctcggacagattgaatatattttgagtgacaaaactgggacactcacagagaataaaatgatcttcaaacaatgctgcataagtgatactttgtatggaaatgacaacggagatgcattaaacgatgtcagacttgtaaatgcggtctcaagtaatgatcctgatgtcatcaaatttctgttggttatggctctttgcaatacagtggtccctatcaaaagcaatgatggtactgtgtcatacaaagcacaatcccaagatgaggaagctttagttaacgctgcagcaaagctgaatatgatgctcatcagtaaagacaccattacagctgagatttgtttcaatgggtctaagttttggtatgagttgttggacattttggaattcacttctgatcgcaaaagaatgtctgtagtggtaaaggaaggggagactggtaagatccttcttttatcaaaaggtgctgatgaagctctcctgcctcgtgcctgtccaggacaacaaatacagagatatcttgaagcagtagaaatgtattctcagttgggattgcgaaccttatgtttggggtggcgtgatttaaaagaaaatgaatataaggaatggtccaaaaactttcaaaaggctagctgctcattggacaatagagagtttaaaattgctgaagtttgtaatagcttagagcaagaccttcaaattcttggtgttactgctatagaggatcgtcttcaggatggtgttcctgaaaccattaaattgttgaggaatgctggaattaatgtgtggatgctaaccggtgataagcaaaatacagcaattcagattggacttctctgtaacctcataacttctgtcaattgttatctatcagtgggaaaactgaagaggacgtgctaagaagcctagagagggcattatttattatgaaaaatacatctgaaacaaagggtcttgcatttgttttggatggttgggcacttgaattaattttgaagcattccaaggagtcttttactaggttggcgatgctgtcaaaaacagcaatatgctgtcgaatgacacctttgcagaaagcacagagttcaagtttcttaagagattgatacttattcatgggcgttattcatacaatcgaacagcatttatttcacagtactccttctacaagtcacttcttatgtgctttattcagattctgtttgcctttttgtcggggctatctgggactagcttattcaactcaattagcttgatggcttataacgttttctatacaagtttacccgtcatgactataatctttgacaaggatatctctgaaacaacggttatgcagtacccccagattttactgcattctcaagctgggaggcttttaaatctcactacattttgcggatggtttgggcgctcgctatatcacgcactcgtcgttttcttcattacgatatgcgcctactcagatgagaaaagtgagatgcaggaactgtcaatggtagcactgtccggttgcatttggttacaggcttttgttgtgacaatggatacaaactcattcacttgcccgcaaatccttctcatctggggaaactttgtggccttctacatgatcaacttaatactcagtaccgtcccaagtctccaactgtacacaatcacgttccgcctgtgtagccaaccttcctactggatctccatggctctgacggttgcagtaggaatgggaccggtggtggctttcaggtacttgaagaacctgtatcagcctagcgccgttaacatactccagcaggtcgagcagcgcaatggatctatcagaacttctgggaatctggagtcggcgggagccaatctcactaatctactgactggctcacgtaaaaacagggattctaattatcgccctctgctttcagagtctgcggagtctgtaagtgcaagcggcagctaagaattgtctaggctttccgtactagcatgacagtcatacactcatacagacggcagaacagtgaactgtaacagaatcatgcttgtactaaaaaatatttcgtcggggtcaaagccaataattgttttgttggcctaaatttgatcatttttctcagtctgcgctgtggcaccgtctgtgctgtccgctgtcgcacgtagggatggtaataggatctaaattttacgctataaaatttaattatcaaatcatattaggatttaat

SEQ ID NO: 16922 - DNA, 3867 bp, Zea Mays
caaagcttgcaatggcacaatagtgacatcttgggaaacaatgaaacgttttgtctatatcaatgatgattcgtgccggtattcctactgtgacaaccggatatccaataccaagtatactctgtggaattttctcccgaaaaatttatgggagcaattcaggcgtttcatgaatcagtattttctactaatagcctgccttcagttgtggtcccgtatcacccctgtcagccctgcaactacatggggtccacttatcatcatcttcattgtttctgcttcaaaagaggcttgggatgattacaataggtatctttctgacaagaaagcaaatgagaggaaaatatggttggtaaaggatggcgtccgcatacagatcaaagcacaggaggtacatgttggagatttagtgtggctccatgagaatgatgagataccatgtgatcttgttctcattggcacttctgatcgacaaggcatttgttatgttgagactgctgctttggatggtgaaactgacttgaaaacaagaaccattcctccaatttctgctaacttgtcagtagagcagctaggaaaagtcaagggtgtaattgagtgccccaacccagacaatgacatacggaggtttgatgctaacatgcgcttgttcctccctataattgacaatgaaaaaagtcctttgactatcaacaatacacttcttcagtcatgttaccttcgatacactgaatgggcttgtggagttgcagtttacacaggcaatgaaacaaaatctggaataagtaggggagctgcggagcccaagttcactgctgctgatgtaataatagacaagctcactattgcaatattcatgttccaagttgttgttgtacttgttctgggttattttgggaatacttggaaggacactcaggggcttaagcaatggtatcttatgtatcctatggaggtagagggcccatggtatgatttcttgattatcccgttacgctttgagctgttgtgctccataatgattccaatctccataaaggttactcttgatttggctaaaggtttgtatgcaaagtttattgactgggatgagcaaatgtttgattgggaaacaaatacacctgctcattcagctaacacagctattagcgaggacctcggacagattgaatatattttgagtgacaaaactgggacactcacagagaataaaatgatcttcaaacaatgctgcataagtgatactttgtatggaaatgacaacggagatgcattaaacgaagcaaagctgtttttcgtccactgacaattctctcaacttagatgtcagacttgtaaatgcggtctcaagtaatgatcctgatgtcatcaaatttctgttggttatggctctttgcaatacagtggtccctatcaaaagcaatgatggtactgtgtcatacaaagcacaatcccaagatgaggaagctttagttaacgctgcagcaaagctgaatatgatgctcatcagtaaagacaccattacagctgagatttgtttcaatgggtctaagttttggtatgagttgttggacattttggaattcacttctgatcgcaaaagaatgtctgtagtggtaaaggaaggggagactggtaagatccttcttttatcaaaaggtgctgatgaagctctcctgcctcgtgcctgtccaggacaacaaatacagagatatcttgaagcagtagaaatgtattctcagttgggattgcgaaccttatgtttggggtggcgtgatttaaaagaaaatgaatataaggaatggtccaaaaactttcaaaaggctagctgctcattggacaatagagagtttaaaattgctgaagtttgtaatagcttagagcaagaccttcaaattcttggtgttactgctatagaggatcgtcttcaggatggtgttcctgaaaccattaaattgttgaggaatgctggaattaatgtgtggatgctaaccggtgataagcaaaatacagcaattcagattggacttctctgtaacctcataacttctgggcccaatagtcaattgttatctatcagtgggaaaactgaagaggacgtgctaagaagcctagagagggcattatttattatgaaaaatacatctgaaacaaagggtcttgcatttgttttggatggttgggcacttgaattaattttgaagcattccaaggagtcttttactaggttggcgatgctgtcaaaaacagcaatatgctgtcgaatgacacctttgcagaaagcacagcttgttgctatcctaaaatccgttggctacctaactctagcaattggtgatggtggtaatgatgttagaatgattcaagaggctaacattggagtagggattagtggtagggaaggactgcaagctgcaagagctgctgattatagcattgggagtaagcatacttctagttggcacaaataaattctatttacttccaaatatccataaacctgatctaatggttttgctagctggtacagaaatagcatattaaccagcttcaaacaagtgcagacttcttttttgttcattagtaatttcaatcttgcttatccatccaaaaagggtaccatttgcaaggttaaattggttgcggttatcctgttattttattaccctttttgcacttcacctccaaatttcaatatacttattatgtattattcctttttttttgcagagttcaagtttcttaagagattgatacttattcatgggcgttattcatacaatcgaacagcatttatttcacagtactccttctacaagtcacttcttatgtgctttattcagattctgtttgcctttttgtcggggctatctgggactagcttattcaactcaattagcttgatggcttataacgttttctatacaagtttacccgtcatgactataatctttgacaaggatatctctgaaacaacggttatgcagtacccccagattttactgcattctcaagctgggaggcttttaaatctcactacattttgcggatggtttgggcgctcgctatatcacgcactcgtcgttttcttcattacgatatgcgcctactcagatgagaaaagtgagatgcaggaactgtcaatggtagcactgtccggttgcatttggttacaggcttttgttgtgacaatggatacaaactcattcacttgcccgcaaatccttctcatctggggaaactttgtggccttctacatgatcaacttaatactcagtaccgtcccaagtctccaactgtacacaatcacgttccgcctgtgtagccaaccttcctactggatctccatggctctgacggttgcagtaggaatgggaccggtggtggctttcaggtacttgaagaacctgtatcagcctagcgccgttaacatactccagcaggtcgagcagcgcaatggatctatcagaacttctgggaatctggagtcggcgggagccaatctcactaatctactgactggctcacgtaaaaacagggattctaattatcgccctctgctttcagagtctgcggagtctgtaagtgcaagcggcagctaagaattgtctaggctttccgtactagcatgacagtcatacactcatacagacggcagaacagtgaactgtaacagaatcatgcttgtactaaaaaatatttcgtcggggtcaaagccaataattgttttgttggcctaaatttgatcatttttctcagtctgcgctgtggcaccgtctgtgctgtccgctgtcgcacgtagggatggtaataggatctaaattttacgctataaaatttaattatcaaatcatattaggatttaat

SEQ ID NO: 16923 - DNA, 3318 bp, Zea Mays
gccctttgctggcgacgagcaaccacagcttgcaatggcacaatagtgacatcttgggaaacaatgaaacgttttgtctatatcaatgatgattcgtgccggtattcctactgtgacaaccggatatccaataccaagtatactctgtggaattttctcccgaaaaatttatgggagcaattcaggcgtttcatgaatcagtattttctactaatagcctgccttcagttgtggtcccgtatcacccctgtcagccctgcaactacatggggtccacttatcatcatcttcattgtttctgcttcaaaagaggcttgggatgattacaataggtatctttctgacaagaaagcaaatgagaggaaaatatggttggtaaaggatggcgtccgcatacagatcaaagcacaggaggtacatgttggagatttagtgtggctccatgagaatgatgagataccatgtgatcttgttctcattggcacttctgatcgacaaggcatttgttatgttgagactgctgctttggatggtgaaactgacttgaaaacaagaaccattcctccaatttctgctaacttgtcagtagagcagctaggaaaagtcaagggtgtaattgagtgccccaacccagacaatgacatacggaggtttgatgctaacatgcgcttgttcctccctataattgacaatgaaaaaagtcctttgactatcaacaatacacttcttcagtcatgttaccttcgatacactgaatgggcttgtggagttgcagtttacacaggcaatgaaacaaaatctggaataagtaggggagctgcggagcccaagttcactgctgctgatgtaataatagacaagctcactattgcaatattcatgttccaagttgttgttgtacttgttctgggttattttgggaatacttggaaggacactcaggggcttaagcaatggtatcttatgtatcctatggaggtagagggcccatggtatgatttcttgattatcccgttacgctttgagctgttgtgctccataatgattccaatctccataaagatgtcagacttgtaaatgcggtctcaagtaatgatcctgatgtcatcaaatttctgttggttatggctctttgcaatacagtggtccctatcaaaagcaatgatggtactgtgtcatacaaagcacaatcccaagatgaggaagctttagttaacgctgcagcaaagctgaatatgatgctcatcagtaaagacaccattacagctgagatttgtttcaatgggtctaagttttggtatgagttgttggacattttggaattcacttctgatcgcaaaagaatgtctgtagtggtaaaggaaggggagactggtaagatccttcttttatcaaaaggtgctgatgaagctctcctgcctcgtgcctgtccaggacaacaaatacagagatatcttgaagcagtagaaatgtattctcagttgggattgcgaaccttatgtttggggtggcgtgatttaaaagaaaatgaatataaggaatggtccaaaaactttcaaaaggctagctgctcattggacaatagagagtttaaaattgctgaagtttgtaatagcttagagcaagaccttcaaattcttggtgttactgctatagaggatcgtcttcaggatggtgttcctgaaaccattaaattgttgaggaatgctggaattaatgtgtggatgctaaccggtgataagcaaaatacagcaattcagattggacttctctgtaacctcataacttctgggcccaatagtcaattgttatctatcagtgggaaaactgaagaggacgtgctaagaagcctagagagggcattatttattatgaaaaatacatctgaaacaaagggtcttgcatttgttttggatggttgggcacttgaattaattttgaagcattccaaggagtcttttactaggttggcgatgctgtcaaaaacagcaatatgctgtcgaatgacacctttgcagaaagcacagcttgttgctatcctaaaatccgttggctacctaactctagcaattggtgatggtggtaatgatgttagaatgattcaagaggctaacattggagtagggattagtggtagggaaggactgcaagctgcaagagctgctgattatagcattgggaagttcaagtttcttaagagattgatacttattcatgggcgttattcatacaatcgaacagcatttatttcacagtactccttctacaagtcacttcttatgtgctttattcagattctgtttgcctttttgtcggggctatctgggactagcttattcaactcaattagcttgatggcttataacgttttctatacaagtttacccgtcatgactataatctttgacaaggatatctctgaaacaacggttatgcagtacccccagattttactgcattctcaagctgggaggcttttaaatctcactacattttgcggatggtttgggcgctcgctatatcacgcactcgtcgttttcttcattacgatatgcgcctactcagatgagaaaagtgagatgcaggaactgtcaatggtagcactgtccggttgcatttggttacaggcttttgttgtgacaatggatacaaactcattcacttgcccgcaaatccttctcatctggggaaactttgtggccttctacatgatcaacttaatactcagtaccgtcccaagtctccaactgtacacaatcacgttccgcctgtgtagccaaccttcctactggatctccatggctctgacggttgcagtaggaatgggaccggtggtggctttcaggtacttgaagaacctgtatcagcctagcgccgttaacatactccagcaggtcgagcagcgcaatggatctatcagaacttctgggaatctggagtcggcgggagccaatctcactaatctactgactggctcacgtaaaaacagggattctaattatcgccctctgctttcagagtctgcggagtctgtaagtgcaagcggcagctaagaattgtctaggctttccgtactagcatgacagtcatacactcatacagacggcagaacagtgaactgtaacagaatcatgcttgtactaaaaaatatttcgtcggggtcaaagccaataattgttttgttggcctaaatttgatcatttttctcagtctgcgctgtggcaccgtctgtgctgtccgctgtcgcacgtagggatggtaataggatctaaattttacgctataaaatttaattatcaaatcatattaggatttaat

SEQ ID NO: 16924 - DNA, 3573 bp, Zea Mays
caggacatcagtgcaactgtgcaagcgaccgccaccgcattacccggaactgcccagatcttcgtcgaatcgtcgggccctttgctggcgacgagcaaccacagcttgcaatggcacaatagtgacatcttgggaaacaatgaaacgttttgtctatatcaatgatgattcgtgccggtattcctactgtgacaaccggatatccaataccaagtatactctgtggaattttctcccgaaaaatttatgggagcaattcaggcgtttcatgaatcagtattttctactaatagcctgccttcagttgtggtcccgtatcacccctgtcagccctgcaactacatggggtccacttatcatcatcttcattgtttctgcttcaaaagaggcttgggatgattacaataggtatctttctgacaagaaagcaaatgagaggaaaatatggttggtaaaggatggcgtccgcatacagatcaaagcacaggaggtacatgttggagatttagtgtggctccatgagaatgatgagataccatgtgatcttgttctcattggcacttctgatcgacaaggcatttgttatgttgagactgctgctttggatggtgaaactgacttgaaaacaagaaccattcctccaatttctgctaacttgtcagtagagcagctaggaaaagtcaagggtgtaattgagtgccccaacccagacaatgacatacggagtcatgttaccttcgatacactgaatgggcttgtggagttgcagtttacacaggcaatgaaacaaaatctggaataagtaggggagctgcggagcccaagttcactgctgctgatgtaataatagacaagctcactattgcaatattcatgttccaagttgttgttgtacttgttctgggttattttgggaatacttggaaggacactcaggggcttaagcaatggtatcttatgtatcctatggaggtagagggcccatggtatgatttcttgattatcccgttacgctttgagctgttgtgctccataatgattccaatctccataaaggttactcttgatttggctaaaggtttgtatgcaaagtttattgactgggatgagcaaatgtttgattgggaaacaaatacacctgctcattcagctaactattagcgaggacctcggacagattgaatatattttgagtgacaaaactgggacactcacagagaataaaatgatcttcaaacaatgctgcataagtgatactttgtatggaaatgacaacggagatgcattaaacggcatgcttgttatgtgtatgaattatgagaaattgcggaggtggaattgggggataagggtacatcagccctctaaatggaggagactgagctgggcgtaatacaacacgtcaacacccatggttctatttctgcaagtgagcagttgtaacactccaactactccaagataagtttccgaaaaagaagatgtcagacttgtaaatgcggtctcaagtaatgatcctgatgtcatcaaatttctgttggttatggctctttgcaatacagtggtccctatcaaaagcaatgatggtactgtgtcatacaaagcacaatcccaagatgaggaagctttagttaacgctgcagcaaagctgaatatgatgctcatcagtaaagacaccattacagctgagatttgtttcaatgggtctaagttttggtatgagttgttggacattttggaattcacttctgatcgcaaaagaatgtctgtagtggtaaaggaaggggagactggtaagatccttcttttatcaaaaggtgctgatgaagctctcctgcctcgtgcctgtccaggacaacaaatacagagatatcttgaagcagtagaaatgtattctcagttgggattgcgaaccttatgtttggggtggcgtgatttaaaagaaaatgaatataaggaatggtccaaaaactttcaaaaggctagctgctcattggacaatagagagtttaaaattgctgaagtttgtaatagcttagagcaagaccttcaaattcttggtgttactgctatagaggatcgtcttcaggatggtgttcctgaaaccattaaattgttgaggaatgctggaattaatgtgtggatgctaaccggtgataagcaaaatacagcaattcagattggacttctctgtaacctcataacttctgtcaattgttatctatcagtgggaaaactgaagaggacgtgctaagaagcctagagagggcattatttattatgaaaaatacatctgaaacaaagggtcttgcatttgttttggatggttgggcacttgaattaattttgaagcattccaaggagtcttttactaggttggcgatgctgtcaaaaacagcaatatgctgtcgaatgacacctttgcagaaagcacagagttcaagtttcttaagagattgatacttattcatgggcgttattcatacaatcgaacagcatttatttcacagtactccttctacaagtcacttcttatgtgctttattcagattctgtttgcctttttgtcggggctatctgggactagcttattcaactcaattagcttgatggcttataacgttttctatacaagtttacccgtcatgactataatctttgacaaggatatctctgaaacaacggttatgcagtacccccagattttactgcattctcaagctgggaggcttttaaatctcactacattttgcggatggtttgggcgctcgctatatcacgcactcgtcgttttcttcattacgatatgcgcctactcagatgagaaaagtgagatgcaggaactgtcaatggtagcactgtccggttgcatttggttacaggcttttgttgtgacaatggatacaaactcattcacttgcccgcaaatccttctcatctggggaaactttgtggccttctacatgatcaacttaatactcagtaccgtcccaagtctccaactgtacacaatcacgttccgcctgtgtagccaaccttcctactggatctccatggctctgacggttgcagtaggaatgggaccggtggtggctttcaggtacttgaagaacctgtatcagcctagcgccgttaacatactccagcaggtcgagcagcgcaatggatctatcagaacttctgggaatctggagtcggcgggagccaatctcactaatctactgactggctcacgtaaaaacagggattctaattatcgccctctgctttcagagtctgcggagtctgtaagtgcaagcggcagctaagaattgtctaggctttccgtactagcatgacagtcatacactcatacagacggcagaacagtgaactgtaacagaatcatgcttgtactaaaaaatatttcgtcggggtcaaagccaataattgttttgttggcctaaatttgatcatttttctcagtctgcgctgtggcaccgtctgtgctgtccgctgtcgcacgtagggatggtaataggatctaaattttacgctataaaatttaattatcaaatcatattaggatttaat

SEQ ID NO: 16925 - DNA, 3449 bp, Zea Mays
cctgtttgctgctgttttttctcccacgcgatccaaccgtttgtttacgccgggctaggtttctcgaccgtacggggacaggacatcagtgcaactgtgcaagcgaccgccaccgcattacccggaactgcccagatcttcgtcgaatcgtcgggccctttgctggcgacgagcaaccacagcttgcaatggcacaatagtgacatcttgggaaacaatgaaacgttttgtctatatcaatgatgattcgtgccggtattcctactgtgacaaccggatatccaataccaagtatactctgtggaattttctcccgaaaaatttatgggagcaattcaggcgtttcatgaatcagtattttctactaatagcctgccttcagttgtggtcccgtatcacccctgtcagccctgcaactacatggggtccacttatcatcatcttcattgtttctgcttcaaaagaggcttgggatgattacaataggtatctttctgacaagaaagcaaatgagaggaaaatatggttggtaaaggatggcgtccgcatacagatcaaagcacaggaggtacatgttggagatttagtgtggctccatgagaatgatgagataccatgtgatcttgttctcattggcacttctgatcgacaaggcatttgttatgttgagactgctgctttggatggtgaaactgacttgaaaacaagaaccattcctccaatttctgctaacttgtcagtagagcagctaggaaaagtcaagggtgtaattgagtgccccaacccagacaatgacatacggaggtttgatgctaacatgcgcttgttcctccctataattgacaatgaaaaaagtcctttgactatcaacaatacacttcttcagtcatgttaccttcgatacactgaatgggcttgtggagttgcagtttacacaggcaatgaaacaaaatctggaataagtaggggagctgcggagcccaagttcactgctgctgatcaatggtatcttatgtatcctatggaggtagagggcccatggtatgatttcttgattatcccgttacgctttgagctgttgtgctccataatgattccaatctccataaaggttactcttgatttggctaaaggtttgtatgcaaagtttattgactgggatgagcaaatgtttgattgggaaacaaatacacctgctcattcagctaactattagcgaggacctcggacagattgaatatattttgagtgacaaaactgggacactcacagagaataaaatgatcttcaaacaatgctgcataagtgatactttgtatggaaatgacaacggagatgcattaaacgatgtcagacttgtaaatgcggtctcaagtaatgatcctgatgtcatcaaatttctgttggttatggctctttgcaatacagtggtccctatcaaaagcaatgatggtactgtgtcatacaaagcacaatcccaagatgaggaagctttagttaacgctgcagcaaagctgaatatgatgctcatcagtaaagacaccattacagctgagatttgtttcaatgggtctaagttttggtatgagttgttggacattttggaattcacttctgatcgcaaaagaatgtctgtagtggtaaaggaaggggagactggtaagatccttcttttatcaaaaggtgctgatgaagctctcctgcctcgtgcctgtccaggacaacaaatacagagatatcttgaagcagtagaaatgtattctcagttgggattgcgaaccttatgtttggggtggcgtgatttaaaagaaaatgaatataaggaatggtccaaaaactttcaaaaggctagctgctcattggacaatagagagtttaaaattgctgaagtttgtaatagcttagagcaagaccttcaaattcttggtgttactgctatagaggatcgtcttcaggatggtgttcctgaaaccattaaattgttgaggaatgctggaattaatgtgtggatgctaaccggtgataagcaaaatacagcaattcagattggacttctctgtaacctcataacttctgggcccaatagtcaattgttatctatcagtgggaaaactgaagaggacgtgctaagaagcctagagagggcattatttattatgaaaaatacatctgaaacaaagggtcttgcatttgttttggatggttgggcacttgaattaattttgaagcattccaaggagtcttttactaggttggcgatgctgtcaaaaacagcaatatgctgtcgaatgacacctttgcagaaagcacagagttcaagtttcttaagagattgatacttattcatgggcgttattcatacaatcgaacagcatttatttcacagtactccttctacaagtcacttcttatgtgctttattcagattctgtttgcctttttgtcggggctatctgggactagcttattcaactcaattagcttgatggcttataacgttttctatacaagtttacccgtcatgactataatctttgacaaggatatctctgaaacaacggttatgcagtacccccagattttactgcattctcaagctgggaggcttttaaatctcactacattttgcggatggtttgggcgctcgctatatcacgcactcgtcgttttcttcattacgatatgcgcctactcagatgagaaaagtgagatgcaggaactgtcaatggtagcactgtccggttgcatttggttacaggcttttgttgtgacaatggatacaaactcattcacttgcccgcaaatccttctcatctggggaaactttgtggccttctacatgatcaacttaatactcagtaccgtcccaagtctccaactgtacacaatcacgttccgcctgtgtagccaaccttcctactggatctccatggctctgacggttgcagtaggaatgggaccggtggtggctttcaggtacttgaagaacctgtatcagcctagcgccgttaacatactccagcaggtcgagcagcgcaatggatctatcagaacttctgggaatctggagtcggcgggagccaatctcactaatctactgactggctcacgtaaaaacagggattctaattatcgccctctgctttcagagtctgcggagtctgtaagtgcaagcggcagctaagaattgtctaggctttccgtactagcatgacagtcatacactcatacagacggcagaacagtgaactgtaacagaatcatgcttgtactaaaaaatatttcgtcggggtcaaagccaataattgttttgttggcctaaatttgatcatttttctcagtctgcgctgtggcaccgtctgtgctgtccgctgtcgcacgtagggatggtaataggatctaaattttacgctataaaatttaattatcaaatcatattaggatttaat

SEQ ID NO: 16926 - DNA, 3610 bp, Zea Mays
cacctgtacctgtttgctgctgttttttctcccacgcgatccaaccgtttgtttacgccgggctaggtttctcgaccgtacggggacaggacatcagtgcaactgtgcaagcgaccgccaccgcattacccggaactgcccagatcttcgtcgaatcgtcgggccctttgctggcgacgagcaaccacagcttgcaatggcacaatagtgacatcttgggaaacaatgaaacgttttgtctatatcaatgatgattcgtgccggtattcctactgtgacaaccggatatccaataccaagtatactctgtggaattttctcccgaaaaatttatgggagcaattcaggcgtttcatgaatcagtattttctactaatagcctgccttcagttgtggtcccgtatcacccctgtcagccctgcaactacatggggtccacttatcatcatcttcattgtttctgcttcaaaagaggcttgggatgattacaataggtatctttctgacaagaaagcaaatgagaggaaaatatggttggtaaaggatggcgtccgcatacagatcaaagcacaggaggtacatgttggagatttagtgtggctccatgagaatgatgagataccatgtgatcttgttctcattggcacttctgatcgacaaggcatttgttatgttgagactgctgctttggatggtgaaactgacttgaaaacaagaaccattcctccaatttctgctaacttgtcagtagagcagctaggaaaagtcaagggtgtaattgagtgccccaacccagacaatgacatacggaggtttgatgctaacatgcgcttgttcctccctataattgacaatgaaaaaagtcctttgactatcaacaatacacttcttcagtcatgttaccttcgatacactgaatgggcttgtggagttgcagtttacacaggcaatgaaacaaaatctggaataagtaggggagctgcggagcccaagttcactgctgctgatgtaataatagacaagctcactattgcaatattcatgttccaagttgttgttgtacttgttctgggttattttgggaatacttggaaggacactcaggggcttaagcaatggtatcttatgtatcctatggaggtagagggcccatggtatgatttcttgattatcccgttacgctttgagctgttgtgctccataatgattccaatctccataaaggttactcttgatttggctaaaggtttgtatgcaaagtttattgactgggatgagcaaatgtttgattgggaaacaaatacacctgctcattcagctaacacagctattagcgaggacctcggacagattgaatatattttgagtgacaaaactgggacactcacagagaataaaatgatcttcaaacaatgctgcataagtgatactttgtatggaaatgacaacggagatgcattaaacgaagcaaagctgtttttcgtccactgacaattctctcaacttagatgtcagacttgtaaatgcggtctcaagtaatgatcctgatgtcatcaaatttctgttggttatggctctttgcaatacagtggtccctatcaaaagcaatgatggtactgtgtcatacaaagcacaatcccaagatgaggaagctttagttaacgctgcagcaaagctgaatatgatgctcatcagtaaagacaccattacagctgagatttgtttcaatgggtctaagttttggtatgagttgttggacattttggaattcacttctgatcgcaaaagaatgtctgtagtggtaaaggaaggggagactggtaagatccttcttttatcaaaaggtgctgatgaagctctcctgcctcgtgcctgtccaggacaacaaatacagagatatcttgaagcagtagaaatgtattctcagttgggattgcgaaccttatgtttggggtggcgtgatttaaaagaaaatgaatataaggaatggtccaaaaactttcaaaaggctagctgctcattggacaatagagagtttaaaattgctgaagtttgtaatagcttagagcaagaccttcaaattcttggtgttactgctatagaggatcgtcttcaggatggtgttcctgaaaccattaaattgttgaggaatgctggaattaatgtgtggatgctaaccggtgataagcaaaatacagcaattcagattggacttctctgtaacctcataacttctgggcccaatagtcaattgttatctatcagtgggaaaactgaagaggacgtgctaagaagcctagagagggcattatttattatgaaaaatacatctgaaacaaagggtcttgcatttgttttggatggttgggcacttgaattaattttgaagcattccaaggagtcttttactaggttggcgatgctgtcaaaaacagcaatatgctgtcgaatgacacctttgcagaaagcacagagttcaagtttcttaagagattgatacttattcatgggcgttattcatacaatcgaacagcatttatttcacagtactccttctacaagtcacttcttatgtgctttattcagattctgtttgcctttttgtcggggctatctgggactagcttattcaactcaattagcttgatggcttataacgttttctatacaagtttacccgtcatgactataatctttgacaaggatatctctgaaacaacggttatgcagtacccccagattttactgcattctcaagctgggaggcttttaaatctcactacattttgcggatggtttgggcgctcgctatatcacgcactcgtcgttttcttcattacgatatgcgcctactcagatgagaaaagtgagatgcaggaactgtcaatggtagcactgtccggttgcatttggttacaggcttttgttgtgacaatggatacaaactcattcacttgcccgcaaatccttctcatctggggaaactttgtggccttctacatgatcaacttaatactcagtaccgtcccaagtctccaactgtacacaatcacgttccgcctgtgtagccaaccttcctactggatctccatggctctgacggttgcagtaggaatgggaccggtggtggctttcaggtacttgaagaacctgtatcagcctagcgccgttaacatactccagcaggtcgagcagcgcaatggatctatcagaacttctgggaatctggagtcggcgggagccaatctcactaatctactgactggctcacgtaaaaacagggattctaattatcgccctctgctttcagagtctgcggagtctgtaagtgcaagcggcagctaagaattgtctaggctttccgtactagcatgacagtcatacactcatacagacggcagaacagtgaactgtaacagaatcatgcttgtactaaaaaatatttcgtcggggtcaaagccaataattgttttgttggcctaaatttgatcatttttctcagtctgcgctgtggcaccgtctgtgctgtccgctgtcgcacgtagggatggtaataggatctaaattttacgctataaaatttaattatcaaatcatattaggatttaat

SEQ ID NO: 16927 - DNA, 3567 bp, Zea Mays
cacacctgtacctgtttgctgctgttttttctcccacgcgatccaaccgtttgtttacgccgggctaggtttctcgaccgtacggggacaggacatcagtgcaactgtgcaagcgaccgccaccgcattacccggaactgcccagatcttcgtcgaatcgtcgggccctttgctggcgacgagcaaccacagcttgcaatggcacaatagtgacatcttgggaaacaatgaaacgttttgtctatatcaatgatgattcgtgccggtattcctactgtgacaaccggatatccaataccaagtatactctgtggaattttctcccgaaaaatttatgggagcaattcaggcgtttcatgaatcagtattttctactaatagcctgccttcagttgtggtcccgtatcacccctgtcagccctgcaactacatggggtccacttatcatcatcttcattgtttctgcttcaaaagaggcttgggatgattacaataggtatctttctgacaagaaagcaaatgagaggaaaatatggttggtaaaggatggcgtccgcatacagatcaaagcacaggaggtacatgttggagatttagtgtggctccatgagaatgatgagataccatgtgatcttgttctcattggcacttctgatcgacaaggcatttgttatgttgagactgctgctttggatggtgaaactgacttgaaaacaagaaccattcctccaatttctgctaacttgtcagtagagcagctaggaaaagtcaagggtgtaattgagtgccccaacccagacaatgacatacggagtcatgttaccttcgatacactgaatgggcttgtggagttgcagtttacacaggcaatgaaacaaaatctggaataagtaggggagctgcggagcccaagttcactgctgctgatgtaataatagacaagctcactattgcaatattcatgttccaagttgttgttgtacttgttctgggttattttgggaatacttggaaggacactcaggggcttaagcaatggtatcttatgtatcctatggaggtagagggcccatggtatgatttcttgattatcccgttacgctttgagctgttgtgctccataatgattccaatctccataaaggttactcttgatttggctaaaggtttgtatgcaaagtttattgactgggatgagcaaatgtttgattgggaaacaaatacacctgctcattcagctaactattagcgaggacctcggacagattgaatatattttgagtgacaaaactgggacactcacagagaataaaatgatcttcaaacaatgctgcataagtgatactttgtatggaaatgacaacggagatgcattaaacggcatgcttgttatgtgtatgaattatgagaaattgcggaggtggaattgggggataagggtacatcagccctctaaatggaggagactgagctgggcgtaatacaacacgtcaacacccatggttctatttctgcaagtgagcagttgtaacactccaactactccaagataagtttccgaaaaagaagatgtcagacttgtaaatgcggtctcaagtaatgatcctgatgtcatcaaatttctgttggttatggctctttgcaatacagtggtccctatcaaaagcaatgatggtactgtgtcatacaaagcacaatcccaagatgaggaagctttagttaacgctgcagcaaagctgaatatgatgctcatcagtaaagacaccattacagctgagatttgtttcaatgggtctaagttttggtatgagttgttggacattttggaattcacttctgatcgcaaaagaatgtctgtagtggtaaaggaaggggagactggtaagatccttcttttatcaaaaggtgctgatgaagctctcctgcctcgtgcctgtccaggacaacaaatacagagatatcttgaagcagtagaaatgtattctcagttgggattgcgaaccttatgtttggggtggcgtgatttaaaagaaaatgaatataaggaatggtccaaaaactttcaaaaggctagctgctcattggacaatagagagtttaaaattgctgaagtttgtaatagcttagagcaagaccttcaaattcttggtgttactgctatagaggatcgtcttcaggatggtgttcctgaaaccattaaattgttgaggaatgctggaattaatgtgtggatgctaaccggtgataagcaaaatacagcaattcagattggacttctctgtaacctcataacttctgggtcttgcatttgttttggatggttgggcacttgaattaattttgaagcattccaaggagtcttttactaggttggcgatgctgtcaaaaacagcaatatgctgtcgaatgacacctttgcagaaagcacagagttcaagtttcttaagagattgatacttattcatgggcgttattcatacaatcgaacagcatttatttcacagtactccttctacaagtcacttcttatgtgctttattcagattctgtttgcctttttgtcggggctatctgggactagcttattcaactcaattagcttgatggcttataacgttttctatacaagtttacccgtcatgactataatctttgacaaggatatctctgaaacaacggttatgcagtacccccagattttactgcattctcaagctgggaggcttttaaatctcactacattttgcggatggtttgggcgctcgctatatcacgcactcgtcgttttcttcattacgatatgcgcctactcagatgagaaaagtgagatgcaggaactgtcaatggtagcactgtccggttgcatttggttacaggcttttgttgtgacaatggatacaaactcattcacttgcccgcaaatccttctcatctggggaaactttgtggccttctacatgatcaacttaatactcagtaccgtcccaagtctccaactgtacacaatcacgttccgcctgtgtagccaaccttcctactggatctccatggctctgacggttgcagtaggaatgggaccggtggtggctttcaggtacttgaagaacctgtatcagcctagcgccgttaacatactccagcaggtcgagcagcgcaatggatctatcagaacttctgggaatctggagtcggcgggagccaatctcactaatctactgactggctcacgtaaaaacagggattctaattatcgccctctgctttcagagtctgcggagtctgtaagtgcaagcggcagctaagaattgtctaggctttccgtactagcatgacagtcatacactcatacagacggcagaacagtgaactgtaacagaatcatgcttgtactaaaaaatatttcgtcggggtcaaagccaataattgttttgttggcctaaatttgatcatttttctcagtctgcgctgtggcaccgtctgtgctgtccgctgtcgcacgtagggatggtaataggatctaaattttacgctataaaatttaattatcaaatcatattaggatttaat

SEQ ID NO: 16928 - DNA, 3561 bp, Zea Mays
cacccacacctgtacctgtttgctgctgttttttctcccacgcgatccaaccgtttgtttacgccgggctaggtttctcgaccgtacggggacaggacatcagtgcaactgtgcaagcgaccgccaccgcattacccggaactgcccagatcttcgtcgaatcgtcgggccctttgctggcgacgagcaaccacagcttgcaatggcacaatagtgacatcttgggaaacaatgaaacgttttgtctatatcaatgatgattcgtgccggtattcctactgtgacaaccggatatccaataccaagtatactctgtggaattttctcccgaaaaatttatgggagcaattcaggcgtttcatgaatcagtattttctactaatagcctgccttcagttgtggtcccgtatcacccctgtcagccctgcaactacatggggtccacttatcatcatcttcattgtttctgcttcaaaagaggcttgggatgattacaataggtatctttctgacaagaaagcaaatgagaggaaaatatggttggtaaaggatggcgtccgcatacagatcaaagcacaggaggtacatgttggagatttagtgtggctccatgagaatgatgagataccatgtgatcttgttctcattggcacttctgatcgacaaggcatttgttatgttgagactgctgctttggatggtgaaactgacttgaaaacaagaaccattcctccaatttctgctaacttgtcagtagagcagctaggaaaagtcaagggtgtaattgagtgccccaacccagacaatgacatacggaggtttgatgctaacatgcgcttgttcctccctataattgacaatgaaaaaagtcctttgactatcaacaatacacttcttcagtcatgttaccttcgatacactgaatgggcttgtggagttgcagtttacacaggcaatgaaacaaaatctggaataagtaggggagctgcggagcccaagttcactgctgctgatgtaataatagacaagctcactattgcaatattcatgttccaagttgttgttgtacttgttctgggttattttgggaatacttggaaggacactcaggggcttaagcaatggtatcttatgtatcctatggaggtagagggcccatggtatgatttcttgattatcccgttacgctttgagctgttgtgctccataatgattccaatctccataaaggttactcttgatttggctaaaggtttgtatgcaaagtttattgactgggatgagcaaatgtttgattgggaaacaaatacacctgctcattcagctaactattagcgaggacctcggacagattgaatatattttgagtgacaaaactgggacactcacagagaataaaatgatcttcaaacaatgctgcataagtgatactttgtatggaaatgacaacggagatgcattaaacgacttgtaaatgcggtctcaagtaatgatcctgatgtcatcaaatttctgttggttatggctctttgcaatacagtggtccctatcaaaagcaatgatggtactgtgtcatacaaagcacaatcccaagatgaggaagctttagttaacgctgcagcaaagctgaatatgatgctcatcagtaaagacaccattacagctgagatttgtttcaatgggtctaagttttggtatgagttgttggacattttggaattcacttctgatcgcaaaagaatgtctgtagtggtaaaggaaggggagactggtaagatccttcttttatcaaaaggtgctgatgaagctctcctgcctcgtgcctgtccaggacaacaaatacagagatatcttgaagcagtagaaatgtattctcagttgggattgcgaaccttatgtttggggtggcgtgatttaaaagaaaatgaatataaggaatggtccaaaaactttcaaaaggctagctgctcattggacaatagagagtttaaaattgctgaagtttgtaatagcttagagcaagaccttcaaattcttggtgttactgctatagaggatcgtcttcaggatggtgttcctgaaaccattaaattgttgaggaatgctggaattaatgtgtggatgctaaccggtgataagcaaaatacagcaattcagattggacttctctgtaacctcataacttctgggcccaatagtcaattgttatctatcagtgggaaaactgaagaggacgtgctaagaagcctagagagggcattatttattatgaaaaatacatctgaaacaaagggtcttgcatttgttttggatggttgggcacttgaattaattttgaagcattccaaggagtcttttactaggttggcgatgctgtcaaaaacagcaatatgctgtcgaatgacacctttgcagaaagcacagagttcaagtttcttaagagattgatacttattcatgggcgttattcatacaatcgaacagcatttatttcacagtactccttctacaagtcacttcttatgtgctttattcagattctgtttgcctttttgtcggggctatctgggactagcttattcaactcaattagcttgatggcttataacgttttctatacaagtttacccgtcatgactataatctttgacaaggatatctctgaaacaacggttatgcagtacccccagattttactgcattctcaagctgggaggcttttaaatctcactacattttgcggatggtttgggcgctcgctatatcacgcactcgtcgttttcttcattacgatatgcgcctactcagatgagaaaagtgagatgcaggaactgtcaatggtagcactgtccggttgcatttggttacaggcttttgttgtgacaatggatacaaactcattcacttgcccgcaaatccttctcatctggggaaactttgtggccttctacatgatcaacttaatactcagtaccgtcccaagtctccaactgtacacaatcacgttccgcctgtgtagccaaccttcctactggatctccatggctctgacggttgcagtaggaatgggaccggtggtggctttcaggtacttgaagaacctgtatcagcctagcgccgttaacatactccagcaggtcgagcagcgcaatggatctatcagaacttctgggaatctggagtcggcgggagccaatctcactaatctactgactggctcacgtaaaaacagggattctaattatcgccctctgctttcagagtctgcggagtctgtaagtgcaagcggcagctaagaattgtctaggctttccgtactagcatgacagtcatacactcatacagacggcagaacagtgaactgtaacagaatcatgcttgtactaaaaaatatttcgtcggggtcaaagccaataattgttttgttggcctaaatttgatcatttttctcagtctgcgctgtggcaccgtctgtgctgtccgctgtcgcacgtagggatggtaataggatctaaattttacgctataaaatttaattatcaaatcatattaggatttaat

SEQ ID NO: 16929 - DNA, 3982 bp, Zea Mays
gccacacccacacctgtacctgtttgctgctgttttttctcccacgcgatccaaccgtttgtttacgccgggctaggtttctcgaccgtacggggacaggacatcagtgcaactgtgcaagcgaccgccaccgcattacccggaactgcccagatcttcgtcgaatcgtcgggccctttgctggcgacgagcaaccacagcttgcaatggcacaatagtgacatcttgggaaacaatgaaacgttttgtctatatcaatgatgattcgtgccggtattcctactgtgacaaccggatatccaataccaagtatactctgtggaattttctcccgaaaaatttatgggagcaattcaggcgtttcatgaatcagtattttctactaatagcctgccttcagttgtggtcccgtatcacccctgtcagccctgcaactacatggggtccacttatcatcatcttcattgtttctgcttcaaaagaggcttgggatgattacaataggtatctttctgacaagaaagcaaatgagaggaaaatatggttggtaaaggatggcgtccgcatacagatcaaagcacaggaggtacatgttggagatttagtgtggctccatgagaatgatgagataccatgtgatcttgttctcattggcacttctgatcgacaaggcatttgttatgttgagactgctgctttggatggtgaaactgacttgaaaacaagaaccattcctccaatttctgctaacttgtcagtagagcagctaggaaaagtcaagggtgtaattgagtgccccaacccagacaatgacatacggaggtttgatgctaacatgcgcttgttcctccctataattgacaatgaaaaaagtcctttgactatcaacaatacacttcttcagtcatgttaccttcgatacactgaatgggcttgtggagttgcagtttacacaggcaatgaaacaaaatctggaataagtaggggagctgcggagcccaagttcactgctgctgatgtaataatagacaagctcactattgcaatattcatgttccaagttgttgttgtacttgttctgggttattttgggaatacttggaaggacactcaggggcttaagcaatggtatcttatgtatcctatggaggtagagggcccatggtatgatttcttgattatcccgttacgctttgagctgttgtgctccataatgattccaatctccataaaggttactcttgatttggctaaaggtttgtatgcaaagtttattgactgggatgagcaaatgtttgattgggaaacaaatacacctgctcattcagctaactattagcgaggacctcggacagattgaatatattttgagtgacaaaactgggacactcacagagaataaaatgatcttcaaacaatgctgcataagtgatactttgtatggaaatgacaacggagatgcattaaacggttgtctacttactcattatgttctttacatcctattaagggacaatgttcatccttttcttttctctattaaggcatgcttgttatgtgtatgaattatgagaaattgcggaggtggaattgggggataagggtacatcagccctctaaatggaggagactgagctgggcgtaatacaacacgtcaacacccatggttctatttctgcaagtgagcagttgtaacactccaactactccaagataagtttccgaaaaagaagacttgtaaatgcggtctcaagtaatgatcctgatgtcatcaaatttctgttggttatggctctttgcaatacagtggtccctatcaaaagcaatgatggtactgtgtcatacaaagcacaatcccaagatgaggaagctttagttaacgctgcagcaaagctgaatatgatgctcatcagtaaagacaccattacagctgagatttgtttcaatgggtctaagttttggtatgagttgttggacattttggaattcacttctgatcgcaaaagaatgtctgtagtggtaaaggaaggggagactggtaagatccttcttttatcaaaaggtgctgatgaagctctcctgcctcgtgcctgtccaggacaacaaatacagagatatcttgaagcagtagaaatgtattctcagttgggattgcgaaccttatgtttggggtggcgtgatttaaaagaaaatgaatataaggaatggtccaaaaactttcaaaaggctagctgctcattggacaatagagagtttaaaattgctgaagtttgtaatagcttagagcaagaccttcaaattcttggtgttactgctatagaggatcgtcttcaggatggtgttcctgaaaccattaaattgttgaggaatgctggaattaatgtgtggatgctaaccggtgataagcaaaatacagcaattcagattggacttctctgtaacctcataacttctgggcccaatagtcaattgttatctatcagtgggaaaactgaagaggacgtgctaagaagcctagagagggcattatttattatgaaaaatacatctgaaacaaagggtcttgcatttgttttggatggttgggcacttgaattaattttgaagcattccaaggagtcttttactaggttggcgatgctgtcaaaaacagcaatatgctgtcgaatgacacctttgcagaaagcacagcttgttgctatcctaaaatccgttggctacctaactctagcaattggtgatggtggtaatgatgttagaatgattcaagaggctaacattggagtagggattagtggtagggaaggactgcaagctgcaagagctgctgattatagcattgggaagttcaagtttcttaagagattgatacttattcatgggcgttattcatacaatcgaacagcatttatttcacagtactccttctacaagtcacttcttatgtgctttattcagattctgtttgcctttttgtcggggctatctgggactagcttattcaactcaattagcttgatggcttataacgttttctatacaagtttacccgtcatgactataatctttgacaaggatatctctgaaacaacggttatgcagtacccccagattttactgcattctcaagctgggaggcttttaaatctcactacattttgcggatggtttgggcgctcgctatatcacgcactcgtcgttttcttcattacgatatgcgcctactcagatgagaaaagtgagatgcaggaactgtcaatggtagcactgtccggttgcatttggttacaggcttttgttgtgacaatggatacaaactcattcacttgcccgcaaatccttctcatctggggaaactttgtggccttctacatgatcaacttaatactcagtaccgtcccaagtctccaactgtacacaatcacgttccgcctgtgtagccaaccttcctactggatctccatggctctgacggttgcagtaggaatgggaccggtggtggctttcaggtacttgaagaacctgtatcagcctagcgccgttaacatactccagcaggtcgagcagcgcaatggatctatcagaacttctgggaatctggagtcggcgggagccaatctcactaatctactgactggctcacgtaaaaacagggattctaattatcgccctctgctttcagagtctgcggagtctgtaagtgcaagcggcagctaagaattgtctaggctttccgtactagcatgacagtcatacactcatacagacggcagaacagtgaactgtaacagaatcatgcttgtactaaaaaatatttcgtcggggtcaaagccaataattgttttgttggcctaaatttgatcatttttctcagtctgcgctgtggcaccgtctgtgctgtccgctgtcgcacgtagggatggtaataggatctaaattttacgctataaaatttaattatcaaatcatattaggatttaat

SEQ ID NO: 16930 - DNA, 3876 bp, Zea Mays
ctagccacacccacacctgtacctgtttgctgctgttttttctcccacgcgatccaaccgtttgtttacgccgggctaggtttctcgaccgtacggggacaggacatcagtgcaactgtgcaagcgaccgccaccgcattacccggaactgcccagatcttcgtcgaatcgtcgggccctttgctggcgacgagcaaccacagcttgcaatggcacaatagtgacatcttgggaaacaatgaaacgttttgtctatatcaatgatgattcgtgccggtattcctactgtgacaaccggatatccaataccaagtatactctgtggaattttctcccgaaaaatttatgggagcaattcaggcgtttcatgaatcagtattttctactaatagcctgccttcagttgtggtcccgtatcacccctgtcagccctgcaactacatggggtccacttatcatcatcttcattgtttctgcttcaaaagaggcttgggatgattacaataggtatctttctgacaagaaagcaaatgagaggaaaatatggttggtaaaggatggcgtccgcatacagatcaaagcacaggaggtacatgttggagatttagtgtggctccatgagaatgatgagataccatgtgatcttgttctcattggcacttctgatcgacaaggcatttgttatgttgagactgctgctttggatggtgaaactgacttgaaaacaagaaccattcctccaatttctgctaacttgtcagtagagcagctaggaaaagtcaagggtgtaattgagtgccccaacccagacaatgacatacggaggtttgatgctaacatgcgcttgttcctccctataattgacaatgaaaaaagtcctttgactatcaacaatacacttcttcagtcatgttaccttcgatacactgaatgggcttgtggagttgcagtttacacaggcaatgaaacaaaatctggaataagtaggggagctgcggagcccaagttcactgctgctgatgtaataatagacaagctcactattgcaatattcatgttccaagttgttgttgtacttgttctgggttattttgggaatacttggaaggacactcaggggcttaagcaatggtatcttatgtatcctatggaggtagagggcccatggtatgatttcttgattatcccgttacgctttgagctgttgtgctccataatgattccaatctccataaaggttactcttgatttggctaaaggtttgtatgcaaagtttattgactgggatgagcaaatgtttgattgggaaacaaatacacctgctcattcagctaacacagctattagcgaggacctcggacagattgaatatattttgagtgacaaaactgggacactcacagagaataaaatgatcttcaaacaatgctgcataagtgatactttgtatggaaatgacaacggagatgcattaaacggttgtctacttactcattatgttctttacatcctattaagggacaatgttcatccttttcttttctctattaaggcatgcttgttatgtgtatgaattatgagaaattgcggaggtggaattgggggataagggtacatcagccctctaaatggaggagactgagctgggcgtaatacaacacgtcaacacccatggttctatttctgcaagtgagcagttgtaacactccaactactccaagataagtttccgaaaaagaagaagcaaagctgtttttcgtccactgacaattctctcaacttagatgtcagacttgtaaatgcggtctcaagtaatgatcctgatgtcatcaaatttctgttggttatggctctttgcaatacagtggtccctatcaaaagcaatgatggtactgtgtcatacaaagcacaatcccaagatgaggaagctttagttaacgctgcagcaaagctgaatatgatgctcatcagtaaagacaccattacagctgagatttgtttcaatgggtctaagttttggtatgagttgttggacattttggaattcacttctgatcgcaaaagaatgtctgtagtggtaaaggaaggggagactggtaagatccttcttttatcaaaaggtgctgatgaagctctcctgcctcgtgcctgtccaggacaacaaatacagagatatcttgaagcagtagaaatgtattctcagttgggattgcgaaccttatgtttggggtggcgtgatttaaaagaaaatgaatataaggaatggtccaaaaactttcaaaaggctagctgctcattggacaatagagagtttaaaattgctgaagtttgtaatagcttagagcaagaccttcaaattcttggtgttactgctatagaggatcgtcttcaggatggtgttcctgaaaccattaaattgttgaggaatgctggaattaatgtgtggatgctaaccggtgataagcaaaatacagcaattcagattggacttctctgtaacctcataacttctgtcaattgttatctatcagtgggaaaactgaagaggacgtgctaagaagcctagagagggcattatttattatgaaaaatacatctgaaacaaagggtcttgcatttgttttggatggttgggcacttgaattaattttgaagcattccaaggagtcttttactaggttggcgatgctgtcaaaaacagcaatatgctgtcgaatgacacctttgcagaaagcacagagttcaagtttcttaagagattgatacttattcatgggcgttattcatacaatcgaacagcatttatttcacagtactccttctacaagtcacttcttatgtgctttattcagattctgtttgcctttttgtcggggctatctgggactagcttattcaactcaattagcttgatggcttataacgttttctatacaagtttacccgtcatgactataatctttgacaaggatatctctgaaacaacggttatgcagtacccccagattttactgcattctcaagctgggaggcttttaaatctcactacattttgcggatggtttgggcgctcgctatatcacgcactcgtcgttttcttcattacgatatgcgcctactcagatgagaaaagtgagatgcaggaactgtcaatggtagcactgtccggttgcatttggttacaggcttttgttgtgacaatggatacaaactcattcacttgcccgcaaatccttctcatctggggaaactttgtggccttctacatgatcaacttaatactcagtaccgtcccaagtctccaactgtacacaatcacgttccgcctgtgtagccaaccttcctactggatctccatggctctgacggttgcagtaggaatgggaccggtggtggctttcaggtacttgaagaacctgtatcagcctagcgccgttaacatactccagcaggtcgagcagcgcaatggatctatcagaacttctgggaatctggagtcggcgggagccaatctcactaatctactgactggctcacgtaaaaacagggattctaattatcgccctctgctttcagagtctgcggagtctgtaagtgcaagcggcagctaagaattgtctaggctttccgtactagcatgacagtcatacactcatacagacggcagaacagtgaactgtaacagaatcatgcttgtactaaaaaatatttcgtcggggtcaaagccaataattgttttgttggcctaaatttgatcatttttctcagtctgcgctgtggcaccgtctgtgctgtccgctgtcgcacgtagggatggtaataggatctaaattttacgctataaaatttaattatcaaatcatattaggatttaat

SEQ ID NO: 16931 - DNA, 3579 bp, Zea Mays
atctctagccacacccacacctgtacctgtttgctgctgttttttctcccacgcgatccaaccgtttgtttacgccgggctaggtttctcgaccgtacggggacaggacatcagtgcaactgtgcaagcgaccgccaccgcattacccggaactgcccagatcttcgtcgaatcgtcgggccctttgctggcgacgagcaaccacagcttgcaatggcacaatagtgacatcttgggaaacaatgaaacgttttgtctatatcaatgatgattcgtgccggtattcctactgtgacaaccggatatccaataccaagtatactctgtggaattttctcccgaaaaatttatgggagcaattcaggcgtttcatgaatcagtattttctactaatagcctgccttcagttgtggtcccgtatcacccctgtcagccctgcaactacatggggtccacttatcatcatcttcattgtttctgcttcaaaagaggcttgggatgattacaataggtatctttctgacaagaaagcaaatgagaggaaaatatggttggtaaaggatggcgtccgcatacagatcaaagcacaggaggtacatgttggagatttagtgtggctccatgagaatgatgagataccatgtgatcttgttctcattggcacttctgatcgacaaggcatttgttatgttgagactgctgctttggatggtgaaactgacttgaaaacaagaaccattcctccaatttctgctaacttgtcagtagagcagctaggaaaagtcaagggtgtaattgagtgccccaacccagacaatgacatacggaggtttgatgctaacatgcgcttgttcctccctataattgacaatgaaaaaagtcctttgactatcaacaatacacttcttcagtcatgttaccttcgatacactgaatgggcttgtggagttgcagtttacacaggcaatgaaacaaaatctggaataagtaggggagctgcggagcccaagttcactgctgctgatgtaataatagacaagctcactattgcaatattcatgttccaagttgttgttgtacttgttctgggttattttgggaatacttggaaggacactcaggggcttaagcaatggtatcttatgtatcctatggaggtagagggcccatggtatgatttcttgattatcccgttacgctttgagctgttgtgctccataatgattccaatctccataaaggttactcttgatttggctaaaggtttgtatgcaaagtttattgactgggatgagcaaatgtttgattgggaaacaaatacacctgctcattcagctaactattagcgaggacctcggacagattgaatatattttgagtgacaaaactgggacactcacagagaataaaatgatcttcaaacaatgctgcataagtgatactttgtatggaaatgacaacggagatgcattaaacgatgtcagacttgtaaatgcggtctcaagtaatgatcctgatgtcatcaaatttctgttggttatggctctttgcaatacagtggtccctatcaaaagcaatgatggtactgtgtcatacaaagcacaatcccaagatgaggaagctttagttaacgctgcagcaaagctgaatatgatgctcatcagtaaagacaccattacagctgagatttgtttcaatgggtctaagttttggtatgagttgttggacattttggaattcacttctgatcgcaaaagaatgtctgtagtggtaaaggaaggggagactggtaagatccttcttttatcaaaaggtgctgatgaagctctcctgcctcgtgcctgtccaggacaacaaatacagagatatcttgaagcagtagaaatgtattctcagttgggattgcgaaccttatgtttggggtggcgtgatttaaaagaaaatgaatataaggaatggtccaaaaactttcaaaaggctagctgctcattggacaatagagagtttaaaattgctgaagtttgtaatagcttagagcaagaccttcaaattcttggtgttactgctatagaggatcgtcttcaggatggtgttcctgaaaccattaaattgttgaggaatgctggaattaatgtgtggatgctaaccggtgataagcaaaatacagcaattcagattggacttctctgtaacctcataacttctgggcccaatagtcaattgttatctatcagtgggaaaactgaagaggacgtgctaagaagcctagagagggcattatttattatgaaaaatacatctgaaacaaagggtcttgcatttgttttggatggttgggcacttgaattaattttgaagcattccaaggagtcttttactaggttggcgatgctgtcaaaaacagcaatatgctgtcgaatgacacctttgcagaaagcacagagttcaagtttcttaagagattgatacttattcatgggcgttattcatacaatcgaacagcatttatttcacagtactccttctacaagtcacttcttatgtgctttattcagattctgtttgcctttttgtcggggctatctgggactagcttattcaactcaattagcttgatggcttataacgttttctatacaagtttacccgtcatgactataatctttgacaaggatatctctgaaacaacggttatgcagtacccccagattttactgcattctcaagctgggaggcttttaaatctcactacattttgcggatggtttgggcgctcgctatatcacgcactcgtcgttttcttcattacgatatgcgcctactcagatgagaaaagtgagatgcaggaactgtcaatggtagcactgtccggttgcatttggttacaggcttttgttgtgacaatggatacaaactcattcacttgcccgcaaatccttctcatctggggaaactttgtggccttctacatgatcaacttaatactcagtaccgtcccaagtctccaactgtacacaatcacgttccgcctgtgtagccaaccttcctactggatctccatggctctgacggttgcagtaggaatgggaccggtggtggctttcaggtacttgaagaacctgtatcagcctagcgccgttaacatactccagcaggtcgagcagcgcaatggatctatcagaacttctgggaatctggagtcggcgggagccaatctcactaatctactgactggctcacgtaaaaacagggattctaattatcgccctctgctttcagagtctgcggagtctgtaagtgcaagcggcagctaagaattgtctaggctttccgtactagcatgacagtcatacactcatacagacggcagaacagtgaactgtaacagaatcatgcttgtactaaaaaatatttcgtcggggtcaaagccaataattgttttgttggcctaaatttgatcatttttctcagtctgcgctgtggcaccgtctgtgctgtccgctgtcgcacgtagggatggtaataggatctaaattttacgctataaaatttaattatcaaatcatattaggatttaat

SEQ ID NO: 16932 - DNA, 3848 bp, Zea Mays
catctctagccacacccacacctgtacctgtttgctgctgttttttctcccacgcgatccaaccgtttgtttacgccgggctaggtttctcgaccgtacggggacaggacatcagtgcaactgtgcaagcgaccgccaccgcattacccggaactgcccagatcttcgtcgaatcgtcgggccctttgctggcgacgagcaaccacagcttgcaatggcacaatagtgacatcttgggaaacaatgaaacgttttgtctatatcaatgatgattcgtgccggtattcctactgtgacaaccggatatccaataccaagtatactctgtggaattttctcccgaaaaatttatgggagcaattcaggcgtttcatgaatcagtattttctactaatagcctgccttcagttgtggtcccgtatcacccctgtcagccctgcaactacatggggtccacttatcatcatcttcattgtttctgcttcaaaagaggcttgggatgattacaataggtatctttctgacaagaaagcaaatgagaggaaaatatggttggtaaaggatggcgtccgcatacagatcaaagcacaggaggtacatgttggagatttagtgtggctccatgagaatgatgagataccatgtgatcttgttctcattggcacttctgatcgacaaggcatttgttatgttgagactgctgctttggatggtgaaactgacttgaaaacaagaaccattcctccaatttctgctaacttgtcagtagagcagctaggaaaagtcaagggtgtaattgagtgccccaacccagacaatgacatacggaggtttgatgctaacatgcgcttgttcctccctataattgacaatgaaaaaagtcctttgactatcaacaatacacttcttcagtcatgttaccttcgatacactgaatgggcttgtggagttgcagtttacacaggcaatgaaacaaaatctggaataagtaggggagctgcggagcccaagttcactgctgctgatgtaataatagacaagctcactattgcaatattcatgttccaagttgttgttgtacttgttctgggttattttgggaatacttggaaggacactcaggggcttaagcaatggtatcttatgtatcctatggaggtagagggcccatggtatgatttcttgattatcccgttacgctttgagctgttgtgctccataatgattccaatctccataaaggttactcttgatttggctaaaggtttgtatgcaaagtttattgactgggatgagcaaatgtttgattgggaaacaaatacacctgctcattcagctaacacagctattagcgaggacctcggacagattgaatatattttgagtgacaaaactgggacactcacagagaataaaatgatcttcaaacaatgctgcataagtgatactttgtatggaaatgacaacggagatgcattaaacggttgtctacttactcattatgttctttacatcctattaagggacaatgttcatccttttcttttctctattaaggcatgcttgttatgtgtatgaattatgagaaattgcggaggtggaattgggggataagggtacatcagccctctaaatggaggagactgagctgggcgtaatacaacacgtcaacacccatggttctatttctgcaagtgagcagttgtaacactccaactactccaagataagtttccgaaaaagaagatgtcagacttgtaaatgcggtctcaagtaatgatcctgatgtcatcaaatttctgttggttatggctctttgcaatacagtggtccctatcaaaagcaatgatggtactgtgtcatacaaagcacaatcccaagatgaggaagctttagttaacgctgcagcaaagctgaatatgatgctcatcagtaaagacaccattacagctgagatttgtttcaatgggtctaagttttggtatgagttgttggacattttggaattcacttctgatcgcaaaagaatgtctgtagtggtaaaggaaggggagactggtaagatccttcttttatcaaaaggtgctgatgaagctctcctgcctcgtgcctgtccaggacaacaaatacagagatatcttgaagcagtagaaatgtattctcagttgggattgcgaaccttatgtttggggtggcgtgatttaaaagaaaatgaatataaggaatggtccaaaaactttcaaaaggctagctgctcattggacaatagagagtttaaaattgctgaagtttgtaatagcttagagcaagaccttcaaattcttggtgttactgctatagaggatcgtcttcaggatggtgttcctgaaaccattaaattgttgaggaatgctggaattaatgtgtggatgctaaccggtgataagcaaaatacagcaattcagattggacttctctgtaacctcataacttctgggcccaatagtcaattgttatctatcagtgggaaaactgaagaggacgtgctaagaagcctagagagggcattatttattatgaaaaatacatctgaaacaaagggtcttgcatttgttttggatggttgggcacttgaattaattttgaagcattccaaggagtcttttactaggttggcgatgctgtcaaaaacagcaatatgctgtcgaatgacacctttgcagaaagcacagagttcaagtttcttaagagattgatacttattcatgggcgttattcatacaatcgaacagcatttatttcacagtactccttctacaagtcacttcttatgtgctttattcagattctgtttgcctttttgtcggggctatctgggactagcttattcaactcaattagcttgatggcttataacgttttctatacaagtttacccgtcatgactataatctttgacaaggatatctctgaaacaacggttatgcagtacccccagattttactgcattctcaagctgggaggcttttaaatctcactacattttgcggatggtttgggcgctcgctatatcacgcactcgtcgttttcttcattacgatatgcgcctactcagatgagaaaagtgagatgcaggaactgtcaatggtagcactgtccggttgcatttggttacaggcttttgttgtgacaatggatacaaactcattcacttgcccgcaaatccttctcatctggggaaactttgtggccttctacatgatcaacttaatactcagtaccgtcccaagtctccaactgtacacaatcacgttccgcctgtgtagccaaccttcctactggatctccatggctctgacggttgcagtaggaatgggaccggtggtggctttcaggtacttgaagaacctgtatcagcctagcgccgttaacatactccagcaggtcgagcagcgcaatggatctatcagaacttctgggaatctggagtcggcgggagccaatctcactaatctactgactggctcacgtaaaaacagggattctaattatcgccctctgctttcagagtctgcggagtctgtaagtgcaagcggcagctaagaattgtctaggctttccgtactagcatgacagtcatacactcatacagacggcagaacagtgaactgtaacagaatcatgcttgtactaaaaaatatttcgtcggggtcaaagccaataattgttttgttggcctaaatttgatcatttttctcagtctgcgctgtggcaccgtctgtgctgtccgctgtcgcacgtagggatggtaataggatctaaattttacgctataaaatttaattatcaaatcatattaggatttaat

SEQ ID NO: 16933 - DNA, 3656 bp, Zea Mays
cttacatctctagccacacccacacctgtacctgtttgctgctgttttttctcccacgcgatccaaccgtttgtttacgccgggctaggtttctcgaccgtacggggacaggacatcagtgcaactgtgcaagcgaccgccaccgcattacccggaactgcccagatcttcgtcgaatcgtcgggccctttgctggcgacgagcaaccacagcttgcaatggcacaatagtgacatcttgggaaacaatgaaacgttttgtctatatcaatgatgattcgtgccggtattcctactgtgacaaccggatatccaataccaagtatactctgtggaattttctcccgaaaaatttatgggagcaattcaggcgtttcatgaatcagtattttctactaatagcctgccttcagttgtggtcccgtatcacccctgtcagccctgcaactacatggggtccacttatcatcatcttcattgtttctgcttcaaaagaggcttgggatgattacaataggtatctttctgacaagaaagcaaatgagaggaaaatatggttggtaaaggatggcgtccgcatacagatcaaagcacaggaggtacatgttggagatttagtgtggctccatgagaatgatgagataccatgtgatcttgttctcattggcacttctgatcgacaaggcatttgttatgttgagactgctgctttggatggtgaaactgacttgaaaacaagaaccattcctccaatttctgctaacttgtcagtagagcagctaggaaaagtcaagggtgtaattgagtgccccaacccagacaatgacatacggagtcatgttaccttcgatacactgaatgggcttgtggagttgcagtttacacaggcaatgaaacaaaatctggaataagtaggggagctgcggagcccaagttcactgctgctgatgtaataatagacaagctcactattgcaatattcatgttccaagttgttgttgtacttgttctgggttattttgggaatacttggaaggacactcaggggcttaagcaatggtatcttatgtatcctatggaggtagagggcccatggtatgatttcttgattatcccgttacgctttgagctgttgtgctccataatgattccaatctccataaaggttactcttgatttggctaaaggtttgtatgcaaagtttattgactgggatgagcaaatgtttgattgggaaacaaatacacctgctcattcagctaactattagcgaggacctcggacagattgaatatattttgagtgacaaaactgggacactcacagagaataaaatgatcttcaaacaatgctgcataagtgatactttgtatggaaatgacaacggagatgcattaaacgatgtcagacttgtaaatgcggtctcaagtaatgatcctgatgtcatcaaatttctgttggttatggctctttgcaatacagtggtccctatcaaaagcaatgatggtactgtgtcatacaaagcacaatcccaagatgaggaagctttagttaacgctgcagcaaagctgaatatgatgctcatcagtaaagacaccattacagctgagatttgtttcaatgggtctaagttttggtatgagttgttggacattttggaattcacttctgatcgcaaaagaatgtctgtagtggtaaaggaaggggagactggtaagatccttcttttatcaaaaggtgctgatgaagctctcctgcctcgtgcctgtccaggacaacaaatacagagatatcttgaagcagtagaaatgtattctcagttgggattgcgaaccttatgtttggggtggcgtgatttaaaagaaaatgaatataaggaatggtccaaaaactttcaaaaggctagctgctcattggacaatagagagtttaaaattgctgaagtttgtaatagcttagagcaagaccttcaaattcttggtgttactgctatagaggatcgtcttcaggatggtgttcctgaaaccattaaattgttgaggaatgctggaattaatgtgtggatgctaaccggtgataagcaaaatacagcaattcagattggacttctctgtaacctcataacttctgggcccaatagtcaattgttatctatcagtgggaaaactgaagaggacgtgctaagaagcctagagagggcattatttattatgaaaaatacatctgaaacaaagggtcttgcatttgttttggatggttgggcacttgaattaattttgaagcattccaaggagtcttttactaggttggcgatgctgtcaaaaacagcaatatgctgtcgaatgacacctttgcagaaagcacagcttgttgctatcctaaaatccgttggctacctaactctagcaattggtgatggtggtaatgatgttagaatgattcaagaggctaacattggagtagggattagtggtagggaaggactgcaagctgcaagagctgctgattatagcattgggaagttcaagtttcttaagagattgatacttattcatgggcgttattcatacaatcgaacagcatttatttcacagtactccttctacaagtcacttcttatgtgctttattcagattctgtttgcctttttgtcggggctatctgggactagcttattcaactcaattagcttgatggcttataacgttttctatacaagtttacccgtcatgactataatctttgacaaggatatctctgaaacaacggttatgcagtacccccagattttactgcattctcaagctgggaggcttttaaatctcactacattttgcggatggtttgggcgctcgctatatcacgcactcgtcgttttcttcattacgatatgcgcctactcagatgagaaaagtgagatgcaggaactgtcaatggtagcactgtccggttgcatttggttacaggcttttgttgtgacaatggatacaaactcattcacttgcccgcaaatccttctcatctggggaaactttgtggccttctacatgatcaacttaatactcagtaccgtcccaagtctccaactgtacacaatcacgttccgcctgtgtagccaaccttcctactggatctccatggctctgacggttgcagtaggaatgggaccggtggtggctttcaggtacttgaagaacctgtatcagcctagcgccgttaacatactccagcaggtcgagcagcgcaatggatctatcagaacttctgggaatctggagtcggcgggagccaatctcactaatctactgactggctcacgtaaaaacagggattctaattatcgccctctgctttcagagtctgcggagtctgtaagtgcaagcggcagctaagaattgtctaggctttccgtactagcatgacagtcatacactcatacagacggcagaacagtgaactgtaacagaatcatgcttgtactaaaaaatatttcgtcggggtcaaagccaataattgttttgttggcctaaatttgatcatttttctcagtctgcgctgtggcaccgtctgtgctgtccgctgtcgcacgtagggatggtaataggatctaaattttacgctataaaatttaattatcaaatcatattaggatttaat

SEQ ID NO: 16934 - DNA, 3773 bp, Zea Mays
cttacatctctagccacacccacacctgtacctgtttgctgctgttttttctcccacgcgatccaaccgtttgtttacgccgggctaggtttctcgaccgtacggggacaggacatcagtgcaactgtgcaagcgaccgccaccgcattacccggaactgcccagatcttcgtcgaatcgtcgggccctttgctggcgacgagcaaccacagcttgcaatggcacaatagtgacatcttgggaaacaatgaaacgttttgtctatatcaatgatgattcgtgccggtattcctactgtgacaaccggatatccaataccaagtatactctgtggaattttctcccgaaaaatttatgggagcaattcaggcgtttcatgaatcagtattttctactaatagcctgccttcagttgtggtcccgtatcacccctgtcagccctgcaactacatggggtccacttatcatcatcttcattgtttctgcttcaaaagaggcttgggatgattacaataggtatctttctgacaagaaagcaaatgagaggaaaatatggttggtaaaggatggcgtccgcatacagatcaaagcacaggaggtacatgttggagatttagtgtggctccatgagaatgatgagataccatgtgatcttgttctcattggcacttctgatcgacaaggcatttgttatgttgagactgctgctttggatggtgaaactgacttgaaaacaagaaccattcctccaatttctgctaacttgtcagtagagcagctaggaaaagtcaagggtgtaattgagtgccccaacccagacaatgacatacggaggtttgatgctaacatgcgcttgttcctccctataattgacaatgaaaaaagtcctttgactatcaacaatacacttcttcagtcatgttaccttcgatacactgaatgggcttgtggagttgcagtttacacaggcaatgaaacaaaatctggaataagtaggggagctgcggagcccaagttcactgctgctgatgtaataatagacaagctcactattgcaatattcatgttccaagttgttgttgtacttgttctgggttattttgggaatacttggaaggacactcaggggcttaagcaatggtatcttatgtatcctatggaggtagagggcccatggtatgatttcttgattatcccgttacgctttgagctgttgtgctccataatgattccaatctccataaaggttactcttgatttggctaaaggtttgtatgcaaagtttattgactgggatgagcaaatgtttgattgggaaacaaatacacctgctcattcagctaactattagcgaggacctcggacagattgaatatattttgagtgacaaaactgggacactcacagagaataaaatgatcttcaaacaatgctgcataagtgatactttgtatggaaatgacaacggagatgcattaaacggcatgcttgttatgtgtatgaattatgagaaattgcggaggtggaattgggggataagggtacatcagccctctaaatggaggagactgagctgggcgtaatacaacacgtcaacacccatggttctatttctgcaagtgagcagttgtaacactccaactactccaagataagtttccgaaaaagaagatgtcagacttgtaaatgcggtctcaagtaatgatcctgatgtcatcaaatttctgttggttatggctctttgcaatacagtggtccctatcaaaagcaatgatggtactgtgtcatacaaagcacaatcccaagatgaggaagctttagttaacgctgcagcaaagctgaatatgatgctcatcagtaaagacaccattacagctgagatttgtttcaatgggtctaagttttggtatgagttgttggacattttggaattcacttctgatcgcaaaagaatgtctgtagtggtaaaggaaggggagactggtaagatccttcttttatcaaaaggtgctgatgaagctctcctgcctcgtgcctgtccaggacaacaaatacagagatatcttgaagcagtagaaatgtattctcagttgggattgcgaaccttatgtttggggtggcgtgatttaaaagaaaatgaatataaggaatggtccaaaaactttcaaaaggctagctgctcattggacaatagagagtttaaaattgctgaagtttgtaatagcttagagcaagaccttcaaattcttggtgttactgctatagaggatcgtcttcaggatggtgttcctgaaaccattaaattgttgaggaatgctggaattaatgtgtggatgctaaccggtgataagcaaaatacagcaattcagattggacttctctgtaacctcataacttctgggcccaatagtcaattgttatctatcagtgggaaaactgaagaggacgtgctaagaagcctagagagggcattatttattatgaaaaatacatctgaaacaaagggtcttgcatttgttttggatggttgggcacttgaattaattttgaagcattccaaggagtcttttactaggttggcgatgctgtcaaaaacagcaatatgctgtcgaatgacacctttgcagaaagcacagagttcaagtttcttaagagattgatacttattcatgggcgttattcatacaatcgaacagcatttatttcacagtactccttctacaagtcacttcttatgtgctttattcagattctgtttgcctttttgtcggggctatctgggactagcttattcaactcaattagcttgatggcttataacgttttctatacaagtttacccgtcatgactataatctttgacaaggatatctctgaaacaacggttatgcagtacccccagattttactgcattctcaagctgggaggcttttaaatctcactacattttgcggatggtttgggcgctcgctatatcacgcactcgtcgttttcttcattacgatatgcgcctactcagatgagaaaagtgagatgcaggaactgtcaatggtagcactgtccggttgcatttggttacaggcttttgttgtgacaatggatacaaactcattcacttgcccgcaaatccttctcatctggggaaactttgtggccttctacatgatcaacttaatactcagtaccgtcccaagtctccaactgtacacaatcacgttccgcctgtgtagccaaccttcctactggatctccatggctctgacggttgcagtaggaatgggaccggtggtggctttcaggtacttgaagaacctgtatcagcctagcgccgttaacatactccagcaggtcgagcagcgcaatggatctatcagaacttctgggaatctggagtcggcgggagccaatctcactaatctactgactggctcacgtaaaaacagggattctaattatcgccctctgctttcagagtctgcggagtctgtaagtgcaagcggcagctaagaattgtctaggctttccgtactagcatgacagtcatacactcatacagacggcagaacagtgaactgtaacagaatcatgcttgtactaaaaaatatttcgtcggggtcaaagccaataattgttttgttggcctaaatttgatcatttttctcagtctgcgctgtggcaccgtctgtgctgtccgctgtcgcacgtagggatggtaataggatctaaattttacgctataaaatttaattatcaaatcatattaggatttaat

SEQ ID NO: 16935 - DNA, 3751 bp, Zea Mays
cttacatctctagccacacccacacctgtacctgtttgctgctgttttttctcccacgcgatccaaccgtttgtttacgccgggctaggtttctcgaccgtacggggacaggacatcagtgcaactgtgcaagcgaccgccaccgcattacccggaactgcccagatcttcgtcgaatcgtcgggccctttgctggcgacgagcaaccacagcttgcaatggcacaatagtgacatcttgggaaacaatgaaacgttttgtctatatcaatgatgattcgtgccggtattcctactgtgacaaccggatatccaataccaagtatactctgtggaattttctcccgaaaaatttatgggagcaattcagtatttcaggcgtttcatgaatcagtattttctactaatagcctgccttcagttgtggtcccgtatcacccctgtcagccctgcaactacatggggtccacttatcatcatcttcattgtttctgcttcaaaagaggcttgggatgattacaataggtatctttctgacaagaaagcaaatgagaggaaaatatggttggtaaaggatggcgtccgcatacagatcaaagcacaggaggtacatgttggagatttagtgtggctccatgagaatgatgagataccatgtgatcttgttctcattggcacttctgatcgacaaggcatttgttatgttgagactgctgctttggatggtgaaactgacttgaaaacaagaaccattcctccaatttctgctaacttgtcagtagagcagctaggaaaagtcaagggtgtaattgagtgccccaacccagacaatgacatacggaggtttgatgctaacatgcgcttgttcctccctataattgacaatgaaaaaagtcctttgactatcaacaatacacttcttcagtcatgttaccttcgatacactgaatgggcttgtggagttgcagtttacacaggcaatgaaacaaaatctggaataagtaggggagctgcggagcccaagttcactgctgctgatgtaataatagacaagctcactattgcaatattcatgttccaagttgttgttgtacttgttctgggttattttgggaatacttggaaggacactcaggggcttaagcaatggtatcttatgtatcctatggaggtagagggcccatggtatgatttcttgattatcccgttacgctttgagctgttgtgctccataatgattccaatctccataaaggttactcttgatttggctaaaggtttgtatgcaaagtttattgactgggatgagcaaatgtttgattgggaaacaaatacacctgctcattcagctaacacagctattagcgaggacctcggacagattgaatatattttgagtgacaaaactgggacactcacagagaataaaatgatcttcaaacaatgctgcataagtgatactttgtatggaaatgacaacggagatgcattaaacgatgtcagacttgtaaatgcggtctcaagtaatgatcctgatgtcatcaaatttctgttggttatggctctttgcaatacagtggtccctatcaaaagcaatgatggtactgtgtcatacaaagcacaatcccaagatgaggaagctttagttaacgctgcagcaaagctgaatatgatgctcatcagtaaagacaccattacagctgagatttgtttcaatgggtctaagttttggtatgagttgttggacattttggaattcacttctgatcgcaaaagaatgtctgtagtggtaaaggaaggggagactggtaagatccttcttttatcaaaaggtgctgatgaagctctcctgcctcgtgcctgtccaggacaacaaatacagagatatcttgaagcagtagaaatgtattctcagttgggattgcgaaccttatgtttggggtggcgtgatttaaaagaaaatgaatataaggaatggtccaaaaactttcaaaaggctagctgctcattggacaatagagagtttaaaattgctgaagtttgtaatagcttagagcaagaccttcaaattcttggtgttactgctatagaggatcgtcttcaggatggtgttcctgaaaccattaaattgttgaggaatgctggaattaatgtgtggatgctaaccggtgataagcaaaatacagcaattcagattggacttctctgtaacctcataacttctgggcccaatagtcaattgttatctatcagtgggaaaactgaagaggacgtgctaagaagcctagagagggcattatttattatgaaaaatacatctgaaacaaagggtcttgcatttgttttggatggttgggcacttgaattaattttgaagcattccaaggagtcttttactaggttggcgatgctgtcaaaaacagcaatatgctgtcgaatgacacctttgcagaaagcacagcttgttgctatcctaaaatccgttggctacctaactctagcaattggtgatggtggtaatgatgttagaatgattcaagaggctaacattggagtagggattagtggtagggaaggactgcaagctgcaagagctgctgattatagcattgggaagttcaagtttcttaagagattgatacttattcatgggcgttattcatacaatcgaacagcatttatttcacagtactccttctacaagtcacttcttatgtgctttattcagattctgtttgcctttttgtcggggctatctgggactagcttattcaactcaattagcttgatggcttataacgttttctatacaagtttacccgtcatgactataatctttgacaaggatatctctgaaacaacggttatgcagtacccccagattttactgcattctcaagctgggaggcttttaaatctcactacattttgcggatggtttgggcgctcgctatatcacgcactcgtcgttttcttcattacgatatgcgcctactcagatgagaaaagtgagatgcaggaactgtcaatggtagcactgtccggttgcatttggttacaggcttttgttgtgacaatggatacaaactcattcacttgcccgcaaatccttctcatctggggaaactttgtggccttctacatgatcaacttaatactcagtaccgtcccaagtctccaactgtacacaatcacgttccgcctgtgtagccaaccttcctactggatctccatggctctgacggttgcagtaggaatgggaccggtggtggctttcaggtacttgaagaacctgtatcagcctagcgccgttaacatactccagcaggtcgagcagcgcaatggatctatcagaacttctgggaatctggagtcggcgggagccaatctcactaatctactgactggctcacgtaaaaacagggattctaattatcgccctctgctttcagagtctgcggagtctgtaagtgcaagcggcagctaagaattgtctaggctttccgtactagcatgacagtcatacactcatacagacggcagaacagtgaactgtaacagaatcatgcttgtactaaaaaatatttcgtcggggtcaaagccaataattgttttgttggcctaaatttgatcatttttctcagtctgcgctgtggcaccgtctgtgctgtccgctgtcgcacgtagggatggtaataggatctaaattttacgctataaaatttaattatcaaatcatattaggatttaat

SEQ ID NO: 16936 - DNA, 3707 bp, Zea Mays
ggccttacatctctagccacacccacacctgtacctgtttgctgctgttttttctcccacgcgatccaaccgtttgtttacgccgggctaggtttctcgaccgtacggggacaggacatcagtgcaactgtgcaagcgaccgccaccgcattacccggaactgcccagatcttcgtcgaatcgtcgggccctttgctggcgacgagcaaccacagcttgcaatggcacaatagtgacatcttgggaaacaatgaaacgttttgtctatatcaatgatgattcgtgccggtattcctactgtgacaaccggatatccaataccaagtatactctgtggaattttctcccgaaaaatttatgggagcaattcaggcgtttcatgaatcagtattttctactaatagcctgccttcagttgtggtcccgtatcacccctgtcagccctgcaactacatggggtccacttatcatcatcttcattgtttctgcttcaaaagaggcttgggatgattacaataggtatctttctgacaagaaagcaaatgagaggaaaatatggttggtaaaggatggcgtccgcatacagatcaaagcacaggaggtacatgttggagatttagtgtggctccatgagaatgatgagataccatgtgatcttgttctcattggcacttctgatcgacaaggcatttgttatgttgagactgctgctttggatggtgaaactgacttgaaaacaagaaccattcctccaatttctgctaacttgtcagtagagcagctaggaaaagtcaagggtgtaattgagtgccccaacccagacaatgacatacggagtcatgttaccttcgatacactgaatgggcttgtggagttgcagtttacacaggcaatgaaacaaaatctggaataagtaggggagctgcggagcccaagttcactgctgctgatgtaataatagacaagctcactattgcaatattcatgttccaagttgttgttgtacttgttctgggttattttgggaatacttggaaggacactcaggggcttaagcaatggtatcttatgtatcctatggaggtagagggcccatggtatgatttcttgattatcccgttacgctttgagctgttgtgctccataatgattccaatctccataaaggttactcttgatttggctaaaggtttgtatgcaaagtttattgactgggatgagcaaatgtttgattgggaaacaaatacacctgctcattcagctaacacagctattagcgaggacctcggacagattgaatatattttgagtgacaaaactgggacactcacagagaataaaatgatcttcaaacaatgctgcataagtgatactttgtatggaaatgacaacggagatgcattaaacgaagcaaagctgtttttcgtccactgacaattctctcaacttagatgtcagacttgtaaatgcggtctcaagtaatgatcctgatgtcatcaaatttctgttggttatggctctttgcaatacagtggtccctatcaaaagcaatgatggtactgtgtcatacaaagcacaatcccaagatgaggaagctttagttaacgctgcagcaaagctgaatatgatgctcatcagtaaagacaccattacagctgagatttgtttcaatgggtctaagttttggtatgagttgttggacattttggaattcacttctgatcgcaaaagaatgtctgtagtggtaaaggaaggggagactggtaagatccttcttttatcaaaaggtgctgatgaagctctcctgcctcgtgcctgtccaggacaacaaatacagagatatcttgaagcagtagaaatgtattctcagttgggattgcgaaccttatgtttggggtggcgtgatttaaaagaaaatgaatataaggaatggtccaaaaactttcaaaaggctagctgctcattggacaatagagagtttaaaattgctgaagtttgtaatagcttagagcaagaccttcaaattcttggtgttactgctatagaggatcgtcttcaggatggtgttcctgaaaccattaaattgttgaggaatgctggaattaatgtgtggatgctaaccggtgataagcaaaatacagcaattcagattggacttctctgtaacctcataacttctgggcccaatagtcaattgttatctatcagtgggaaaactgaagaggacgtgctaagaagcctagagagggcattatttattatgaaaaatacatctgaaacaaagggtcttgcatttgttttggatggttgggcacttgaattaattttgaagcattccaaggagtcttttactaggttggcgatgctgtcaaaaacagcaatatgctgtcgaatgacacctttgcagaaagcacagcttgttgctatcctaaaatccgttggctacctaactctagcaattggtgatggtggtaatgatgttagaatgattcaagaggctaacattggagtagggattagtggtagggaaggactgcaagctgcaagagctgctgattatagcattgggaagttcaagtttcttaagagattgatacttattcatgggcgttattcatacaatcgaacagcatttatttcacagtactccttctacaagtcacttcttatgtgctttattcagattctgtttgcctttttgtcggggctatctgggactagcttattcaactcaattagcttgatggcttataacgttttctatacaagtttacccgtcatgactataatctttgacaaggatatctctgaaacaacggttatgcagtacccccagattttactgcattctcaagctgggaggcttttaaatctcactacattttgcggatggtttgggcgctcgctatatcacgcactcgtcgttttcttcattacgatatgcgcctactcagatgagaaaagtgagatgcaggaactgtcaatggtagcactgtccggttgcatttggttacaggcttttgttgtgacaatggatacaaactcattcacttgcccgcaaatccttctcatctggggaaactttgtggccttctacatgatcaacttaatactcagtaccgtcccaagtctccaactgtacacaatcacgttccgcctgtgtagccaaccttcctactggatctccatggctctgacggttgcagtaggaatgggaccggtggtggctttcaggtacttgaagaacctgtatcagcctagcgccgttaacatactccagcaggtcgagcagcgcaatggatctatcagaacttctgggaatctggagtcggcgggagccaatctcactaatctactgactggctcacgtaaaaacagggattctaattatcgccctctgctttcagagtctgcggagtctgtaagtgcaagcggcagctaagaattgtctaggctttccgtactagcatgacagtcatacactcatacagacggcagaacagtgaactgtaacagaatcatgcttgtactaaaaaatatttcgtcggggtcaaagccaataattgttttgttggcctaaatttgatcatttttctcagtctgcgctgtggcaccgtctgtgctgtccgctgtcgcacgtagggatggtaataggatctaaattttacgctataaaatttaattatcaaatcatattaggatttaat

SEQ ID NO: 16937 - DNA, 3692 bp, Zea Mays
gtttttcctctcatttggtgccaagctaggccttacatctctagccacacccacacctgtacctgtttgctgctgttttttctcccacgcgatccaaccgtttgtttacgccgggctaggtttctcgaccgtacggggacaggacatcagtgcaactgtgcaagcgaccgccaccgcattacccggaactgcccagatcttcgtcgaatcgtcgggccctttgctggcgacgagcaaccacagcttgcaatggcacaatagtgacatcttgggaaacaatgaaacgttttgtctatatcaatgatgattcgtgccggtattcctactgtgacaaccggatatccaataccaagtatactctgtggaattttctcccgaaaaatttatgggagcaattcaggcgtttcatgaatcagtattttctactaatagcctgccttcagttgtggtcccgtatcacccctgtcagccctgcaactacatggggtccacttatcatcatcttcattgtttctgcttcaaaagaggcttgggatgattacaataggtatctttctgacaagaaagcaaatgagaggaaaatatggttggtaaaggatggcgtccgcatacagatcaaagcacaggaggtacatgttggagatttagtgtggctccatgagaatgatgagataccatgtgatcttgttctcattggcacttctgatcgacaaggcatttgttatgttgagactgctgctttggatggtgaaactgacttgaaaacaagaaccattcctccaatttctgctaacttgtcagtagagcagctaggaaaagtcaagggtgtaattgagtgccccaacccagacaatgacatacggagtcatgttaccttcgatacactgaatgggcttgtggagttgcagtttacacaggcaatgaaacaaaatctggaataagtaggggagctgcggagcccaagttcactgctgctgatgtaataatagacaagctcactattgcaatattcatgttccaagttgttgttgtacttgttctgggttattttgggaatacttggaaggacactcaggggcttaagcaatggtatcttatgtatcctatggaggtagagggcccatggtatgatttcttgattatcccgttacgctttgagctgttgtgctccataatgattccaatctccataaaggttactcttgatttggctaaaggtttgtatgcaaagtttattgactgggatgagcaaatgtttgattgggaaacaaatacacctgctcattcagctaacacagctattagcgaggacctcggacagattgaatatattttgagtgacaaaactgggacactcacagagaataaaatgatcttcaaacaatgctgcataagtgatactttgtatggaaatgacaacggagatgcattaaacgatgtcagacttgtaaatgcggtctcaagtaatgatcctgatgtcatcaaatttctgttggttatggctctttgcaatacagtggtccctatcaaaagcaatgatggtactgtgtcatacaaagcacaatcccaagatgaggaagctttagttaacgctgcagcaaagctgaatatgatgctcatcagtaaagacaccattacagctgagatttgtttcaatgggtctaagttttggtatgagttgttggacattttggaattcacttctgatcgcaaaagaatgtctgtagtggtaaaggaaggggagactggtaagatccttcttttatcaaaaggtgctgatgaagctctcctgcctcgtgcctgtccaggacaacaaatacagagatatcttgaagcagtagaaatgtattctcagttgggattgcgaaccttatgtttggggtggcgtgatttaaaagaaaatgaatataaggaatggtccaaaaactttcaaaaggctagctgctcattggacaatagagagtttaaaattgctgaagtttgtaatagcttagagcaagaccttcaaattcttggtgttactgctatagaggatcgtcttcaggatggtgttcctgaaaccattaaattgttgaggaatgctggaattaatgtgtggatgctaaccggtgataagcaaaatacagcaattcagattggacttctctgtaacctcataacttctgggcccaatagtcaattgttatctatcagtgggaaaactgaagaggacgtgctaagaagcctagagagggcattatttattatgaaaaatacatctgaaacaaagggtcttgcatttgttttggatggttgggcacttgaattaattttgaagcattccaaggagtcttttactaggttggcgatgctgtcaaaaacagcaatatgctgtcgaatgacacctttgcagaaagcacagcttgttgctatcctaaaatccgttggctacctaactctagcaattggtgatggtggtaatgatgttagaatgattcaagaggctaacattggagtagggattagtggtagggaaggactgcaagctgcaagagctgctgattatagcattgggaagttcaagtttcttaagagattgatacttattcatgggcgttattcatacaatcgaacagcatttatttcacagtactccttctacaagtcacttcttatgtgctttattcagattctgtttgcctttttgtcggggctatctgggactagcttattcaactcaattagcttgatggcttataacgttttctatacaagtttacccgtcatgactataatctttgacaaggatatctctgaaacaacggttatgcagtacccccagattttactgcattctcaagctgggaggcttttaaatctcactacattttgcggatggtttgggcgctcgctatatcacgcactcgtcgttttcttcattacgatatgcgcctactcagatgagaaaagtgagatgcaggaactgtcaatggtagcactgtccggttgcatttggttacaggcttttgttgtgacaatggatacaaactcattcacttgcccgcaaatccttctcatctggggaaactttgtggccttctacatgatcaacttaatactcagtaccgtcccaagtctccaactgtacacaatcacgttccgcctgtgtagccaaccttcctactggatctccatggctctgacggttgcagtaggaatgggaccggtggtggctttcaggtacttgaagaacctgtatcagcctagcgccgttaacatactccagcaggtcgagcagcgcaatggatctatcagaacttctgggaatctggagtcggcgggagccaatctcactaatctactgactggctcacgtaaaaacagggattctaattatcgccctctgctttcagagtctgcggagtctgtaagtgcaagcggcagctaagaattgtctaggctttccgtactagcatgacagtcatacactcatacagacggcagaacagtgaactgtaacagaatcatgcttgtactaaaaaatatttcgtcggggtcaaagccaataattgttttgttggcctaaatttgatcatttttctcagtctgcgctgtggcaccgtctgtgctgtccgctgtcgcacgtagggatggtaataggatctaaattttacgctataaaatttaattatcaaatcatattaggatttaat

SEQ ID NO: 16938 - DNA, 3963 bp, Zea Mays
gtttttcctctcatttggtgccaagctaggccttacatctctagccacacccacacctgtacctgtttgctgctgttttttctcccacgcgatccaaccgtttgtttacgccgggctaggtttctcgaccgtacggggacaggacatcagtgcaactgtgcaagcgaccgccaccgcattacccggaactgcccagatcttcgtcgaatcgtcgggccctttgctggcgacgagcaaccacagcttgcaatggcacaatagtgacatcttgggaaacaatgaaacgttttgtctatatcaatgatgattcgtgccggtattcctactgtgacaaccggatatccaataccaagtatactctgtggaattttctcccgaaaaatttatgggagcaattcaggcgtttcatgaatcagtattttctactaatagcctgccttcagttgtggtcccgtatcacccctgtcagccctgcaactacatggggtccacttatcatcatcttcattgtttctgcttcaaaagaggcttgggatgattacaataggtatctttctgacaagaaagcaaatgagaggaaaatatggttggtaaaggatggcgtccgcatacagatcaaagcacaggaggtacatgttggagatttagtgtggctccatgagaatgatgagataccatgtgatcttgttctcattggcacttctgatcgacaaggcatttgttatgttgagactgctgctttggatggtgaaactgacttgaaaacaagaaccattcctccaatttctgctaacttgtcagtagagcagctaggaaaagtcaagggtgtaattgagtgccccaacccagacaatgacatacggaggtttgatgctaacatgcgcttgttcctccctataattgacaatgaaaaaagtcctttgactatcaacaatacacttcttcagtcatgttaccttcgatacactgaatgggcttgtggagttgcagtttacacaggcaatgaaacaaaatctggaataagtaggggagctgcggagcccaagttcactgctgctgatgtaataatagacaagctcactattgcaatattcatgttccaagttgttgttgtacttgttctgggttattttgggaatacttggaaggacactcaggggcttaagcaatggtatcttatgtatcctatggaggtagagggcccatggtatgatttcttgattatcccgttacgctttgagctgttgtgctccataatgattccaatctccataaaggttactcttgatttggctaaaggtttgtatgcaaagtttattgactgggatgagcaaatgtttgattgggaaacaaatacacctgctcattcagctaacacagctattagcgaggacctcggacagattgaatatattttgagtgacaaaactgggacactcacagagaataaaatgatcttcaaacaatgctgcataagtgatactttgtatggaaatgacaacggagatgcattaaacggcatgcttgttatgtgtatgaattatgagaaattgcggaggtggaattgggggataagggtacatcagccctctaaatggaggagactgagctgggcgtaatacaacacgtcaacacccatggttctatttctgcaagtgagcagttgtaacactccaactactccaagataagtttccgaaaaagaagatgtcagacttgtaaatgcggtctcaagtaatgatcctgatgtcatcaaatttctgttggttatggctctttgcaatacagtggtccctatcaaaagcaatgatggtactgtgtcatacaaagcacaatcccaagatgaggaagctttagttaacgctgcagcaaagctgaatatgatgctcatcagtaaagacaccattacagctgagatttgtttcaatgggtctaagttttggtatgagttgttggacattttggaattcacttctgatcgcaaaagaatgtctgtagtggtaaaggaaggggagactggtaagatccttcttttatcaaaaggtgctgatgaagctctcctgcctcgtgcctgtccaggacaacaaatacagagatatcttgaagcagtagaaatgtattctcagttgggattgcgaaccttatgtttggggtggcgtgatttaaaagaaaatgaatataaggaatggtccaaaaactttcaaaaggctagctgctcattggacaatagagagtttaaaattgctgaagtttgtaatagcttagagcaagaccttcaaattcttggtgttactgctatagaggatcgtcttcaggatggtgttcctgaaaccattaaattgttgaggaatgctggaattaatgtgtggatgctaaccggtgataagcaaaatacagcaattcagattggacttctctgtaacctcataacttctgggcccaatagtcaattgttatctatcagtgggaaaactgaagaggacgtgctaagaagcctagagagggcattatttattatgaaaaatacatctgaaacaaagggtcttgcatttgttttggatggttgggcacttgaattaattttgaagcattccaaggagtcttttactaggttggcgatgctgtcaaaaacagcaatatgctgtcgaatgacacctttgcagaaagcacagcttgttgctatcctaaaatccgttggctacctaactctagcaattggtgatggtggtaatgatgttagaatgattcaagaggctaacattggagtagggattagtggtagggaaggactgcaagctgcaagagctgctgattatagcattgggaagttcaagtttcttaagagattgatacttattcatgggcgttattcatacaatcgaacagcatttatttcacagtactccttctacaagtcacttcttatgtgctttattcagattctgtttgcctttttgtcggggctatctgggactagcttattcaactcaattagcttgatggcttataacgttttctatacaagtttacccgtcatgactataatctttgacaaggatatctctgaaacaacggttatgcagtacccccagattttactgcattctcaagctgggaggcttttaaatctcactacattttgcggatggtttgggcgctcgctatatcacgcactcgtcgttttcttcattacgatatgcgcctactcagatgagaaaagtgagatgcaggaactgtcaatggtagcactgtccggttgcatttggttacaggcttttgttgtgacaatggatacaaactcattcacttgcccgcaaatccttctcatctggggaaactttgtggccttctacatgatcaacttaatactcagtaccgtcccaagtctccaactgtacacaatcacgttccgcctgtgtagccaaccttcctactggatctccatggctctgacggttgcagtaggaatgggaccggtggtggctttcaggtacttgaagaacctgtatcagcctagcgccgttaacatactccagcaggtcgagcagcgcaatggatctatcagaacttctgggaatctggagtcggcgggagccaatctcactaatctactgactggctcacgtaaaaacagggattctaattatcgccctctgctttcagagtctgcggagtctgtaagtgcaagcggcagctaagaattgtctaggctttccgtactagcatgacagtcatacactcatacagacggcagaacagtgaactgtaacagaatcatgcttgtactaaaaaatatttcgtcggggtcaaagccaataattgttttgttggcctaaatttgatcatttttctcagtctgcgctgtggcaccgtctgtgctgtccgctgtcgcacgtagggatggtaataggatctaaattttacgctataaaatttaattatcaaatcatattaggatttaat

SEQ ID NO: 16939 - DNA, 3550 bp, Zea Mays
cttggtagccttgtttttcctctcatttggtgccaagctaggccttacatctctagccacacccacacctgtacctgtttgctgctgttttttctcccacgcgatccaaccgtttgtttacgccgggctaggtttctcgaccgtacggggacaggacatcagtgcaactgtgcaagcgaccgccaccgcattacccggaactgcccagatcttcgtcgaatcgtcgggccctttgctggcgacgagcaaccacagcttgcaatggcacaatagtgacatcttgggaaacaatgaaacgttttgtctatatcaatgatgattcgtgccggtattcctactgtgacaaccggatatccaataccaagtatactctgtggaattttctcccgaaaaatttatgggagcaattcaggcgtttcatgaatcagtattttctactaatagcctgccttcagttgtggtcccgtatcacccctgtcagccctgcaactacatggggtccacttatcatcatcttcattgtttctgcttcaaaagaggcttgggatgattacaataggtatctttctgacaagaaagcaaatgagaggaaaatatggttggtaaaggatggcgtccgcatacagatcaaagcacaggaggtacatgttggagatttagtgtggctccatgagaatgatgagataccatgtgatcttgttctcattggcacttctgatcgacaaggcatttgttatgttgagactgctgctttggatggtgaaactgacttgaaaacaagaaccattcctccaatttctgctaacttgtcagtagagcagctaggaaaagtcaagggtgtaattgagtgccccaacccagacaatgacatacggagtcatgttaccttcgatacactgaatgggcttgtggagttgcagtttacacaggcaatgaaacaaaatctggaataagtaggggagctgcggagcccaagttcactgctgctgatgtaataatagacaagctcactattgcaatattcatgttccaagttgttgttgtacttgttctgggttattttgggaatacttggaaggacactcaggggcttaagcaatggtatcttatgtatcctatggaggtagagggcccatggtatgatttcttgattatcccgttacgctttgagctgttgtgctccataatgattccaatctccataaaggttactcttgatttggctaaaggtttgtatgcaaagtttattgactgggatgagcaaatgtttgattgggaaacaaatacacctgctcattcagctaacacagctattagcgaggacctcggacagattgaatatattttgagtgacaaaactgggacactcacagagaataaaatgatcttcaaacaatgctgcataagtgatactttgtatggaaatgacaacggagatgcattaaacgatgtcagacttgtaaatgcggtctcaagtaatgatcctgatgtcatcaaatttctgttggttatggctctttgcaatacagtggtccctatcaaaagcaatgatggtactgtgtcatacaaagcacaatcccaagatgaggaagctttagttaacgctgcagcaaagctgaatatgatgctcatcagtaaagacaccattacagctgagatttgtttcaatgggtctaagttttggtatgagttgttggacattttggaattcacttctgatcgcaaaagaatgtctgtagtggtaaaggaaggggagactggtaagatccttcttttatcaaaaggtgctgatgaagctctcctgcctcgtgcctgtccaggacaacaaatacagagatatcttgaagcagtagaaatgtattctcagttgggattgcgaaccttatgtttggggtggcgtgatttaaaagaaaatgaatataaggaatggtccaaaaactttcaaaaggctagctgctcattggacaatagagagtttaaaattgctgaagtttgtaatagcttagagcaagaccttcaaattcttggtgttactgctatagaggatcgtcttcaggatggtgttcctgaaaccattaaattgttgaggaatgctggaattaatgtgtggatgctaaccggtgataagcaaaatacagcaattcagattggacttctctgtaacctcataacttctgggcccaatagtcaattgttatctatcagtgggaaaactgaagaggacgtgctaagaagcctagagagggcattatttattatgaaaaatacatctgaaacaaagggtcttgcatttgttttggatggttgggcacttgaattaattttgaagcattccaaggagtcttttactaggttggcgatgctgtcaaaaacagcaatatgctgtcgaatgacacctttgcagaaagcacagagttcaagtttcttaagagattgatacttattcatgggcgttattcatacaatcgaacagcatttatttcacagtactccttctacaagtcacttcttatgtgctttattcagattctgtttgcctttttgtcggggctatctgggactagcttattcaactcaattagcttgatggcttataacgttttctatacaagtttacccgtcatgactataatctttgacaaggatatctctgaaacaacggttatgcagtacccccagattttactgcattctcaagctgggaggcttttaaatctcactacattttgcggatggtttgggcgctcgctatatcacgcactcgtcgttttcttcattacgatatgcgcctactcagatgagaaaagtgagatgcaggaactgtcaatggtagcactgtccggttgcatttggttacaggcttttgttgtgacaatggatacaaactcattcacttgcccgcaaatccttctcatctggggaaactttgtggccttctacatgatcaacttaatactcagtaccgtcccaagtctccaactgtacacaatcacgttccgcctgtgtagccaaccttcctactggatctccatggctctgacggttgcagtaggaatgggaccggtggtggctttcaggtacttgaagaacctgtatcagcctagcgccgttaacatactccagcaggtcgagcagcgcaatggatctatcagaacttctgggaatctggagtcggcgggagccaatctcactaatctactgactggctcacgtaaaaacagggattctaattatcgccctctgctttcagagtctgcggagtctgtaagtgcaagcggcagctaagaattgtctaggctttccgtactagcatgacagtcatacactcatacagacggcagaacagtgaactgtaacagaatcatgcttgtactaaaaaatatttcgtcggggtcaaagccaataattgttttgttggcctaaatttgatcatttttctcagtctgcgctgtggcaccgtctgtgctgtccgctgtcgcacgtagggatggtaataggatctaaattttacgctataaaatttaattatcaaatcatattaggatttaat

SEQ ID NO: 16940 - DNA, 4808 bp, Zea Mays
atctaagtgagagaaaacaatgacatatatttaatcccttggtagccttgtttttcctctcatttggtgccaagctaggccttacatctctagccacacccacacctgtacctgtttgctgctgttttttctcccacgcgatccaaccgtttgtttacgccgggctaggtttctcgaccgtacggggacaggacatcagtgcaactgtgcaagcgaccgccaccgcattacccggaactgcccagatcttcgtcgaatcgtcgggccctttgctggcgacgagcaaccacagcttgcaatggcacaatagtgacatcttgggaaacaatgaaacgttttgtctatatcaatgatgattcgtgccggtattcctactgtgacaaccggatatccaataccaagtatactctgtggaattttctcccgaaaaatttatgggagcaattcaggcgtttcatgaatcagtattttctactaatagcctgccttcagttgtggtcccgtatcacccctgtcagccctgcaactacatggggtccacttatcatcatcttcattgtttctgcttcaaaagaggcttgggatgattacaataggtatctttctgacaagaaagcaaatgagaggaaaatatggttggtaaaggatggcgtccgcatacagatcaaagcacaggaggtacatgttggagatttagtgtggctccatgagaatgatgagataccatgtgatcttgttctcattggcacttctgatcgacaaggcatttgttatgttgagactgctgctttggatggtgaaactgacttgaaaacaagaaccattcctccaatttctgctaacttgtcagtagagcagctaggaaaagtcaagggtgtaattgagtgccccaacccagacaatgacatacggagtcatgttaccttcgatacactgaatgggcttgtggagttgcagtttacacaggcaatgaaacaaaatctggaataagtaggggagctgcggagcccaagttcactgctgctgatgtaataatagacaagctcactattgcaatattcatgttccaagttgttgttgtacttgttctgggttattttgggaatacttggaaggacactcaggggcttaagcaatggtatcttatgtatcctatggaggtagagggcccatggtatgatttcttgattatcccgttacgctttgagctgttgtgctccataatgattccaatctccataaaggttactcttgatttggctaaaggtttgtatgcaaagtttattgactgggatgagcaaatgtttgattgggaaacaaatacacctgctcattcagctaacacagctattagcgaggacctcggacagattgaatatattttgagtgacaaaactgggacactcacagagaataaaatgatcttcaaacaatgctgcataagtgatactttgtatggaaatgacaacggagatgcattaaacgaagcaaagctgtttttcgtccactgacaattctctcaacttagatgtcagacttgtaaatgcggtctcaagtaatgatcctgatgtcatcaaatttctgttggttatggctctttgcaatacagtggtccctatcaaaagcaatgatggtactgtgtcatacaaagcacaatcccaagatgaggaagctttagttaacgctgcagcaaagctgaatatgatgctcatcagtaaagacaccattacagctgagatttgtttcaatgggtctaagttttggtatgagttgttggacattttggaattcacttctgatcgcaaaagaatgtctgtagtggtaaaggaaggggagactggtaagatccttcttttatcaaaaggtgctgatgaagctctcctgcctcgtgcctgtccaggtggatcaagaatattgagtttggagagataaaaccgatgctgagcttgggtctgtgccttggtgaagaaatctgccagctgaagctctgaaggcacataccgaagagaaacaacaccatcccgtacctgtgctcgtgtataatgagcatcagcaccaatatgcttggtaggctcatgcttcaccggatcacgagcaatactaatagtacctgtactgtcagacaaaagaggagtcggtatgcaaatagagacaacaaaatcctcaagcaaccaccgcaaccaagtaacctccgtagtcataagagccatagcacacaactctgcgtcttcactcgaacgagaaaccgctacctgtttcttagtcttccaagcaatgagggaaccaggaaccaccaagaaaaacacaataggcagaaagagaacgacgaccagaggaatcaatagcccaagtagcatcacaatacgcttggagctgtaaagagttgcatcgtggaaagaacaaacgacgagatatagttccatgaagataatgcagaacccgaagcaagtgattatagtgaagctgagtggggcggaaacaaactgaccgagaatatgtacagaatatgaggtatcatgacgaatcacaccaaggtaaacaagactcaacaatgtgacgataacaagtaggatcctcaagaggcttaccatccgtggcacgaagatgaacattgagttctataggagtttcaattgtccgctgatcagtaagagaggcccgatcaaaaagatccagaatgtacttctcttgacaacgtgacgataacaagtaggatcctcaagaggctttccatccatggcacgaagatgaacattgagttccataggagtttcaattgtccgctgatcagtaagagaggcccgatcaagaagatccagaatgtacttctcttgagacagataaagcccctcagatgaagaggaaaactctatcccaagaaaataatgaagaggtccaagatcagacatgagaaacagacggaggacaacaaatacagagatatcttgaagcagtagaaatgtattctcagttgggattgcgaaccttatgtttggggtggcgtgatttaaaagaaaatgaatataaggaatggtccaaaaactttcaaaaggctagctgctcattggacaatagagagtttaaaattgctgaagtttgtaatagcttagagcaagaccttcaaattcttggtgttactgctatagaggatcgtcttcaggatggtgttcctgaaaccattaaattgttgaggaatgctggaattaatgtgtggatgctaaccggtgataagcaaaatacagcaattcagattggacttctctgtaacctcataacttctgggcccaatagtcaattgttatctatcagtgggaaaactgaagaggacgtgctaagaagcctagagagggcattatttattatgaaaaatacatctgaaacaaagggtcttgcatttgttttggatggttgggcacttgaattaattttgaagcattccaaggagtcttttactaggttggcgatgctgtcaaaaacagcaatatgctgtcgaatgacacctttgcagaaagcacagcttgttgctatcctaaaatccgttggctacctaactctagcaattggtgatggtggtaatgatgttagaatgattcaagaggctaacattggagtagggattagtggtagggaaggactgcaagctgcaagagctgctgattatagcattgggaagttcaagtttcttaagagattgatacttattcatgggcgttattcatacaatcgaacagcatttatttcacagtactccttctacaagtcacttcttatgtgctttattcagattctgtttgcctttttgtcggggctatctgggactagcttattcaactcaattagcttgatggcttataacgttttctatacaagtttacccgtcatgactataatctttgacaaggatatctctgaaacaacggttatgcagtacccccagattttactgcattctcaagctgggaggcttttaaatctcactacattttgcggatggtttgggcgctcgctatatcacgcactcgtcgttttcttcattacgatatgcgcctactcagatgagaaaagtgagatgcaggaactgtcaatggtagcactgtccggttgcatttggttacaggcttttgttgtgacaatggatacaaactcattcacttgcccgcaaatccttctcatctggggaaactttgtggccttctacatgatcaacttaatactcagtaccgtcccaagtctccaactgtacacaatcacgttccgcctgtgtagccaaccttcctactggatctccatggctctgacggttgcagtaggaatgggaccggtggtggctttcaggtacttgaagaacctgtatcagcctagcgccgttaacatactccagcaggtcgagcagcgcaatggatctatcagaacttctgggaatctggagtcggcgggagccaatctcactaatctactgactggctcacgtaaaaacagggattctaattatcgccctctgctttcagagtctgcggagtctgtaagtgcaagcggcagctaagaattgtctaggctttccgtactagcatgacagtcatacactcatacagacggcagaacagtgaactgtaacagaatcatgcttgtactaaaaaatatttcgtcggggtcaaagccaataattgttttgttggcctaaatttgatcatttttctcagtctgcgctgtggcaccgtctgtgctgtccgctgtcgcacgtagggatggtaataggatctaaattttacgctataaaatttaattatcaaatcatattaggatttaat

SEQ ID NO: 16941 - DNA, 1111 bp, Zea Mays
gtttacgccgggctaggtttctcgaccgtacggggacaggacatcagtgcaactgtgcaagcgaccgccaccgcattacccggaactgcccagatcttcgtcgaatcgtcgggccctttgctggcgacgagcaaccacagcttgcaatggcacaatagtgacatcttgggaaacaatgaaacgttttgtctatatcaatgatgattcgtgccggtattcctactgtgacaaccggatatccaataccaagtatactctgtggaattttctcccgaaaaatttatgggagcaattcaggcgtttcatgaatcagtattttctactaatagcctgccttcagttgtggtcccgtatcacccctgtcagccctgcaactacatggggtccacttatcatcatcttcattgtttctgcttcaaaagaggcttgggatgattacaataggtatctttctgacaagaaagcaaatgagaggaaaatatggttggtaaaggatggcgtccgcatacagatcaaagcacaggaggtacatgttggagatttagtgtggctccatgagaatgatgagataccatgtgatcttgttctcattggcacttctgatcgacaaggcatttgttatgttgagggtgtaattgagtgccccaacccagacaatgacatacggaggtttgatgctaacatgcgcttgttcctccctataattgacaatgaaaaaagtcctttgactatcaacaatacacttcttcagtcatgttaccttcgatacactgaatgggcttgtggagttgcagtttacacaggcaatgaaacaaaatctggaataagtaggggagctgcggagcccaagttcactgctgctgatgtaataatagacaagctcactattgcaatattcatgttccaagttgttgttgtacttgttctgggttattttgggaatacttggaaggacactcaggggcttaagcaatggtatcttatgtatcctatggaggtagagggcccatggtatgatttcttgattatcccgttacgctttgagctgttgtgctccataatgattccaatctccataaagtcctgtttggttttggcctccagttactaa

SEQ ID NO: 16942 - DNA, 1200 bp, Zea Mays
ctaggccttacatctctagccacacccacacctgtacctgtttgctgctgttttttctcccacgcgatccaaccgtttgtttacgccgggctaggtttctcgaccgtacggggacaggacatcagtgcaactgtgcaagcgaccgccaccgcattacccggaactgcccagatcttcgtcgaatcgtcgggccctttgctggcgacgagcaaccacagcttgcaatggcacaatagtgacatcttgggaaacaatgaaacgttttgtctatatcaatgatgattcgtgccggtattcctactgtgacaaccggatatccaataccaagtatactctgtggaattttctcccgaaaaatttatgggagcaattcaggcgtttcatgaatcagtattttctactaatagcctgccttcagttgtggtcccgtatcacccctgtcagccctgcaactacatggggtccacttatcatcatcttcattgtttctgcttcaaaagaggcttgggatgattacaataggtatctttctgacaagaaagcaaatgagaggaaaatatggttggtaaaggatggcgtccgcatacagatcaaagcacaggaggtacatgttggagatttagtgtggctccatgagaatgatgagataccatgtgatcttgttctcattggcacttctgatcgacaaggcatttgttatgttgagactgctgctttggatggtgaaactgacttgaaaacaagaaccattcctccaatttctgctaacttgtcagtagagcagctaggaaaagtcaagggtgtaattgagtgccccaacccagacaatgacatacggagtcatgttaccttcgatacactgaatgggcttgtggagttgcagtttacacaggcaatgaaacaaaatctggaataagtaggggagctgcggagcccaagttcactgctgctgatgtaataatagacaagctcactattgcaatattcatgttccaagttgttgttgtacttgttctgggttattttgggaatacttggaaggacactcaggggcttaagcaatggtatcttatgtatcctatggaggtagagggcccatggtatgatttcttgattatcccgttacgctttgagctgttgtgctccataatgattccaatctccataaagtcctgtttggttttggcctccagttactaa

SEQ ID NO: 16943 - DNA, 394 bp, Zea Mays
gttctttcactaatctaggccttgatagcgtacttccgcatgggaaaatacttctcacgcttcttttccctctcagtcttcaaggagagctggtacttggtgaggcgcctgcgaatggcgcgggtcttcttggggcggagatcgagcgggagaagcttcttcttcttgtacgcctcacgcagcgccgacttctgcttctgcgagatgacggtgagcacgcgagcgatggaggtgcgcacgatcttgcttggcgacgcgtaggagggagagctccgatttaagctccttgagctgcgcttgcagatccgtcttgctctttccgcgcagctcgtgcaccttgatccgggccatcgcgagtgacgagcagggggtgccgcggcgccgaatgagatga

SEQ ID NO: 16944 - DNA, 3250 bp, Zea Mays
atctgggagccgttggcgcaccggacatgtccggtgcacaccttccgaccattggcccggccacgtgtcgcgcgcagattctgtggccgaccgttggcccgaccgaccgttggctcaccggacagtccggtgcacaccggacagtccggtgaattttagccgtacgccgttggcgaattcccgagagcggccacttcacgccgagtcagcctggcgcaccggacagtccggtgtgccagactgagctgagtcttggctgtacacagccaagcctttttcacctcttttcttttcttcttctttctgtttctaacacttagacaagtatattagtacacaaaaccaatgtactaaggcttagaaacatacctttactcttgatttgcactttgtccatccatgagcataaattcacatttaagcacttgtgttggcactcaatcaccacaatacttagaaatggcccaagggcacatttccctttcacccggccgcctcaacttgcgccaccttgctaggtagcgcctccctgctacttgttgctttgagagcaacggtttgaggcttgtggatcggcattgggccattcaacgcctcatcaacatatcttgcttccttgatcatcttcgcccgcttacaaacttttcgagtatttcctcgggcgtcatcttggtgtacctaggattttcacggatagagttaacaagatgaggatcaaggacagtgaaggaccttagcataagccggacgacgtcgtggtccatccatctcgtgcttccatagctcctgattctgttgaccagggtcttgagcctgttgtacgtttgggttggctcctccccctgatcattgtgaaccttcctagttcgccctccaccaactccatcttggtgatcattgtgacatcattcccctcatgcgagatcatgagggtgtcccaaatctgcttggcgttatccaggccgctcaccttatggtactcttccctgcacaaggatgtaaatagaacagtggtagcttgtgcatttttgtgaatttgttcattgataaacatgggattatccgtactatcaaattgcattccattctctactatctcccatatacttggatgaagagagaacaagtggctacgcattttgtgactccaaaatccgtagtcctctccatcaaagtgtgagggtttaccaagaggaatgaaaagcaaatgagcattggaattttgcggaatacgagaataatcaaaagaaaagtttgagttgactgtttcctttttctcgtcgtcgtcgtttctttgggaagaagaggactcatcgctgtcgtagtagactatcttcttgatgcgcctcttcttcttcccatccttcttcttgtgacttgagcccgagtcagtgggcttgtcgtcttttggctcattgatgaaggactccttctccttgtcgttgatcaccatcccctttcccttaggatccatcccttcgggcgattagtccctttcgtgaagagaacgactctgataccaattgagagcacctagaggggggtgaataggtgctcctgtaaaacttaaaacttattgctacaaaaacttggttaaggttagtgcaataggatcaagtagttggagaggagaacttgtgaaacacagaaaccacagagagaaacaatgcagtagacacagtggtttatcccgtggttcggccaagtacaaaacttgcctactccacgttatggagtcccaatggacgagggttgcactcaacccctctcaagcgatccaatgatcaacttgaataccacggtgttcctttttcttatcatttttcccgtttgcgaggaatctccacaagttggagtctctcgcccttacaacaaatatcaaagtggaagcactagattaaggaagggaagcaacacacacaaatccgcagcaatacgcacacacacacaaccaagacttgagctcaaatgagtagcactaggttcaccactagaacggagctcaaatcactaagaaagtcaaacgagtgcgcaaagaaggagagtgaatgattaagaatgctcaaagtatgcttgggtgactcctccatgcgcctaggggtcccttttatagccccaaggcagctaggagccgttggaggcattcttggcagacaatacttgccttctgtcgggtggcgcaccggacagtccggtgcaccaccggacatcccctgttcactgtccgatgcgaatcgccttcctaatttggcgcagccgaccgttgaagatttggagtcgttggcgcaccggacagtccggtgcccccatcagaccgttggctcggccacgcgtcacgtgcggattgcgcggccgaccgttggcgcggccgaccgttggctcaccggacagtctggtgcaccacaggacagtccgatgaattttagccgtacgccgccgacgaattctcgagagcggcctgttgaccagaatccagcctggcgcaccggacactgtcaggtgcaccaccggacagtccggtgcacccagactgtactgtgtcttggctgcttcagccaagtctttttctttttctgttttccttgattctagcacttagccaaatatgttagtacacaaaatacaatgtactaagtctagaatcataccttattgatgatttgcacttcattcaccattttgcacaatttatacttaagccatttgtgttgggcatttaatcaccaaaatacttagaaatagccaaagagcacatttccctttcacttatcccatcgcaaccttaccggatcatgattagatcggatcgtgagcctatcgattcgcggacgtgaccctatatatggcactgccagccatcgccataatccaacatgagttaggtttgcatctgcttactactgtgttgctgctatagttctcttcatcccgagcgcagacgtacaactgtgatcatgagagcaggtctccggaacccgtcgccttcgagatcctgcaccgggagagggcgaataaggtttttgggaagcgtcttcacgcaactgctcgcgttcttctcgtcgaccctgctgcttcaacgttgttgaccctactgctttcacccatatcatctaccaggatgtctgatcaattcagaccttcggagaagtctttgactgcgaggggctcctgttggagatttgacctcagacaatcagtccttgatgttttggaggacgtcatatcacgaagaccaagaataaggcgcaaa

SEQ ID NO: 16945 - DNA, 9729 bp, Zea Mays
taataaatgagcattagtactttgaggaatacgagagtaatcaaaagaaaagttcgaattgaccggtttctttctctcgtattcgttgtggtcgtcgtccctatgggaggaagtagactcatcgctgtcgtagtagacgatctccttgatgcgtcttgtcttcttcttctttccatctttgcgtctgtggcccgagcccgagtcgtttgacttgtcatcccttggctcgttgacgaaggactccttctccttgtcgttgatcacgattcccttccctttaggatccatctcttcgggcggttagtccctttgtgaagagaacggctctgataccaattgagagcacctagagggggggtgaataggtgatcctgtgaaacttaaacttatagccacaaaaacttgttaagtgttagcacaataatcgccaagtggctagagagaagtctcaacaagacacaataccacaagagatcaatcagagagatgacacagtggtttatcccgtggttcggccaagaccaacgcttgcctactccacgttgtggcgtcccaacggacgagggttgcaatcaacccctctcaagtggtccaaagaccaacttgaataccacggtgttttgctttgcctttcaatatcccgtttgcgaggaatctccacaacttggagcctctcgcccttacacttgagattcacaaagaaatatggagtaagggagggattagcaacacacacaaatccacagcaaaatgtgcacacacacggccgagaatcgagctcaagaaactatctcaaagttctcactagaacggagctcgaatcactgagaatgacaaatgaatgcgcaaagactgagtgtggatgatcaagaatgctctaaggttgcttggtgtactcctccatgcgcctaggggtcccttttatagccccaaggcagctaggagccgttgagagcaaatctggaaggccaatcttgccttctgtcgtcgggtgcaccggacagtccggtgcacaccggacactgtccggtgcccgatttccttcctaaaatagcgcggccgaccgttgcagatctgggagccgttggcgcaccggacatgtccggtgcacaccttccgaccattggcccggccacgtgtcgcgcgcagattctgtggccgaccgttggcccgaccgaccgttggctcaccggacagtccggtgcacaccggacagtccggtgaattttagccgtacgccgttggcgaattcccgagagcggccacttcacgccgagtcagcctggcgcaccggacagtccggtgtgccagactgagctgagtcttggctgtacacagccaagcctttttcacctcttttcttttcttcttctttctgtttctaacacttagacaagtatattagtacacaaaaccaatgtactaaggcttagaaacatacctttactcttgatttgcactttgtccatccatgagcataaattcacatttaagcacttgtgttggcactcaatcaccacaatacttagaaatggcccaagggcacatttccctttcacccggccgcctcaacttgcgccaccttgctaggtagcgcctccctgctacttgttgctttgagagcaacggtttgaggcttgtggatcggcattgggccattcaacgcctcatcaacatatcttgcttccttgatcatcttcgcccgcttacaaacttttcgagtatttcctcgggcgtcatcttggtgtacctaggattttcacggatagagttaacaagatgaggatcaaggacagtgaaggaccttagcataagccggacgacgtcgtggtccatccatctcgtgcttccatagctcctgattctgttgaccagggtcttgagcctgttgtacgtttgggttggctcctccccctgatcattgtgaaccttcctagttcgccctccaccaactccatcttggtgatcattgtgacatcattcccctcatgcgagatcatgagggtgtcccaaatctgcttggcgttatccaggccgctcaccttatggtactcttccctgcacaaggatgtaaatagaacagtggtagcttgtgcatttttgtgaatttgttcattgataaacatgggattatccgtactatcaaattgcattccattctctactatctcccatatacttggatgaagagagaacaagtggctacgcattttgtgactccaaaatccgtagtcctctccatcaaagtgtgagggtttaccaagaggaatgaaaagcaaatgagcattggaattttgcggaatacgagaataatcaaaagaaaagtttgagttgactgtttcctttttctcgtcgtcgtcgtttctttgggaagaagaggactcatcgctgtcgtagtagactatcttcttgatgcgcctcttcttcttcccatccttcttcttgtgacttgagcccgagtcagtgggcttgtcgtcttttggctcattgatgaaggactccttctccttgtcgttgatcaccatcccctttcccttaggatccatcccttcgggcgattagtccctttcgtgaagagaacgactctgataccaattgagagcacctagaggggggtgaataggtgctcctgtaaaacttaaaacttattgctacaaaaacttggttaaggttagtgcaataggatcaagtagttggagaggagaacttgtgaaacacagaaaccacagagagaaacaatgcagtagacacagtggtttatcccgtggttcggccaagtacaaaacttgcctactccacgttatggagtcccaatggacgagggttgcactcaacccctctcaagcgatccaatgatcaacttgaataccacggtgttcctttttcttatcatttttcccgtttgcgaggaatctccacaagttggagtctctcgcccttacaacaaatatcaaagtggaagcactagattaaggaagggaagcaacacacacaaatccgcagcaatacgcacacacacacaaccaagacttgagctcaaatgagtagcactaggttcaccactagaacggagctcaaatcactaagaaagtcaaacgagtgcgcaaagaaggagagtgaatgattaagaatgctcaaagtatgcttgggtgactcctccatgcgcctaggggtcccttttatagccccaaggcagctaggagccgttggaggcattcttggcagacaatacttgccttctgtcgggtggcgcaccggacagtccggtgcaccaccggacatcccctgttcactgtccgatgcgaatcgccttcctaatttggcgcagccgaccgttgaagatttggagtcgttggcgcaccggacagtccggtgcccccatcagaccgttggctcggccacgcgtcacgtgcggattgcgcggccgaccgttggcgcggccgaccgttggctcaccggacagtctggtgcaccacaggacagtccgatgaattttagccgtacgccgccgacgaattctcgagagcggcctgttgaccagaatccagcctggcgcaccggacactgtcaggtgcaccaccggacagtccggtgcacccagactgtactgtgtcttggctgcttcagccaagtctttttctttttctgttttccttgattctagcacttagccaaatatgttagtacacaaaatacaatgtactaagtctagaatcataccttattgatgatttgcacttcattcaccattttgcacaatttatacttaagccatttgtgttgggcatttaatcaccaaaatacttagaaatagccaaagagcacatttccctttcacttatcccatcgcaaccttaccggatcatgattagatcggatcgtgagcctatcgattcgcggacgtgaccctatatatggcactgccagccatcgccataatccaacatgagttaggtttgcatctgcttactactgtgttgctgctatagttctcttcatcccgagcgcagacgtacaactgtgatcatgagagcaggtctccggaacccgtcgccttcgagatcctgcaccgggagagggcgaataaggtttttgggaagcgtcttcacgcaactgctcgcgttcttctcgtcgaccctgctgcttcaacgttgttgaccctactgctttcacccatatcatctaccaggatgtctgatcagtacgcatcatccgatttgacttcatacttcagtttatctgttaaggtagaggtgtgctgtatttatatgattggccagttagctaacctattaggttacttgttaggtaacatacacttagattatttattattggtcatggtgatttatatttggaatttaatctggaatatgtctacttatccaccacgagctaagctttttatattagagaaatgtcatcgaactaatgtcacgtttgtcgaactaatgtcacgtttggttggattagtccctccattttactcacatttagtctctaaattgtcaaacgctgagactaaaatatagactagactggtttagtccctagtttctcaaagaatgactaaaacaggactaaaccatattaattccatattttacctctcatttatttcagttgtactaatgataagagaatgttaagacctatattgatttttgtatgagtcatttaatgcatagagatacttgcgcctgtttggtttctgctgagagacgaggtcgagggctcggtcatgtacccgagctcccctagcgaggggttgcccaaatgcccctaccatagtgagggctcagtcatgtacccgagctcccctagcgaggggttgcccaaatgcctctaccatagtggttgacacagtgctaagcatgggaaaaagcttcttaaggggtgtgtcagctccactatatctgatgacgttgggggcgtcctccgtcacagatatcgagggcagaaccaggctcaggcaaggcagaagtccgcccgaggtcatgaccgagccctttccgagattcgcgagggagcaggtagccgagtccaggctcgggcgaggcgaagtttgcctcaagggcgagttctgcatcgggtgagacagagtttgcgctcgagggcaggtttgtgtccctgttgtattacatgtcctatcaagggttgacagacgaccttataactccgtatgtatcaactagccattatcagatctgaggtccaatttactagattggcaaaaggggcaggtgcaggacaagaagccaatcattcattttcatgcattgttcgattcacactgctccttggttcgtggctagtgcttttcttttcgctaatcacccaactctcatgtcagtcagaagggcattgatggaacacaaaccggtaagctcttcgcatacagtggtcgcacccgtgatcatagttggtgaatctttgacaagaccgtggtcttgttgatgctgtacgcacgcaagcatgagcggggtaggtacgcgcattgaatgttgctatcccccagcggccttcgggtgagccttgctctaggttttgtccttctcgtccgagataggttcgggcgaggcggactctgttgtcctggggtgagggtacctcggttgggacggagattctcccgtgcgcacgccccgtccgagatcgagctcgggcgaggcggagttttgggaagacccctgagggggaccttgggtgaggcgaagttcttgattgctgcaacgtactttgatgatgtccttagggtttaagcgtgttttgggggtgtaatctaggtacccctaattatcataccgatagtatctactgtcatatcaactatcgcttggtctgtatctaccaccatcagcctacgctctagtccacaatctttgtcgtgagcctacaaccatctcagtgacttgtagtttttcttacaaactcttatttgaaatgaaatacattgtattatcgaaataaaattaaataatttatacaaataaaagttgcataattcataaatattgtttttaaagaattttatggtttttctaattttttatgcgtcaaaatgacgtggaccaataaaaaataaacatgtgacagcaggcggtcagtagcccaacattagaggctggaatcggtcggtatcgaccaggcgacggagtcacttactgccatcgatcatatcgccaatcctcatgagttcatactagactattttcaactgttctacatcaaccggacaaaatggctcaagcgtagtggtacggtgaaagtgattattaagagcattagtgcaaaaggatgaggtagtatgataacatgaaggcatgtccccgcaaaatatatcgagcgggcctattagcagtggcggacgcagaacaaaattctagatgaggccgacagtacaagagacaaatcactagactagaccataaatatagattaatgataatatctagtgtttccaaaatgatatgaataccaaaaaaccttttttggctaccaaaaggagagctagagagaaaaaaataggtggactgactgaggacgaggcactagggcggagcagccgcatcggcgcgtcgttctggcgagtcatcgaaattgtcgtgagatggtgttggtgagacgacgacagctaggaggagcgagtgcaggaagcaaggtagcgatagatgacggtgacggcaagcgacacccattgtcgtgttgcaacggcgcgatgggactctaatgagtcagcgagggacaggtgacgccacggtcccaccaacaacttgcccatctgctagtgcggactaggagtcaaaatatcaacgttgtctataggatcctgacgagacgacaagctgatgagtgatgagaaggcaaggtgcgctgcgtcgggcgggttaggtcaccgacttactggtcagtcgatgaccgaagaagcgagtgagccacaactgggcttgcgctagggaagagaatcaaatggctcaggtgaagagtagactaagcagtgaagcgtcgacagaaaaatagatcaaaacctagttttcattagatttgtccacactaactatacaaaaatttgtttattttgatgtgtacctaaacctaggtataaggggttaaaaaattaaggtggggccatggcccaccttgcccaccccttgaatccgcccctgcctattagtgagcttagttgttgggttagtccaacaaagaaatatgtatgtaatgcctctgcccatttgtttgtgggacagtcaggacaggacgtcatctgccgtactctcgtgtccctccaattttaagagataactagggacaacactgggatagtaatatcccaattcttgaccttatttgagtgatcgtctcatcacgtctcgtcctgtcattgcaaccatacataccttagattattaaaaggagttggtcaagcaagcatttaatttagtctgcatatagccaatcgtacttgagacaagctctccaccaaatgttaagaccttgttcggttattgatattacatgtgtattgaagtgtattgggtgggattgagatgtattttgacttgttatggatttaaaccggctcaatcccatctaatacatgtggattatcaccaaaacgaacaagccctaaggtgtagttacatcagtatataccccacgtgatctacatagcctgctaaggctagcagggtattctcgtatttgcccccacaagacatatggcgtacatctcttttgtccctcctcgttttcctgttgctagaggcatactcacaacgacgaagttgctgctttttccatcaactacgattctacgaagatgaagctttagtaacaaagctcagcctgttattcctgaaacaaacgcaaagacagcgggaatttatcaatttgagaaccttccacagaggcgtgctctaacaggtaccctgatgtcattaccacaataatgcgcaactagcttgagtagattgtaactagcaacaattgcttcgggttgatatctcttgtcataagtaacttgcttaattcattataaactaaagatcaagctactagaaatatctagggggttgcatagggttaaactagagctaaagcaagtatacgctttcaggtaccttttattctaatcaactttgctctagcgataattttaggtgactaggaactaggataatttctacaggctatttaacccttctccaaccatttagtccttagacgcgagtttataagccttctcaacattttttgaaataagagttgttctcgaagacattcttggccatccttgtaccaagggaaacctcttcgacatccgaccacttcgatccctctcaaccatgggcacatgcactccatttaaaaagtatttaaatgcactagagataatagttagtggctaaaattagctagaaacattcaaacactctagctaatagttcagctattagctatttttagtaaattagctacaagttagctaactatttattagctagttaattctactttttagctaactaactattaattatagtgcattcaaacacccccttagtcaccatgtcatttgttcttcgtagcaaatgcaatttgctttgcaccgtggcacggtttgacgctgcaacaccttaagtagccgatcactttaactccctcaatgatgtggtttttaaattgacggtgcatctcattcagattttagagcatagaaagtagcaacattcgaagttaactctcttgtgacttaataacccagataaaaagtgttatctttgatattccattcggtgttaagtggtgcattttgatgttgaatgcatccaatatttcctgtgttatgtcttgaactaggaagctaaaccccaacaatgaagaaatccttgaaaaccacgccctcttttgtccttggcttcatcacttcgttccctagcaaatgaacatgatctcttagtaaggaattcagagacctctgaatgagaggaccaaggacaatttgtcaatttcgtacttagacacatctaagatgttgtttagttcacatatttataatgtgaacgatgaccgataacgtcaaaccatgtttatttaagtccaactgtaatcaaataccacattagaaactgatatcgtcctattcaaacttgttacttgtcggggaccataattaggggtaccctcaaggctcctaattctcagctcgtaaaccccatcagcataaagctgcaaaggcctgatgggtgcgattaagtcagggatcggtccattcgagggactcgatcacgcctcgcccgagcctagcctcggacaagggtagccgacccggaggatctccgcctcgcccgaggcccccctccagcggcgaacatatttccggctcgcccgaggccatgtcttcgccaagaagcaaccctgaccaaatcaccacgctgaccgaccaaatcgcaggagcatttaatgcaaaggtggcctgacacctttatcctgacgtgcgcccttcagtcgacagagccgaagtgaccgccgtcacttcgccgctccactgaccggcctgacagaaagacagcgccgcctgcgccgctccgactgctgacaggcagtcaggcccggccgtaggcgccataggaagctccgctccgcccgacctagggctcggactcgggctaagccccggaagacgacgaactccgctccgcccgacccagggctcggactcgggctaag

SEQ ID NO: 16946 - DNA, 4662 bp, Zea Mays
caggaattgcttgtatccatttacatatcgtattgatgatggtctgtggacaacggtccatggggatgcgttgtctacgagacggaaattggaataaggattaaggtgtggtaccgtgagtcaagcgtttgaacgtactaagcacatgccgagaaatatggtaaatcggtaagcctagtacctgagtgaacctggcagtggacatatcccctcacgcgacctgagacgtggtctcccattccggttatggtgggtacaagtgtggtcactgcacgacggcagtcggggtcagtgaggcattgtacgccaaggcggtgagccctgatctgctgacggggaatcgatggggacggttgatatgtgtggggacggagtgcctcgccatgtcgtgtgtttaggtttaccttgcaaggtttaaaaactcgattcgaatcgtctgcttctcgcagctaatgagactgcttgatccatgctgctacattgagtaacaagtggaaatgtgatgaggtgacaaaagatgttgattgctaaatttgcttgctaccatgaatgagtagatagtacacatctagtcttaaacactaaaactggacaaagctaaaacttgatttataaactcagctattgcttttggcaaccaaaccccacagccaaacagctgcatgtctagaggtagaggagtagactcctcacaccgggtaagtctagctgagtattagtatactcagccttgcttgtggcacaatttttgcaggtactccttagaatgattggttgatggtgtgacttggcctccatccctgccaccgggatagacggtcgagtgggttattgcttccgcaggagaggaccaggaggagtagcgtggccaggcttcgccatgttactcggttttctccgttagttatttccgctgcattaaaatttatgattattatttctgaaactccgataatgtaatcactattgatacttattaaatttgtggtattatgctttattgtatttctctgtgcctcaccttcgagtgagctagtggtattcgatcctggtaagtggctttatcggactagatccgagggactgacgggttattcctgtttaagtgtgttgctgccattaagggtgcgacttgggcacttaagctggaataattcgggcggttccgccacagctggtatcggagcgaatacccgtacagagaagtcaataagtcatgattaccaaccttttctaaagtaaaacttgcttagaaaccaagttggatagctgtcaggacgataaggatagacctaggacgtgaagccctaggaatagatgggtagctaggtggctagttatttaggccataaaggctactactactgttaataggatgctatagcaagcacccgaaaaattagttaggtctgagaagacgactagaatgagcatgcatcatgattgtcgcatcattgtctcttgtgcaccaacatgcttctctcacctttattctaataataagaacttgtgaataatgtaatgtactgctatgttaggaactataagaaatgtcttcctcgtgtcagattgataagtcttgttaggtcgtgctatgtgtttctcttgtcttgctagctaggtggtattgtaattgttcaaccctctttgccaaaaaaaatattgtctgtcctgctcataaaagaccccccactttaaacaacccagtggttagcaagtgaaacccttaaaaaaatcaaatcacatgcttgtgttggtattttcagacccttgagtgttttacccttgaatttacacttgcacagcttatagaccaccacaacttgaccgctagaccaacccaagtctccttgtgcacttgttatgtcaatttttttttgttgtttggtgtctagttgcgcaaaccctatcaaggccatgttctttccatagatcctgtcccgaaacttcataacctttctattgatcatcctagctgatcctgtttgcctacctctcttttcacctggatctagtactctctttccttgtgaatcatgttgtggctttatcatcgaaatctctggatcccttaatgattctgccccgttatctggttatctgctataacccgttttcaagtatcgaatgttgatctcgcctaaatctctcatttctgatcattctcatacccccttctctgaggatcatgacgcttgttttatcaacttatctctaaacgacatatccatgtggattaattgatgttgctgttatctttggatctctcatgtctctaaaagcttatattctcgatctcatggttggttcctcctcatattaaatatcgcatcaatctttggctgataatcctcgtgatgatcataaaatagttctctgagttaaagaaaattctcatgtgatgctcttttgccaacaatccttgcttcgactttagtcacattttctgagtcgtactctcatgggctccatctatttatgctatgttgaattctcgttggttgcgtctggtaatggtgttatgactaaacgactgatggtgccacgacgaaaccgagagcctcttgtgggcgcgcacacaaggttgagctgctcggtacgcgctggtatcgcggttaatagtcgtgatccattacgagactatactgatgtgctatcttttgtggatattctctcaaagtgatcactgcattttgtctcaacatgccgcgatattctatccaaatctatcttcagtatcttgtcagataccctctcacgaatttgcatctatcttcagcctggagttacatgcttctccacccttaaagatcctcattcgaatctcgggacgagattcttttaaggggggaaggctgtgacaccccaggtgtcagttttgtgttacgccgagagatttatcctaatctcgtacgctcagtgagattttctatttctcgatcacgtttatctccatttatcaagttacttgtgaaggtttcaccgatttctgattttactcgatctccagcaggccaaatttggagcctgttaaaaacttttattctcgacgaatgcaaactcgataatcaatctcaatttataaatctcatctgaagctcattaaatcaaactctcgacgactgttatttgatgtgagcccgagtctaattcctcaaactatgatctatgttcgagtattttatccggtccgtattatcaaacgggatacttagtatgtcgccctctaattaattcttactcgactcagcctagtatctgtgtctaaaccaaactcaaaatccgcatcgacaatgctttttaaaatgtcacgattcgccttcttcgactaaaaatccaaagccgatcaaaagtttgagaaaaatatttgtttctaaaatagtgcatgagaaaatttcaaagcagaatctccaatgtgttgccctcaaataaattcttatccgactcggcttaatacctctgtgttcgatctgaattcaaaaatcaacatctgcgaagatttttaaatgtcacaatttgtctctttcaatcatagatccaaaagctagtcagtctcaagtcattttgatttcctaatcgtacgcggacgaattttccgagcgacactgaaaaattaaattcttggcctaactatttttttctctttcctcggactctcgtttgccagacgctggttctctctgttctccacatcggcgaatcccgcgggagatttttctccctttaaatagtttacttagcctagaaggaaccccttgcttctcctctaagcaacatattttgcttctcatctaagcaacctttgcttcattcctaagcaacctttgcttctcttgtaagcaaccacttgcttcactcctaagcaagcaaaccagccccttttctctcctataaatcccacgccagctccccaaccagccacttcctctccctctctccacgccactctccctactcccttcctctctctctctctctagctccccatgcagcagcaaccccctcccatggagctggcgaccaagccctcccatgctcctccctcaccttggcagctctcccatggcgtctcccccttctctacggcagcaaggtgtaggaccgagagatgatgatcgagccagtaatgtggtgccaaccacaagatgccgtggtggacgacctgaagaatggacttaaccagtggatgctcgccaagcgagcacctcctcccccagcaaacactatctaagtgttaaaaattaaaggcaagccccggttttatgcataaccgtttatatatgctattttactacacttaatgtttgaaggcttgtactgtgcacttaagtgtaggagttgactgcaaccctagttgcatgatctcaggaatcctattgagatggatactagtatgctaggtcgagtagctgctttactaattagggatctcggtagaagtcgagtgattttttttgcactcgcgcgaggtcaggaattgcttgtatccatttacatatcgtattgatgatggtctgtggacaacggtccatggggatgcgttgtctacgagacggaaattggaataaggattaaggtgtggtaccgtgagtcaagcgtttgaacgtactaagcacatgccgagaaatatggtaaatcggtaagcctagtacctgagtgaac

SEQ ID NO: 16947 - DNA, 870 bp, Zea Mays
aaaatttcaaagcagaatctccaatgtgttgccctcaaataaattcttatccgactcggcttaatacctctgtgttcgatctgaattcaaaaatcaacatctgcgaagatttttaaatgtcacaatttgtctctttcaatcatagatccaaaagctagtcagtctcaagtcattttgatttcctaatcgtacgcggacgaattttccgagcgacactgaaaaattaaattcttggcctaactatttttttctctttcctcggactctcgtttgccagacgccggttctctctgttctccacatcggcgaatcccgcgggagatttttctccctttaaatagtttacttagcctagaaggaaccccttgcttctcctctaagcaacatattttgcttctcatctaagcaacctttgcttcattcctaagcaacctttgcttctcttgtaagcaaccacttgcttcactcctaagcaagcaaaccagccccttttctctcctataaatcccacgccacctccccaaccagccacttcctctccctctctccacgccactctccctactcccttcctctctctctctctctctctctctagctccccatgcagcagcaaccccctcccatggagctggcgaccaagccctcccatgctcctccctcaccttggcagttctcccatggcgtctcccccttctctacggcagcaaggtgtaggaccgagagatgatgatcgagccagtaatgtggtgccaaccacaagatgccgtggtggacgacctgaagaatggacttaaccagtggatgctcgccaagcgagcacctcctcccccagcaaacactatctaagtgttaaaaattaaaggcaag

SEQ ID NO: 16948 - DNA, 601 bp, Zea Mays
cagaagtaaccaattcagaatccaacacacacacacacacaatacaaacttcagattctcatcatgcaccaaagcaagcttgtcgatatgcaaactccatattattacttcagattctcatcaatcaccaaagcaagcttgtcgatatacaaactccatattattactttcggttactataggtcctgtaacatattcaatacaacaactcagttgcgatggagctgccactcataactggctgcaggcaccccacagaattcctctccaccaccaggcccacatagtaatccaaactctgcagcttgcacggtaacaacagatagcgtactttgcactactttgcaccgagtgagatccacgagtagttgaattctaccctgctagataacctagagactgtttcttatagagaaccccaggactgaaaatgatatacgtagtaaatgcccacattgcctagcgttcttgattaaagctgcaccttgcggtcataaacccaactgaaaggaataaccggtgcttgcttcgccctcgcttgagctctatcgcccagcctctgcgccaccgcgctgaagtgctcgaacaggttgtcgtcctt

SEQ ID NO: 16949 - DNA, 716 bp, Zea Mays
caatgatgcagcacacactgtcgagacgatatcagaagtaaccaattcagaatccaacacacacacacacacaatacaaacttcagattctcatcatgcaccaaagcaagcttgtcgatatgcaaactccatattattacttcagattctcatcaatcaccaaagcaagcttgtcgatatacaaactccatattattactttcggttactataggtcctgtaacatattcaatacaacaactcagttgcgatggagctgccactcataactggctgcaggcaccccacagaattcctctccaccaccaggcccacatagtaatccaaactctgcagcttgcacggtaacaacagatagcgtactttgcactactttgcaccgagtgagatccacgagtagttgaattctaccctgctagataacctagagactgtttcttatagagaaccccaggactgaaaatgatatacgtagtaaatgcccacattgcctagcgttcttgattaaagctgcaccttgcggtcataaacccaactgaaaggaataaccggtgcttgcttcgccctcgcttgagctctatcatccagccccctgtgagctccgcgactttccacctctggaccaggaactcgaggatgtcggcgtagtctttggcggtgtagacgcccagcctctgcgccaccgcgctgaagtgctcgaacaggttgtcgtcctt

SEQ ID NO: 16950 - DNA, 1177 bp, Zea Mays
gttaatttaagatatcctgtctggaagacagatgttgacataatgggacctataaatactgatgaatcagcagtgtgcttaactggtttgcaacctgaaattcctgcatttgaggattgggaaaccacaggaaacaccccttacacacaaaagttcgaggatgtacggaagaacaagaaaacaggaattcctgcacagacaaatgatccaaggaggaacccggaacatcctcgtaagtcccctttgcatccaacggcctacaaaaccgatcctcaagaccaaggtccaaggaacccaccacatcgaccgagacctgaaactgatcaacaaagacactccgaccggcctactcaccgtgagcctgcaccacgaagacatgcaaatcctcacagagaacaagggagtaatgctgtggcaccaagaagcccctacaggacagctgctgggtctgcttcgccaatgcagtcaaacaaccaatcaaagccgaatcatagatcgactgcgacgcaggctccagagagaaggcattcttcagaggggcatagccagcatacacctggaaggagcaggatgaagcccggtagttatgagcctgaagaagtggctgtaccaccctttggtgaatgggatgatgcaaatgcagcatcaggtgaaaagtacactggtatcttcaacagggtaagggacgataggttgtcacctacctcttctgctaggcaaccatctaccgcccgtagggaggagaataaggtgcaacagaaatgttcttgctgcatactttgagaaaatgaggacatgatctcaaagagtttggacagcatcctattgtgcttctgtagtgagcaccctatcgtgtaactcttcttggctagttgtcatgtatgttattgtcggtgtgattatgtatctgtaattggattgttccatttaagctcttcaattacaaggaacatatatatgataccatatagatttgtaaagtatggagtgagcaatttccttgtgataataaaaggtttattgaatggggtctagatttccatagttaatgtggatttcagctagacaccaacaatgtggctttcaatttttttatttaaaaaggaaacgaaattgtgctcccttgtaattctcaatagctatgataatattacaaacagaaaaatctataaaatta

SEQ ID NO: 16951 - DNA, 2681 bp, Zea Mays
agaatagaagggagctttgaaggctttcgaactgacaagcgaaacggcgctcacccccgaaaaaatttgtcttcttcctcgcttccttctccttttctgcctctcctcaccctctgaattccttgttcggttgttcctcttcccacttcccctctctctctctcgtgcgtgtgtactacttctgaggccgaaaggtcagaagagagtgtccacctttcagttcgattttcgatgatttgagtccttccgccgcggggaatttgagcgttttccttgagaaatttgagtttcttcgagagtaatttgtgtgttttctcttgagagattcgtgcaaggatgtcgccttcgaatccatttattgggtagtcaaattgttcctatatagcgtcaaagcatccaactttgacttctccgtggtggcttcttctatcgtgtgtcatccagacaatttgatctttatttaattgggttggatgcttgttcaggttaggtagttggaaagggtagcataagacaccatcaattttggtgattttggtttttctctgaataattgcgggtcaaattagtcatcttcagttatcacttctcgtttttattgggaggatttggtgaattttagtggcgggcagagctttcttcgatcctcggtcctcatttttatggatttggatggttggggacttgggggtatcttaactttatccttgttgaaaaaaggctataaacttgggagttcctgtgagatattcctttcttgggaggatttgatcttgcttctgttggttcctggtgagttggttgagatgaaaggagtactatgctaactcatcgaggaaagaacagtacagccagtactactctgaggaagagctgacatttctatgctttcctttggaggactgtggtctgttcctccaagaatctatgcaaaagtgctcctcatctaagtatatctatccagttcaagttgttgtggttcatcttatcatctgtgtatgtatctgtgtgtaatgcgcgcactctgcaagaaggaagaatttgtgtaaaacgggtggtagttcagaattttctttgcacaggagaagctcagttgcgccttgcagatccaaattggccgatggcgcaacctgaaattcctgcatttgaggattgggaaaccacaggaaacaccccttacacacaaaagttcgaggatgtacggaagaacaagaaaacaggaattcctgcacagacaaatgatccaaggaggaacccggaacatcctcgtaagtcccctttgcatccaacggcctacaaaaccgatcctcaagaccaaggtccaaggaacccaccacatcgaccgagacctgaaactgatcaacaaagacactccgaccggcctactcaccgtgagcctgcaccacgaagacatgcaaatcctcacagagaacaagggagtaatgctgtggcaccaagaagcccctacaggacagctgctgggtctgcttcgccaatgcagtcaaacaaccaatcaaagccgaatcatagatcgactgcgacgcaggctccagagagaaggcattcttcagaggggcatagccagcatacacctggaaggagcaggatgaagcccggtagttatgaggtaacagcaccttactatccttcagtttttcaataatattttaatgaatgtaggctagaaatgcctttacggggcatttggatcccttcattttagaggaattgaaattcactcaataaagtaacttatttagtttggattttgacattccaccactttccaaatttcatatataatactatctcaaattcatagggtagaggatgggaaatggttttatgcattagtagaatttgtttctactctgtaaattacataacactcttcgtctcactcctctatagtaaaaatgtagcacataaatatcttcgatatcttgctaataatagtatacaaatatattttatataaaaccgaattatcttaattgatatatgcctaaattactattattagaatggaattcaattccaatgattcaaacgggacgttagagtaattactcttgctttgcattggccaatccagcctgaagaagtggctgtaccaccctttggtgaatgggatgatgcaaatgcagcatcaggtgaaaagtacactggtatcttcaacagggtaagggacgataggttgtcacctacctcttctgctaggcaaccatctaccgcccgtagggaggagaataaggtgcaacagaaatgttcttgctgcatactttgagaaaatgaggacatgatctcaaagagtttggacagcatcctattgtgcttctgtagtgagcaccctatcgtgtaactcttcttggctagttgtcatgtatgttattgtcggtgtgattatgtatctgtaattggattgttccatttaagctcttcaattacaaggaacatatatatgataccatatagatttgtaaagtatggagtgagcaatttccttgtgataataaaaggtttattgaatggggtctagatttccatagttaatgtggatttcagctagacaccaacaatgtggctttcaatttttttatttaaaaaggaaacgaaattgtgctcccttgtaattctcaatagctatgataatattacaaacagaaaaatctataaaatta

SEQ ID NO: 16952 - DNA, 2127 bp, Zea Mays
agaatagaagggagctttgaaggctttcgaactgacaagcgaaacggcgctcacccccgaaaaaatttgtcttcttcctcgcttccttctccttttctgcctctcctcaccctctgaattccttgttcggttgttcctcttcccacttcccctctctctctctcgtgcgtgtgtactacttctgaggccgaaaggtcagaagagagtgtccacctttcagttcgattttcgatgatttgagtccttccgccgcggggaatttgagcgttttccttgagaaatttgagtttcttcgagagtaatttgtgtgttttctcttgagagattcgtgcaaggatgtcgccttcgaatccatttattgggtagtcaaattgttcctatatagcgtcaaagcatccaactttgacttctccgtggtggcttcttctatcgtgtgtcatccagacaatttgatctttatttaattgggttggatgcttgttcaggttaggtagttggaaagggtagcataagacaccatcaattttggtgattttggtttttctctgaataattgcgggtcaaattagtcatcttcagttatcacttctcgtttttattgggaggatttggtgaattttagtggcgggcagagctttcttcgatcctcggtcctcatttttatggatttggatggttggggacttgggggtatcttaactttatccttgttgaaaaaaggctataaacttgggagttcctgtgagatattcctttcttgggaggatttgatcttgcttctgttggttcctggtgagttggttgagatgaaaggagtactatgctaactcatcgaggaaagaacagtacagccagtactactctgaggaagagctgacatttctatgctttcctttggaggactgtggtctgttcctccaagaatctatgcaaaagtgctcctcatctaagtatatctatccagttcaagttgttgtggttcatcttatcatctgtgagaagctcagttgcgccttgcagatccaaattggccgatggcgcaacctgaaattcctgcatttgaggattgggaaaccacaggaaacaccccttacacacaaaagttcgaggatgtacggaagaacaagaaaacaggaattcctgcacagacaaatgatccaaggaggaacccggaacatcctcgtaagtcccctttgcatccaacggcctacaaaaccgatcctcaagaccaaggtccaaggaacccaccacatcgaccgagacctgaaactgatcaacaaagacactccgaccggcctactcaccgtgagcctgcaccacgaagacatgcaaatcctcacagagaacaagggagtaatgctgtggcaccaagaagcccctacaggacagctgctgggtctgcttcgccaatgcagtcaaacaaccaatcaaagccgaatcatagatcgactgcgacgcaggctccagagagaaggcattcttcagaggggcatagccagcatacacctggaaggagcaggatgaagcccggtagttatgagcctgaagaagtggctgtaccaccctttggtgaatgggatgatgcaaatgcagcatcaggtgaaaagtacactggtatcttcaacagggtaagggacgataggttgtcacctacctcttctgctaggcaaccatctaccgcccgtagggaggagaataaggtgcaacagaaatgttcttgctgcatactttgagaaaatgaggacatgatctcaaagagtttggacagcatcctattgtgcttctgtagtgagcaccctatcgtgtaactcttcttggctagttgtcatgtatgttattgtcggtgtgattatgtatctgtaattggattgttccatttaagctcttcaattacaaggaacatatatatgataccatatagatttgtaaagtatggagtgagcaatttccttgtgataataaaaggtttattgaatggggtctagatttccatagttaatgtggatttcagctagacaccaacaatgtggctttcaatttttttatttaaaaaggaaacgaaattgtgctcccttgtaattctcaatagctatgataatattacaaacagaaaaatctataaaatta

SEQ ID NO: 16953 - DNA, 1974 bp, Zea Mays
agaatagaagggagctttgaaggctttcgaactgacaagcgaaacggcgctcacccccgaaaaaatttgtcttcttcctcgcttccttctccttttctgcctctcctcaccctctgaattccttgttcggttgttcctcttcccacttcccctctctctctctcgtgcgtgtgtactacttctgaggccgaaaggtcagaagagagtgtccacctttcagttcgattttcgatgatttgagtccttccgccgcggggaatttgagcgttttccttgagaaatttgagtttcttcgagagtaatttgtgtgttttctcttgagagattcgtgcaaggatgtcgccttcgaatccatttattgggtagtcaaattgttcctatatagcgtcaaagcatccaactttgacttctccgtggtggcttcttctatcgtgtgtcatccagacaatttgatctttatttaattgggttggatgcttgttcaggttaggtagttggaaagggtagcataagacaccatcaattttggtgattttggtttttctctgaataattgcgggtcaaattagtcatcttcagttatcacttctcgtttttattgggaggatttggtgaattttagtggcgggcagagctttcttcgatcctcggtcctcatttttatggatttggatggttggggacttgggggtatcttaactttatccttgttgaaaaaaggctataaacttgggagttcctgtgagatattcctttcttgggaggatttgatcttgcttctgttggttcctgaaggaagaatttgtgtaaaacgggtggtagttcagaattttctttgcacaggagaagctcagttgcgccttgcagatccaaattggccgatggcgcaacctgaaattcctgcatttgaggattgggaaaccacaggaaacaccccttacacacaaaagttcgaggatgtacggaagaacaagaaaacaggaattcctgcacagacaaatgatccaaggaggaacccggaacatcctcgtaagtcccctttgcatccaacggcctacaaaaccgatcctcaagaccaaggtccaaggaacccaccacatcgaccgagacctgaaactgatcaacaaagacactccgaccggcctactcaccgtgagcctgcaccacgaagacatgcaaatcctcacagagaacaagggagtaatgctgtggcaccaagaagcccctacaggacagctgctgggtctgcttcgccaatgcagtcaaacaaccaatcaaagccgaatcatagatcgactgcgacgcaggctccagagagaaggcattcttcagaggggcatagccagcatacacctggaaggagcaggatgaagcccggtagttatgagcctgaagaagtggctgtaccaccctttggtgaatgggatgatgcaaatgcagcatcaggtgaaaagtacactggtatcttcaacagggtaagggacgataggttgtcacctacctcttctgctaggcaaccatctaccgcccgtagggaggagaataaggtgcaacagaaatgttcttgctgcatactttgagaaaatgaggacatgatctcaaagagtttggacagcatcctattgtgcttctgtagtgagcaccctatcgtgtaactcttcttggctagttgtcatgtatgttattgtcggtgtgattatgtatctgtaattggattgttccatttaagctcttcaattacaaggaacatatatatgataccatatagatttgtaaagtatggagtgagcaatttccttgtgataataaaaggtttattgaatggggtctagatttccatagttaatgtggatttcagctagacaccaacaatgtggctttcaatttttttatttaaaaaggaaacgaaattgtgctcccttgtaattctcaatagctatgataatattacaaacagaaaaatctataaaatta

SEQ ID NO: 16954 - DNA, 2155 bp, Zea Mays
cgaagatacaaattctatcgaaaaaaaaagaatagaagggagctttgaaggctttcgaactgacaagcgaaacggcgctcacccccgaaaaaatttgtcttcttcctcgcttccttctccttttctgcctctcctcaccctctgaattccttgttcggttgttcctcttcccacttcccctctctctctctcgtgcgtgtgtactacttctgaggccgaaaggtcagaagagagtgtccacctttcagttcgattttcgatgatttgagtccttccgccgcggggaatttgagcgttttccttgagaaatttgagtttcttcgagagtaatttgtgtgttttctcttgagagattcgtgcaaggatgtcgccttcgaatccatttattgggtagtcaaattgttcctatatagcgtcaaagcatccaactttgacttctccgtggtggcttcttctatcgtgtgtcatccagacaatttgatctttatttaattgggttggatgcttgttcaggttaggtagttggaaagggtagcataagacaccatcaattttggtgattttggtttttctctgaataattgcgggtcaaattagtcatcttcagttatcacttctcgtttttattgggaggatttggtgaattttagtggcgggcagagctttcttcgatcctcggtcctcatttttatggatttggatggttggggacttgggggtatcttaactttatccttgttgaaaaaaggctataaacttgggagttcctgtgagatattcctttcttgggaggatttgatcttgcttctgttggttcctggtgagttggttgagatgaaaggagtactatgctaactcatcgaggaaagaacagtacagccagtactactctgaggaagagctgacatttctatgctttcctttggaggactgtggtctgttcctccaagaatctatgcaaaagtgctcctcatctaagtatatctatccagttcaagttgttgtggttcatcttatcatctgtgtatgtatctgtgtgtaatgcgcgcactctgcaagaaggaagaatttgtgtaaaacgggtggtagttcagaattttctttgcacaggagaagctcagttgcgccttgcagatccaaattggccgatggcgcaacctgaaattcctgcatttgaggattgggaaaccacaggaaacaccccttacacacaaaagttcgaggatgtacggaagaacaagaaaacaggaattcctgcacagacaaatgatccaaggaggaacccggaacatcctcgtaagtcccctttgcatccaacggcctacaaaaccgatcctcaagaccaaggtccaaggaacccaccacatcgaccgagacctgaaactgatcaacaaagacactccgaccggcctactcaccgtgagcctgcaccacgaagacatgcaaatcctcacagagaacaagggagtaatgctgtggcaccaagaagcccctacaggacagctgctgggtctgcttcgccaatgcagtcaaacaaccaatcaaagccgaatcatagatcgactgcgacgcaggctccagagagaaggcattcttcagaggggcatagccagcatacacctggaaggagcaggatgaagcccggtagttatgagggtaagggacgataggttgtcacctacctcttctgctaggcaaccatctaccgcccgtagggaggagaataaggtgcaacagaaatgttcttgctgcatactttgagaaaatgaggacatgatctcaaagagtttggacagcatcctattgtgcttctgtagtgagcaccctatcgtgtaactcttcttggctagttgtcatgtatgttattgtcggtgtgattatgtatctgtaattggattgttccatttaagctcttcaattacaaggaacatatatatgataccatatagatttgtaaagtatggagtgagcaatttccttgtgataataaaaggtttattgaatggggtctagatttccatagttaatgtggatttcagctagacaccaacaatgtggctttcaatttttttatttaaaaaggaaacgaaattgtgctcccttgtaattctcaatagctatgataatattacaaacagaaaaatctataaaatta

SEQ ID NO: 16955 - DNA, 1172 bp, Zea Mays
gtgtgtttctgtaaagtggctgtttgggtggctgatgatgggcctgcgcatttcttgccttctttgtacctggtccatttgggagatggcatcaagttcattgaagacagtgttgctgcaaatcagtcagtaaatggcagtaccagaaatgcattcaaaatacttatcctcgatgttgattcatctgatctaagctctgggctgtcttgcccaccagaaaactttgtcgaagatcctttccttctaatagcaaaggagttccttttggagggcggcctttttgtcatcaatttagtctcgcggtcaacctcagtgagggaaacggttgtttcaagactgaaagcggtcttcgaacacctgtactcactgcaacttgaagaagacataaatgaggttctgtttgcatcaccgagcggaagatacctagaaatcaatgacattagtgcaggagcctccaaactgcaggacttgctcaaaattccggtggatgtagaatcagatatacagaagttgcagaaactccagtaacaatctcacctgacgcggagcaccatccatttgcatccacttgatttaggtgctgttcagttctcaccccagcagggcacaccaaaatgtcctttgttttgctcgtggaagccaaattaggaccagctgttttgtacaccagaattttgtctaactgcgctatagaaaaattttggcctgccagaatgtcttttacaaccaaagaggtgaaaaatctggcttgacctgattgggcctagaacaggctagagcgcatttcaaacttttaaacgtccacaaattggccgtgttttcccatatgtttgcctcgccaactctgcatgggtaaaacagtgcagctgtacagatttagaggatgtgtggaggaaacagaatgtgcatcatgcttggtctctgatggtttacaaatttcagcgaatatattgatcagaattcaggctgtgttatgatagctgtagcgtgtttggcaatgtgagtgtcgggtaggctctcgggaccctcgtaagcattcacacctcccgtcctagcagagtagcagcttcatgtactatgactatgggtgtactcggatacgaatgataagatttgtatgaatatgacatcttaaatactcaactttaagaatatgaatacggataaatatt

SEQ ID NO: 16956 - DNA, 1323 bp, Zea Mays
ccttaacacactcatcatgttggctgccttggaaatctggaagcatcggaatgattgtgtattcgaagggcaatggccttgtgttcatactgttttgcaggttgtggccaatgaatgtaccctttggtgtgctgcgggtgcctctgctcttcaggagctcctcactcgccaacccactcttagggtttaatttgagtcgctcgtagctgtgtggcctgtgtaggtccatttgggagatggcatcaagttcattgaagacagtgttgctgcaaatcagtcagtaaatggcagtaccagaaatgcattcaaaatacttatcctcgatgttgattcatctgatctaagctctgggctgtcttgcccaccagaaaactttgtcgaagatcctttccttctaatagcaaaggagttccttttggagggcggcctttttgtcatcaatttagtctcgcggtcaacctcagtgagggaaacggttgtttcaagactgaaagcggtcttcgaacacctgtactcactgcaacttgaagaagacataaatgaggttctgtttgcatcaccgagcggaagatacctagaaatcaatgacattagtgcaggagcctccaaactgcaggacttgctcaaaattccggtggatgtagaatcagatatacagaagttgcagaaactccagtaacaatctcacctgacgcggagcaccatccatttgcatccacttgatttaggtgctgttcagttctcaccccagcagggcacaccaaaatgtcctttgttttgctcgtggaagccaaattaggaccagctgttttgtacaccagaattttgtctaactgcgctatagaaaaattttggcctgccagaatgtcttttacaaccaaagaggtgaaaaatctggcttgacctgattgggcctagaacaggctagagcgcatttcaaacttttaaacgtccacaaattggccgtgttttcccatatgtttgcctcgccaactctgcatgggtaaaacagtgcagctgtacagatttagaggatgtgtggaggaaacagaatgtgcatcatgcttggtctctgatggtttacaaatttcagcgaatatattgatcagaattcaggctgtgttatgatagctgtagcgtgtttggcaatgtgagtgtcgggtaggctctcgggaccctcgtaagcattcacacctcccgtcctagcagagtagcagcttcatgtactatgactatgggtgtactcggatacgaatgataagatttgtatgaatatgacatcttaaatactcaactttaagaatatgaatacggataaatatt

SEQ ID NO: 16957 - DNA, 1121 bp, Zea Mays
gttatttgccaaattgaggttgtccatttgggagatggcatcaagttcattgaagacagtgttgctgcaaatcagtcagtaaatggcagtaccagaaatgcattcaaaatacttatcctcgatgttgattcatctgatctaagctctgggctgtcttgcccaccagaaaactttgtcgaagatcctttccttctaatagcaaaggagttccttttggagggcggcctttttgtcatcaatttagtctcgcggtcaacctcagtgagggaaacggttgtttcaagactgaaagcggtcttcgaacacctgtactcactgcaacttgaagaagacataaatgaggttctgtttgcatcaccgagcggaagatacctagaaatcaatgacattagtgcaggagcctccaaactgcaggacttgctcaaaattccggtggatgtagaatcagatatacagaagttgcagaaactccagtaacaatctcacctgacgcggagcaccatccatttgcatccacttgatttaggtgctgttcagttctcaccccagcagggcacaccaaaatgtcctttgttttgctcgtggaagccaaattaggaccagctgttttgtacaccagaattttgtctaactgcgctatagaaaaattttggcctgccagaatgtcttttacaaccaaagaggtgaaaaatctggcttgacctgattgggcctagaacaggctagagcgcatttcaaacttttaaacgtccacaaattggccgtgttttcccatatgtttgcctcgccaactctgcatgggtaaaacagtgcagctgtacagatttagaggatgtgtggaggaaacagaatgtgcatcatgcttggtctctgatggtttacaaatttcagcgaatatattgatcagaattcaggctgtgttatgatagctgtagcgtgtttggcaatgtgagtgtcgggtaggctctcgggaccctcgtaagcattcacacctcccgtcctagcagagtagcagcttcatgtactatgactatgggtgtactcggatacgaatgataagatttgtatgaatatgacatcttaaatactcaactttaagaatatgaatacggataaatatt

SEQ ID NO: 16958 - DNA, 1211 bp, Zea Mays
caatccccatctactccatgctcgctttggacctccctaaattggtgttcaaagctattgataaacgacgaagggatttcttatggaaaggacaagagaaagccaacggaggtccatttgggagatggcatcaagttcattgaagacagtgttgctgcaaatcagtcagtaaatggcagtaccagaaatgcattcaaaatacttatcctcgatgttgattcatctgatctaagctctgggctgtcttgcccaccagaaaactttgtcgaagatcctttccttctaatagcaaaggagttccttttggagggcggcctttttgtcatcaatttagtctcgcggtcaacctcagtgagggaaacggttgtttcaagactgaaagcggtcttcgaacacctgtactcactgcaacttgaagaagacataaatgaggttctgtttgcatcaccgagcggaagatacctagaaatcaatgacattagtgcaggagcctccaaactgcaggacttgctcaaaattccggtggatgtagaatcagatatacagaagttgcagaaactccagtaacaatctcacctgacgcggagcaccatccatttgcatccacttgatttaggtgctgttcagttctcaccccagcagggcacaccaaaatgtcctttgttttgctcgtggaagccaaattaggaccagctgttttgtacaccagaattttgtctaactgcgctatagaaaaattttggcctgccagaatgtcttttacaaccaaagaggtgaaaaatctggcttgacctgattgggcctagaacaggctagagcgcatttcaaacttttaaacgtccacaaattggccgtgttttcccatatgtttgcctcgccaactctgcatgggtaaaacagtgcagctgtacagatttagaggatgtgtggaggaaacagaatgtgcatcatgcttggtctctgatggtttacaaatttcagcgaatatattgatcagaattcaggctgtgttatgatagctgtagcgtgtttggcaatgtgagtgtcgggtaggctctcgggaccctcgtaagcattcacacctcccgtcctagcagagtagcagcttcatgtactatgactatgggtgtactcggatacgaatgataagatttgtatgaatatgacatcttaaatactcaactttaagaatatgaatacggataaatatt

SEQ ID NO: 16959 - DNA, 1303 bp, Zea Mays
gagttggccccttaaagtagttgaagttgaatgccagctttgttgtggtcagcatcaccgttgtaggccttggtgctggttgtttcccaatgtttctccgtggatgtctgcctttcgtagatattgaggtcgttgagttggaccccttggtggctgagctagcaaagaaatattttggcttttcaatggatgagcaattgaaggtccatttgggagatggcatcaagttcattgaagacagtgttgctgcaaatcagtcagtaaatggcagtaccagaaatgcattcaaaatacttatcctcgatgttgattcatctgatctaagctctgggctgtcttgcccaccagaaaactttgtcgaagatcctttccttctaatagcaaaggagttccttttggagggcggcctttttgtcatcaatttagtctcgcggtcaacctcagtgagggaaacggttgtttcaagactgaaagcggtcttcgaacacctgtactcactgcaacttgaagaagacataaatgaggttctgtttgcatcaccgagcggaagatacctagaaatcaatgacattagtgcaggagcctccaaactgcaggacttgctcaaaattccggtggatgtagaatcagatatacagaagttgcagaaactccagtaacaatctcacctgacgcggagcaccatccatttgcatccacttgatttaggtgctgttcagttctcaccccagcagggcacaccaaaatgtcctttgttttgctcgtggaagccaaattaggaccagctgttttgtacaccagaattttgtctaactgcgctatagaaaaattttggcctgccagaatgtcttttacaaccaaagaggtgaaaaatctggcttgacctgattgggcctagaacaggctagagcgcatttcaaacttttaaacgtccacaaattggccgtgttttcccatatgtttgcctcgccaactctgcatgggtaaaacagtgcagctgtacagatttagaggatgtgtggaggaaacagaatgtgcatcatgcttggtctctgatggtttacaaatttcagcgaatatattgatcagaattcaggctgtgttatgatagctgtagcgtgtttggcaatgtgagtgtcgggtaggctctcgggaccctcgtaagcattcacacctcccgtcctagcagagtagcagcttcatgtactatgactatgggtgtactcggatacgaatgataagatttgtatgaatatgacatcttaaatactcaactttaagaatatgaatacggataaatatt

SEQ ID NO: 16960 - DNA, 1421 bp, Zea Mays
gtctgctctgtttcttcttgtttctgtaattttaatgtgcaaggatccaagaacagtctgagaattgaccataaatttcttggtagctcatatcacagcagtatcatatctgggctttctttagttgcatcttctctgagtgctgctgcttcatctggagaaaaagtcagcatcaccgttgtaggccttggtgctggttgtttcccaatgtttctccgtggatgtctgcctttcgtagatattgaggtcgttgagttggaccccttggtggctgagctagcaaagaaatattttggcttttcaatggatgagcaattgaaggtccatttgggagatggcatcaagttcattgaagacagtgttgctgcaaatcagtcagtaaatggcagtaccagaaatgcattcaaaatacttatcctcgatgttgattcatctgatctaagctctgggctgtcttgcccaccagaaaactttgtcgaagatcctttccttctaatagcaaaggagttccttttggagggcggcctttttgtcatcaatttagtctcgcggtcaacctcagtgagggaaacggttgtttcaagactgaaagcggtcttcgaacacctgtactcactgcaacttgaagaagacataaatgaggttctgtttgcatcaccgagcggaagatacctagaaatcaatgacattagtgcaggagcctccaaactgcaggacttgctcaaaattccggtggatgtagaatcagatatacagaagttgcagaaactccagtaacaatctcacctgacgcggagcaccatccatttgcatccacttgatttaggtgctgttcagttctcaccccagcagggcacaccaaaatgtcctttgttttgctcgtggaagccaaattaggaccagctgttttgtacaccagaattttgtctaactgcgctatagaaaaattttggcctgccagaatgtcttttacaaccaaagaggtgaaaaatctggcttgacctgattgggcctagaacaggctagagcgcatttcaaacttttaaacgtccacaaattggccgtgttttcccatatgtttgcctcgccaactctgcatgggtaaaacagtgcagctgtacagatttagaggatgtgtggaggaaacagaatgtgcatcatgcttggtctctgatggtttacaaatttcagcgaatatattgatcagaattcaggctgtgttatgatagctgtagcgtgtttggcaatgtgagtgtcgggtaggctctcgggaccctcgtaagcattcacacctcccgtcctagcagagtagcagcttcatgtactatgactatgggtgtactcggatacgaatgataagatttgtatgaatatgacatcttaaatactcaactttaagaatatgaatacggataaatatt

SEQ ID NO: 16961 - DNA, 1780 bp, Zea Mays
aactggacattcatcacaatttctcacgaaaaagttggcatttgcagtgttcagaccataatgaaaattcaacaaattattaaagcatgctcttaagagtttgtagtttgagcaaatacgggttcatgatggcaggtgatggtgttaaacaaagacatactctgcaagaggtaacttcagaaataactggtccaatggttgtggaagatgttgtctatgaaaatgctgatggagatcaaggttccatgtctgagaaaatgttccgtcgtcttatttttggaagaagttctggtttagtgcaatctgaagcgttgttaatcagagatcctcccagtgatgaggtagacaaaaagaacaaaagtgcagctgcaacatctaaaaaaagaaggaaccataaaaggggatccaagaacagtctgagaattgaccataaatttcttggtagctcatatcacagcagtatcatatctgggctttctttagttgcatcttctctgagtgctgctgcttcatctggagaaaaagtcagcatcaccgttgtaggccttggtgctggttgtttcccaatgtttctccgtggatgtctgcctttcgtagatattgaggtcgttgagttggaccccttggtggctgagctagcaaagaaatattttggcttttcaatggatgagcaattgaaggtccatttgggagatggcatcaagttcattgaagacagtgttgctgcaaatcagtcagtaaatggcagtaccagaaatgcattcaaaatacttatcctcgatgttgattcatctgatctaagctctgggctgtcttgcccaccagaaaactttgtcgaagatcctttccttctaatagcaaaggagttccttttggagggcggcctttttgtcatcaatttagtctcgcggtcaacctcagtgagggaaacggttgtttcaagactgaaagcggtcttcgaacacctgtactcactgcaacttgaagaagacataaatgaggttctgtttgcatcaccgagcggaagatacctagaaatcaatgacattagtgcaggagcctccaaactgcaggacttgctcaaaattccggtggatgtagaatcagatatacagaagttgcagaaactccagtaacaatctcacctgacgcggagcaccatccatttgcatccacttgatttaggtgctgttcagttctcaccccagcagggcacaccaaaatgtcctttgttttgctcgtggaagccaaattaggaccagctgttttgtacaccagaattttgtctaactgcgctatagaaaaattttggcctgccagaatgtcttttacaaccaaagaggtgaaaaatctggcttgacctgattgggcctagaacaggctagagcgcatttcaaacttttaaacgtccacaaattggccgtgttttcccatatgtttgcctcgccaactctgcatgggtaaaacagtgcagctgtacagatttagaggatgtgtggaggaaacagaatgtgcatcatgcttggtctctgatggtttacaaatttcagcgaatatattgatcagaattcaggctgtgttatgatagctgtagcgtgtttggcaatgtgagtgtcgggtaggctctcgggaccctcgtaagcattcacacctcccgtcctagcagagtagcagcttcatgtactatgactatgggtgtactcggatacgaatgataagatttgtatgaatatgacatcttaaatactcaactttaagaatatgaatacggataaatatt

SEQ ID NO: 16962 - DNA, 1769 bp, Zea Mays
aggtcaagggctgctttgatttctaggctcgagctctggaatggctattttgttcctcagaaggacagtggcatgttgttgaaagtgcaagggctgcccgtctaattatggttcatgatggcaggtgatggtgttaaacaaagacatactctgcaagaggtaacttcagaaataactggtccaatggttgtggaagatgttgtctatgaaaatgctgatggagatcaaggttccatgtctgagaaaatgttccgtcgtcttatttttggaagaagttctggtttagtgcaatctgaagcgttgttaatcagagatcctcccagtgatgaggtagacaaaaagaacaaaagtgcagctgcaacatctaaaaaaagaaggaaccataaaaggggatccaagaacagtctgagaattgaccataaatttcttggtagctcatatcacagcagtatcatatctgggctttctttagttgcatcttctctgagtgctgctgcttcatctggagaaaaagtcagcatcaccgttgtaggccttggtgctggttgtttcccaatgtttctccgtggatgtctgcctttcgtagatattgaggtcgttgagttggaccccttggtggctgagctagcaaagaaatattttggcttttcaatggatgagcaattgaaggtccatttgggagatggcatcaagttcattgaagacagtgttgctgcaaatcagtcagtaaatggcagtaccagaaatgcattcaaaatacttatcctcgatgttgattcatctgatctaagctctgggctgtcttgcccaccagaaaactttgtcgaagatcctttccttctaatagcaaaggagttccttttggagggcggcctttttgtcatcaatttagtctcgcggtcaacctcagtgagggaaacggttgtttcaagactgaaagcggtcttcgaacacctgtactcactgcaacttgaagaagacataaatgaggttctgtttgcatcaccgagcggaagatacctagaaatcaatgacattagtgcaggagcctccaaactgcaggacttgctcaaaattccggtggatgtagaatcagatatacagaagttgcagaaactccagtaacaatctcacctgacgcggagcaccatccatttgcatccacttgatttaggtgctgttcagttctcaccccagcagggcacaccaaaatgtcctttgttttgctcgtggaagccaaattaggaccagctgttttgtacaccagaattttgtctaactgcgctatagaaaaattttggcctgccagaatgtcttttacaaccaaagaggtgaaaaatctggcttgacctgattgggcctagaacaggctagagcgcatttcaaacttttaaacgtccacaaattggccgtgttttcccatatgtttgcctcgccaactctgcatgggtaaaacagtgcagctgtacagatttagaggatgtgtggaggaaacagaatgtgcatcatgcttggtctctgatggtttacaaatttcagcgaatatattgatcagaattcaggctgtgttatgatagctgtagcgtgtttggcaatgtgagtgtcgggtaggctctcgggaccctcgtaagcattcacacctcccgtcctagcagagtagcagcttcatgtactatgactatgggtgtactcggatacgaatgataagatttgtatgaatatgacatcttaaatactcaactttaagaatatgaatacggataaatatt

SEQ ID NO: 16963 - DNA, 2126 bp, Zea Mays
cattcttaaacccctacctaagctgcatagctagggtttccacgcatggcgaccacgacgccgcctacggcgatcctaggcaccctcgtcgacttcacatcgcgggagaactgggacaagttcttcgcgctccgcggcacgggggacagtttcgagtggtatgcggagtggcctaacctccgggccccgctcctcgacctcctcggggaccgcggcgccgcagcgggggcggcccaggagatcctggtgccagcgtgcgggagttcggtgctgtcggagaagctctacgacgcggggttctgccgcgtcaccaatgttgatttctcccgcgtcgtcgtcgccgacatgctccgccgtcacgcacgcgcgaggccagagatgcgctggcgtgtcatggacatgaccgacatgcagtttgcagatgggtcatttgatgtcattcttgataaaggaggactggatgctcttatggagccggaggctgggacaaaactggggataaaatatctgaatgaggtcaagagagttatgaaatcaggagggaagtttgtgtgccttacccttgcagaatcccatgttttagcgcttcttttgtctgagttcagatttggatgggatatgagtattcaagctatagctagtgaatcctctgaaaaatctgcgttccaaacattcatggtggtcatggtaaaagggaagatgggtgtagctcaaacaataaaatcatcattggatcaatctgctgaatactgtaacatgagacaggcaaatgctgtgattcgtgctcttgggaacgagaacatcatccgggagtcatactcgtctagtgttgatgtactgctctcattgcgagatcttcagctaggagctataggagatctgaaagtgattgtcccaggacgaaggaggcaattcattcttggtgaacaggaaacttcgctatattgctacaaggctattttattggatgccaagaagcaaacagaaacctttgtatatcactgtggagtttttattgtccctaaggtccatttgggagatggcatcaagttcattgaagacagtgttgctgcaaatcagtcagtaaatggcagtaccagaaatgcattcaaaatacttatcctcgatgttgattcatctgatctaagctctgggctgtcttgcccaccagaaaactttgtcgaagatcctttccttctaatagcaaaggagttccttttggagggcggcctttttgtcatcaatttagtctcgcggtcaacctcagtgagggaaacggttgtttcaagactgaaagcggtcttcgaacacctgtactcactgcaacttgaagaagacataaatgaggttctgtttgcatcaccgagcggaagatacctagaaatcaatgacattagtgcaggagcctccaaactgcaggacttgctcaaaattccggtggatgtagaatcagatatacagaagttgcagaaactccagtaacaatctcacctgacgcggagcaccatccatttgcatccacttgatttaggtgctgttcagttctcaccccagcagggcacaccaaaatgtcctttgttttgctcgtggaagccaaattaggaccagctgttttgtacaccagaattttgtctaactgcgctatagaaaaattttggcctgccagaatgtcttttacaaccaaagaggtgaaaaatctggcttgacctgattgggcctagaacaggctagagcgcatttcaaacttttaaacgtccacaaattggccgtgttttcccatatgtttgcctcgccaactctgcatgggtaaaacagtgcagctgtacagatttagaggatgtgtggaggaaacagaatgtgcatcatgcttggtctctgatggtttacaaatttcagcgaatatattgatcagaattcaggctgtgttatgatagctgtagcgtgtttggcaatgtgagtgtcgggtaggctctcgggaccctcgtaagcattcacacctcccgtcctagcagagtagcagcttcatgtactatgactatgggtgtactcggatacgaatgataagatttgtatgaatatgacatcttaaatactcaactttaagaatatgaatacggataaatatt

SEQ ID NO: 16964 - DNA, 2721 bp, Zea Mays
cattcttaaacccctacctaagctgcatagctagggtttccacgcatggcgaccacgacgccgcctacggcgatcctaggcaccctcgtcgacttcacatcgcgggagaactgggacaagttcttcgcgctccgcggcacgggggacagtttcgagtggtatgcggagtggcctaacctccgggccccgctcctcgacctcctcggggaccgcggcgccgcagcgggggcggcccaggagatcctggtgccagcgtgcgggagttcggtgctgtcggagaagctctacgacgcggggttctgccgcgtcaccaatgttgatttctcccgcgtcgtcgtcgccgacatgctccgccgtcacgcacgcgcgaggccagagatgcgctggcgtgtcatggacatgaccgacatgcagtttgcagatgggtcatttgatgtcattcttgataaaggaggactggatgctcttatggagccggaggctgggacaaaactggggataaaatatctgaatgaggtcaagagagttatgaaatcaggagggaagtttgtgtgccttacccttgcagaatcccatgttttagcgcttcttttgtctgagttcagatttggatgggatatgagtattcaagctatagctagtgaatcctctgaaaaatctgcgttccaaacattcatggtggtcatggtaaaagggaagatgggtgtagctcaaacaataaaatcatcattggatcaatctgctgaatactgtaacatgagacaggcaaatgctgtgattcgtgctcttgggaacgagaacatcatccgggagtcatactcgtctagtgttgatgtactgctctcattgcgagatcttcagctaggagctataggagatctgaaagtgattgtcccaggacgaaggaggcaattcattcttggtgaacaggaaacttcgctatattgctacaaggctattttattggatgccaagaagcaaacagaaacctttgtatatcactgtggagtttttattgtccctaaggctcgagctctggaatggctattttgttcctcagaaggacagtggcatgttgttgaaagtgcaagggctgcccgtctaattatgaaggatttatctccccttgttaaggatttagaacctggaaatcctgaagaggaggctcctataccgttcatgatggcaggtgatggtgttaaacaaagacatactctgcaagagaagttctggtttagtgcaatctgaagcgttgttaatcagagatcctcccagtgatgaggtagacaaaaagaacaaaagtgcagctgcaacatctaaaaaaagaaggaaccataaaaggggatccaagaacagtctgagaattgaccataaatttcttggtagctcatatcacagcagtatcatatctgggctttctttagttgcatcttctctgagtgctgctgcttcatctggagaaaaagtcagcatcaccgttgtaggccttggtgctggttgtttcccaatgtttctccgtggatgtctgcctttcgtagatattgaggtcgttgagttggaccccttggtggctgagctagcaaagaaatattttggcttttcaatggatgagcaattgaaggtccatttgggagatggcatcaagttcattgaagacagtgttgctgcaaatcagtcagtaaatggcagtaccagaaatgcattcaaaatacttatcctcgatgttgattcatctgatctaagctctgggctgtcttgcccaccagaaaactttgtcgaagatcctttccttctaatagcaaaggagttccttttggagggcggcctttttgtcatcaatttagtctcgcggtcaacctcagtgagggaaacggttgtttcaagactgaaagcggtcttcgaacacctgtactcactgcaacttgaagaagacataaatgaggttctgtttgcatcaccgagcggaagatacctagaaatcaatgacattagtgcaggagcctccaaactgcaggacttgctcaaaattccggtggatgtagaatcagatatacagaagttgcagaaactccagtaacaatctcacctgacgcggagcaccatccatttgcatccacttgatttaggtgctgttcagttctcaccccagcagggcacaccaaaatgtcctttgttttgctcgtggaagccaaattaggaccagctgttttgtacaccagaattttgtctaactgcgctatagaaaaattttggcctgccagaatgtcttttacaaccaaagaggtgaaaaatctggcttgacctgattgggcctagaacaggctagagcgcatttcaaacttttaaacgtccacaaattggccgtgttttcccatatgtttgcctcgccaactctgcatgggtaaaacagtgcagctgtacagatttagaggatgtgtggaggaaacagaatgtgcatcatgcttggtctctgatggtttacaaatttcagcgaatatattgatcagaattcaggctgtgttatgatagctgtagcgtgtttggcaatgtgagtgtcgggtaggctctcgggaccctcgtaagcattcacacctcccgtcctagcagagtagcagcttcatgtactatgactatgggtgtactcggatacgaatgataagatttgtatgaatatgacatcttaaatactcaactttaagaatatgaatacggataaatatt

SEQ ID NO: 16965 - DNA, 2759 bp, Zea Mays
cattcttaaacccctacctaagctgcatagctagggtttccacgcatggcgaccacgacgccgcctacggcgatcctaggcaccctcgtcgacttcacatcgcgggagaactgggacaagttcttcgcgctccgcggcacgggggacagtttcgagtggtatgcggagtggcctaacctccgggccccgctcctcgacctcctcggggaccgcggcgccgcagcgggggcggcccaggagatcctggtgccagcgtgcgggagttcggtgctgtcggagaagctctacgacgcggggttctgccgcgtcaccaatgttgatttctcccgcgtcgtcgtcgccgacatgctccgccgtcacgcacgcgcgaggccagagatgcgctggcgtgtcatggacatgaccgacatgcagtttgcagatgggtcatttgatgtcattcttgataaaggaggactggatgctcttatggagccggaggctgggacaaaactggggataaaatatctgaatgaggtcaagagagttatgaaatcaggagggaagtttgtgtgccttacccttgcagaatcccatgttttagcgcttcttttgtctgagttcagatttggatgggatatgagtattcaagctatagctagtgaatcctctgaaaaatctgcgttccaaacattcatggtggtcatggtaaaagggaagatgggtgtagctcaaacaataaaatcatcattggatcaatctgctgaatactgtaacatgagacaggcaaatgctgtgattcgtgctcttgggaacgagaacatcatccgggagtcatactcgtctagtgttgatgtactgctctcattgcgagatcttcagctaggagctataggagatctgaaagtgattgtcccaggacgaaggaggcaattcattcttggtgaacaggaaacttcgctatattgctacaaggctattttattggatgccaagaagcaaacagaaacctttgtatatcactgtggagtttttattgtccctaaggctcgagctctggaatggctattttgttcctcagaaggacagtggcatgttgttgaaagtgcaagggctgcccgtctaattatggttcatgatggcaggtgatggtgttaaacaaagacatactctgcaagagaaataactggtccaatggttgtggaagatgttgtctatgaaaatgctgatggagatcaaggttccatgtctgagaaaatgttccgtcgtcttatttttggaagaagttctggtttagtgcaatctgaagcgttgttaatcagagatcctcccagtgatgaggtagacaaaaagaacaaaagtgcagctgcaacatctaaaaaaagaaggaaccataaaaggggatccaagaacagtctgagaattgaccataaatttcttggtagctcatatcacagcagtatcatatctgggctttctttagttgcatcttctctgagtgctgctgcttcatctggagaaaaagtcagcatcaccgttgtaggccttggtgctggttgtttcccaatgtttctccgtggatgtctgcctttcgtagatattgaggtcgttgagttggaccccttggtggctgagctagcaaagaaatattttggcttttcaatggatgagcaattgaaggtccatttgggagatggcatcaagttcattgaagacagtgttgctgcaaatcagtcagtaaatggcagtaccagaaatgcattcaaaatacttatcctcgatgttgattcatctgatctaagctctgggctgtcttgcccaccagaaaactttgtcgaagatcctttccttctaatagcaaaggagttccttttggagggcggcctttttgtcatcaatttagtctcgcggtcaacctcagtgagggaaacggttgtttcaagactgaaagcggtcttcgaacacctgtactcactgcaacttgaagaagacataaatgaggttctgtttgcatcaccgagcggaagatacctagaaatcaatgacattagtgcaggagcctccaaactgcaggacttgctcaaaattccggtggatgtagaatcagatatacagaagttgcagaaactccagtaacaatctcacctgacgcggagcaccatccatttgcatccacttgatttaggtgctgttcagttctcaccccagcagggcacaccaaaatgtcctttgttttgctcgtggaagccaaattaggaccagctgttttgtacaccagaattttgtctaactgcgctatagaaaaattttggcctgccagaatgtcttttacaaccaaagaggtgaaaaatctggcttgacctgattgggcctagaacaggctagagcgcatttcaaacttttaaacgtccacaaattggccgtgttttcccatatgtttgcctcgccaactctgcatgggtaaaacagtgcagctgtacagatttagaggatgtgtggaggaaacagaatgtgcatcatgcttggtctctgatggtttacaaatttcagcgaatatattgatcagaattcaggctgtgttatgatagctgtagcgtgtttggcaatgtgagtgtcgggtaggctctcgggaccctcgtaagcattcacacctcccgtcctagcagagtagcagcttcatgtactatgactatgggtgtactcggatacgaatgataagatttgtatgaatatgacatcttaaatactcaactttaagaatatgaatacggataaatatt

SEQ ID NO: 16966 - DNA, 2372 bp, Zea Mays
cattcttaaacccctacctaagctgcatagctagggtttccacgcatggcgaccacgacgccgcctacggcgatcctaggcaccctcgtcgacttcacatcgcgggagaactgggacaagttcttcgcgctccgcggcacgggggacagtttcgagtggtatgcggagtggcctaacctccgggccccgctcctcgacctcctcggggaccgcggcgccgcagcgggggcggcccaggagatcctggtgccagcgtgcgggagttcggtgctgtcggagaagctctacgacgcggggttctgccgcgtcaccaatgttgatttctcccgcgtcgtcgtcgccgacatgctccgccgtcacgcacgcgcgaggccagagatgcgctggcgtgtcatggacatgaccgacatgcagtttgcagatgggtcatttgatgtcattcttgataaaggaggactggatgctcttatggagccggaggctgggacaaaactggggataaaatatctgaatgaggtcaagagagttatgaaatcaggagggaagtttgtgtgccttacccttgcagaatcccatgttttagcgcttcttttgtctgagttcagatttggatgggatatgagtattcaagctatagctagtgaatcctctgaaaaatctgcgttccaaacattcatggtggtcatggtaaaagggaagatgggtgtagctcaaacaataaaatcatcattggatcaatctgctgaatactgtaacatgagacaggcaaatgctgtgattcgtgctcttgggaacgagaacatcatccgggagtcatactcgtctagtgttgatgtactgctctcattgcgagatcttcagctaggagctataggagatctgaaagtgattgtcccaggacgaaggaggcaattcattcttggtgaacaggaaacttcgctatattgctacaaggctattttattggatgccaagaagcaaacagaaacctttgtatatcactgtggagtttttattgtccctaaggctcgagctctggaatggctattttgttcctcagaaggacagtggcatgttgttgaaagtgcaagggctgcccgtctaattatggttttcttggatagcagacatgcaaatatcgacatggatattattaagaaggatttatctccccttgttaaggatttagaacctggaaatcctgaagaggaggctcctataccgttcatgatggcaggtgatggtgttaaacaaagacatactctgcaagaggtccatttgggagatggcatcaagttcattgaagacagtgttgctgcaaatcagtcagtaaatggcagtaccagaaatgcattcaaaatacttatcctcgatgttgattcatctgatctaagctctgggctgtcttgcccaccagaaaactttgtcgaagatcctttccttctaatagcaaaggagttccttttggagggcggcctttttgtcatcaatttagtctcgcggtcaacctcagtgagggaaacggttgtttcaagactgaaagcggtcttcgaacacctgtactcactgcaacttgaagaagacataaatgaggttctgtttgcatcaccgagcggaagatacctagaaatcaatgacattagtgcaggagcctccaaactgcaggacttgctcaaaattccggtggatgtagaatcagatatacagaagttgcagaaactccagtaacaatctcacctgacgcggagcaccatccatttgcatccacttgatttaggtgctgttcagttctcaccccagcagggcacaccaaaatgtcctttgttttgctcgtggaagccaaattaggaccagctgttttgtacaccagaattttgtctaactgcgctatagaaaaattttggcctgccagaatgtcttttacaaccaaagaggtgaaaaatctggcttgacctgattgggcctagaacaggctagagcgcatttcaaacttttaaacgtccacaaattggccgtgttttcccatatgtttgcctcgccaactctgcatgggtaaaacagtgcagctgtacagatttagaggatgtgtggaggaaacagaatgtgcatcatgcttggtctctgatggtttacaaatttcagcgaatatattgatcagaattcaggctgtgttatgatagctgtagcgtgtttggcaatgtgagtgtcgggtaggctctcgggaccctcgtaagcattcacacctcccgtcctagcagagtagcagcttcatgtactatgactatgggtgtactcggatacgaatgataagatttgtatgaatatgacatcttaaatactcaactttaagaatatgaatacggataaatatt

SEQ ID NO: 16967 - DNA, 2638 bp, Zea Mays
cgcattcttaaacccctacctaagctgcatagctagggtttccacgcatggcgaccacgacgccgcctacggcgatcctaggcaccctcgtcgacttcacatcgcgggagaactgggacaagttcttcgcgctccgcggcacgggggacagtttcgagtggtatgcggagtggcctaacctccgggccccgctcctcgacctcctcggggaccgcggcgccgcagcgggggcggcccaggagatcctggtgccagcgtgcgggagttcggtgctgtcggagaagctctacgacgcggggttctgccgcgtcaccaatgttgatttctcccgcgtcgtcgtcgccgacatgctccgccgtcacgcacgcgcgaggccagagatgcgctggcgtgtcatggacatgaccgacatgcagtttgcagatgggtcatttgatgtcattcttgataaaggaggactggatgctcttatggagccggaggctgggacaaaactggggataaaatatctgaatgaggtcaagagagttatgaaatcaggagggaagtttgtgtgccttacccttgcagaatcccatgttttagcgcttcttttgtctgagttcagatttggatgggatatgagtattcaagctatagctagtgaatcctctgaaaaatctgcgttccaaacattcatggtggtcatggtaaaagggaagatgggtgtagctcaaacaataaaatcatcattggatcaatctgctgaatactgtaacatgagacaggcaaatgctgtgattcgtgctcttgggaacgagaacatcatccgggagtcatactcgtctagtgttgatgtactgctctcattgcgagatcttcagctaggagctataggagatctgaaagtgattgtcccaggacgaaggaggcaattcattcttggtgaacaggaaacttcgctatattgctacaaggctattttattggatgccaagaagcaaacagaaacctttgtatatcactgtggagtttttattgtccctaaggtaacttcagaaataactggtccaatggttgtggaagatgttgtctatgaaaatgctgatggagatcaaggttccatgtctgagaaaatgttccgtcgtcttatttttggaagaagttctggtttagtgcaatctgaagcgttgttaatcagagatcctcccagtgatgaggtagacaaaaagaacaaaagtgcagctgcaacatctaaaaaaagaaggaaccataaaaggggatccaagaacagtctgagaattgaccataaatttcttggtagctcatatcacagcagtatcatatctgggctttctttagttgcatcttctctgagtgctgctgcttcatctggagaaaaagtcagcatcaccgttgtaggccttggtgctggttgtttcccaatgtttctccgtggatgtctgcctttcgtagatattgaggtcgttgagttggaccccttggtggctgagctagcaaagaaatattttggcttttcaatggatgagcaattgaaggtccatttgggagatggcatcaagttcattgaagacagtgttgctgcaaatcagtcagtaaatggcagtaccagaaatgcattcaaaatacttatcctcgatgttgattcatctgatctaagctctgggctgtcttgcccaccagaaaactttgtcgaagatcctttccttctaatagcaaaggagttccttttggagggcggcctttttgtcatcaatttagtctcgcggtcaacctcagtgagggaaacggttgtttcaagactgaaagcggtcttcgaacacctgtactcactgcaacttgaagaagacataaatgaggttctgtttgcatcaccgagcggaagatacctagaaatcaatgacattagtgcaggagcctccaaactgcaggacttgctcaaaattccggtggatgtagaatcagatatacagaagttgcagaaactccagtaacaatctcacctgacgcggagcaccatccatttgcatccacttgatttaggtgctgttcagttctcaccccagcagggcacaccaaaatgtcctttgttttgctcgtggaagccaaattaggaccagctgttttgtacaccagaattttgtctaactgcgctatagaaaaattttggcctgccagaatgtcttttacaaccaaagaggtgaaaaatctggcttgacctgattgggcctagaacaggctagagcgcatttcaaacttttaaacgtccacaaattggccgtgttttcccatatgtttgcctcgccaactctgcatgggtaaaacagtgcagctgtacagatttagaggatgtgtggaggaaacagaatgtgcatcatgcttggtctctgatggtttacaaatttcagcgaatatattgatcagaattcaggctgtgttatgatagctgtagcgtgtttggcaatgtgagtgtcgggtaggctctcgggaccctcgtaagcattcacacctcccgtcctagcagagtagcagcttcatgtactatgactatgggtgtactcggatacgaatgataagatttgtatgaatatgacatcttaaatactcaactttaagaatatgaatacggataaatatt

SEQ ID NO: 16968 - DNA, 2750 bp, Zea Mays
gttaatcatagtttacctccggcgcattcttaaacccctacctaagctgcatagctagggtttccacgcatggcgaccacgacgccgcctacggcgatcctaggcaccctcgtcgacttcacatcgcgggagaactgggacaagttcttcgcgctccgcggcacgggggacagtttcgagtggtatgcggagtggcctaacctccgggccccgctcctcgacctcctcggggaccgcggcgccgcagcgggggcggcccaggagatcctggtgccagcgtgcgggagttcggtgctgtcggagaagctctacgacgcggggttctgccgcgtcaccaatgttgatttctcccgcgtcgtcgtcgccgacatgctccgccgtcacgcacgcgcgaggccagagatgcgctggcgtgtcatggacatgaccgacatgcagtttgcagatgggtcatttgatgtcattcttgataaaggaggactggatgctcttatggagccggaggctgggacaaaactggggataaaatatctgaatgaggtcaagagagttatgaaatcaggagggaagtttgtgtgccttacccttgcagaatcccatgttttagcgcttcttttgtctgagttcagatttggatgggatatgagtattcaagctatagctagtgaatcctctgaaaaatctgcgttccaaacattcatggtggtcatggtaaaagggaagatgggtgtagctcaaacaataaaatcatcattggatcaatctgctgaatactgtaacatgagacaggcaaatgctgtgattcgtgctcttgggaacgagaacatcatccgggagtcatactcgtctagtgttgatgtactgctctcattgcgagatcttcagctaggagctataggagatctgaaagtgattgtcccaggacgaaggaggcaattcattcttggtgaacaggaaacttcgctatattgctacaaggctattttattggatgccaagaagcaaacagaaacctttgtatatcactgtggagtttttattgtccctaaggctcgagctctggaatggctattttgttcctcagaaggacagtggcatgttgttgaaagtgcaagggctgcccgtctaattatggttttcttggatagcagacatgcaaatatcgacatggatattattaagaaggatttatctccccttgttaaggatttagaacctggaaatcctgaagaggaggctcctataccgttcatgatggcaggtgatggtgttaaacaaagacatactctgcaagaggtaacttcagaaataactggtccaatggttgtggaagatgttgtctatgaaaatgctgatggagatcaaggttccatgtctgagaaaatgttccgtcgtcttatttttggaagaagttctggtttagtgcaatctgaagcgttgttaatcagagatcctcccagtgatgaggtagacaaaaagaacaaaagtgcagctgcaacatctaaaaaaagaaggaaccataaaaggggatccaagaacagtctgagaattgaccataaatttcttggtagctcatatcacagcagtatcatatctgggctttctttagttgcatcttctctgagtgctgctgcttcatctggagaaaaagtccatttgggagatggcatcaagttcattgaagacagtgttgctgcaaatcagtcagtaaatggcagtaccagaaatgcattcaaaatacttatcctcgatgttgattcatctgatctaagctctgggctgtcttgcccaccagaaaactttgtcgaagatcctttccttctaatagcaaaggagttccttttggagggcggcctttttgtcatcaatttagtctcgcggtcaacctcagtgagggaaacggttgtttcaagactgaaagcggtcttcgaacacctgtactcactgcaacttgaagaagacataaatgaggttctgtttgcatcaccgagcggaagatacctagaaatcaatgacattagtgcaggagcctccaaactgcaggacttgctcaaaattccggtggatgtagaatcagatatacagaagttgcagaaactccagtaacaatctcacctgacgcggagcaccatccatttgcatccacttgatttaggtgctgttcagttctcaccccagcagggcacaccaaaatgtcctttgttttgctcgtggaagccaaattaggaccagctgttttgtacaccagaattttgtctaactgcgctatagaaaaattttggcctgccagaatgtcttttacaaccaaagaggtgaaaaatctggcttgacctgattgggcctagaacaggctagagcgcatttcaaacttttaaacgtccacaaattggccgtgttttcccatatgtttgcctcgccaactctgcatgggtaaaacagtgcagctgtacagatttagaggatgtgtggaggaaacagaatgtgcatcatgcttggtctctgatggtttacaaatttcagcgaatatattgatcagaattcaggctgtgttatgatagctgtagcgtgtttggcaatgtgagtgtcgggtaggctctcgggaccctcgtaagcattcacacctcccgtcctagcagagtagcagcttcatgtactatgactatgggtgtactcggatacgaatgataagatttgtatgaatatgacatcttaaatactcaactttaagaatatgaatacggataaatatt

SEQ ID NO: 16969 - DNA, 2953 bp, Zea Mays
cccttgtcgtgtcggtttgtcctcgcttcagttaccctcgtgactgacacccaatgggttaatcatagtttacctccggcgcattcttaaacccctacctaagctgcatagctagggtttccacgcatggcgaccacgacgccgcctacggcgatcctaggcaccctcgtcgacttcacatcgcgggagaactgggacaagttcttcgcgctccgcggcacgggggacagtttcgagtggtatgcggagtggcctaacctccgggccccgctcctcgacctcctcggggaccgcggcgccgcagcgggggcggcccaggagatcctggtgccagcgtgcgggagttcggtgctgtcggagaagctctacgacgcggggttctgccgcgtcaccaatgttgatttctcccgcgtcgtcgtcgccgacatgctccgccgtcacgcacgcgcgaggccagagatgcgctggcgtgtcatggacatgaccgacatgcagtttgcagatgggtcatttgatgtcattcttgataaaggaggactggatgctcttatggagccggaggctgggacaaaactggggataaaatatctgaatgaggtcaagagagttatgaaatcaggagggaagtttgtgtgccttacccttgcagaatcccatgttttagcgcttcttttgtctgagttcagatttggatgggatatgagtattcaagctatagctagtgaatcctctgaaaaatctgcgttccaaacattcatggtggtcatggtaaaagggaagatgggtgtagctcaaacaataaaatcatcattggatcaatctgctgaatactgtaacatgagacaggcaaatgctgtgattcgtgctcttgggaacgagaacatcatccgggagtcatactcgtctagtgttgatgtactgctctcattgcgagatcttcagctaggagctataggagatctgaaagtgattgtcccaggacgaaggaggcaattcattcttggtgaacaggaaacttcgctatattgctacaaggctattttattggatgccaagaagcaaacagaaacctttgtatatcactgtggagtttttattgtccctaaggctcgagctctggaatggctattttgttcctcagaaggacagtggcatgttgttgaaagtgcaagggctgcccgtctaattatggttttcttggatagcagacatgcaaatatcgacatggatattattaagaaggatttatctccccttgttaaggatttagaacctggaaatcctgaagaggaggctcctataccgttcatgatggcaggtgatggtgttaaacaaagacatactctgcaagagaaataactggtccaatggttgtggaagatgttgtctatgaaaatgctgatggagatcaaggttccatgtctgagaaaatgttccgtcgtcttatttttggaagaagttctggtttagtgcaatctgaagcgttgttaatcagagatcctcccagtgatgaggtagacaaaaagaacaaaagtgcagctgcaacatctaaaaaaagaaggaaccataaaaggggatccaagaacagtctgagaattgaccataaatttcttggtagctcatatcacagcagtatcatatctgggctttctttagttgcatcttctctgagtgctgctgcttcatctggagaaaaagtcagcatcaccgttgtaggccttggtgctggttgtttcccaatgtttctccgtggatgtctgcctttcgtagatattgaggtcgttgagttggaccccttggtggctgagctagcaaagaaatattttggcttttcaatggatgagcaattgaaggtccatttgggagatggcatcaagttcattgaagacagtgttgctgcaaatcagtcagtaaatggcagtaccagaaatgcattcaaaatacttatcctcgatgttgattcatctgatctaagctctgggctgtcttgcccaccagaaaactttgtcgaagatcctttccttctaatagcaaaggagttccttttggagggcggcctttttgtcatcaatttagtctcgcggtcaacctcagtgagggaaacggttgtttcaagactgaaagcggtcttcgaacacctgtactcactgcaacttgaagaagacataaatgaggttctgtttgcatcaccgagcggaagatacctagaaatcaatgacattagtgcaggagcctccaaactgcaggacttgctcaaaattccggtggatgtagaatcagatatacagaagttgcagaaactccagtaacaatctcacctgacgcggagcaccatccatttgcatccacttgatttaggtgctgttcagttctcaccccagcagggcacaccaaaatgtcctttgttttgctcgtggaagccaaattaggaccagctgttttgtacaccagaattttgtctaactgcgctatagaaaaattttggcctgccagaatgtcttttacaaccaaagaggtgaaaaatctggcttgacctgattgggcctagaacaggctagagcgcatttcaaacttttaaacgtccacaaattggccgtgttttcccatatgtttgcctcgccaactctgcatgggtaaaacagtgcagctgtacagatttagaggatgtgtggaggaaacagaatgtgcatcatgcttggtctctgatggtttacaaatttcagcgaatatattgatcagaattcaggctgtgttatgatagctgtagcgtgtttggcaatgtgagtgtcgggtaggctctcgggaccctcgtaagcattcacacctcccgtcctagcagagtagcagcttcatgtactatgactatgggtgtactcggatacgaatgataagatttgtatgaatatgacatcttaaatactcaactttaagaatatgaatacggataaatatt

SEQ ID NO: 16970 - DNA, 1250 bp, Zea Mays
ggtgaagcgaggggttggctcgtgtattttcgcaaatatctcctatcccttttctccctcccgcgatctcctccgctcgacgcctgtaccccgccgtcccgcgtccccgctccagctcgaaaccctagacctgtgcggctgtccctattctctccaacggaaagatgtactcggaccagatctccaccgggcgcaagcgctccatccacgaccgccttgacggcgacctccccgccggcacgggcgccggcggccgtgttcgtcacacggtgtccaagaggcaacggcagatagatgaaaaatggaagcatgatctgtatcgggaagacgatgaaccagcttcaaatccgaaggatttgcgattgaagcttcagaggcgaagttcacaacaaagctttaccagcacaaggagttctggtgtgcgtgatttacgtgagaagctatctggtataatgcacccacagccatcaaatgctgatccaaagcccaagccaaagccagtatcagaggttgttaacatctcaaggcgtcaaactgctgatgaaatgcctgcacgtcaaagcaagagagcaccaaaacagacttcattgaagaagacatctcagccaaaggttgaaagtccactcagcagtttcctgagttcccttgggcttgagaagtactcgattaccttccaggcagaggaggttgacatggcagccctaaggcacatgacggagagtgatctgaaagctttgggcattccaatgggtcctcggaagaagattatccttgccttggagccaagagcataagggaatggcaagtgtaggaaggtgggagggatttgctaggcatgctcatgtgcaagttcgataaaactctgtaaccacatcttggaaagggtaacaacgacaatggtttgtgggcttcttgtaacacgtatgctgccctgttgagcatgttcaacgaagtttaggatgttagaaggcaggccacgccgtgtattgatgcaacttctatttctgtgttgattaaatggtgctgtatacatgttgggggtctttgggttggtcttagaatgctatatcctataactacacttttcttatccacagggtatgctatatttgaagctaggtggtttggggatatgcacatcagcaatggttgttctgggccctggtttcagtgtattgggctcttgtttaagactcggcatacttgctttggattttggtttatttgcttcaagttagaatgaaaagttt

SEQ ID NO: 16971 - DNA, 1249 bp, Zea Mays
ggtgaagcgaggggttggctcgtgtattttcgcaaatatctcctatcccttttctccctcccgcgatctcctccgctcgacgcctgtaccccgccgtcccgcgtccccgctccagctcgaaaccctagacctgtgcggctgtccctattctctccaacggaaagatgtactcggaccagatctccaccgggcgcaagcgctccatccacgaccgccttgacggcgacctccccgccggcacgggcgccggcggccgtgttcgtcacacggtgtccaagagatagatgaaaaatggaagcatgatctgtatcgggaagacgatgaaccagcttcaaaatcaatagatccgaaggatttgcgattgaagcttcagaggcgaagttcacaacaaagctttaccagcacaaggagttctggtgtgcgtgatttacgtgagaagctatctggtataatgcacccacagccatcaaatgctgatccaaagcccaagccaaagccagtatcagaggttgttaacatctcaaggcgtcaaactgctgatgaaatgcctgcacgtcaaagcaagagagcaccaaaacagacttcattgaagaagacatctcagccaaaggttgaaagtccactcagcagtttcctgagttcccttgggcttgagaagtactcgattaccttccaggcagaggaggttgacatggcagccctaaggcacatgacggagagtgatctgaaagctttgggcattccaatgggtcctcggaagaagattatccttgccttggagccaagagcataagggaatggcaagtgtaggaaggtgggagggatttgctaggcatgctcatgtgcaagttcgataaaactctgtaaccacatcttggaaagggtaacaacgacaatggtttgtgggcttcttgtaacacgtatgctgccctgttgagcatgttcaacgaagtttaggatgttagaaggcaggccacgccgtgtattgatgcaacttctatttctgtgttgattaaatggtgctgtatacatgttgggggtctttgggttggtcttagaatgctatatcctataactacacttttcttatccacagggtatgctatatttgaagctaggtggtttggggatatgcacatcagcaatggttgttctgggccctggtttcagtgtattgggctcttgtttaagactcggcatacttgctttggattttggtttatttgcttcaagttagaatgaaaagttt

SEQ ID NO: 16972 - DNA, 1061 bp, Zea Mays
tgcttttctgttgagtactaagagatttccctttggtttcactgttggagtctgagattgtagagcagattgatagagatgttaagcgcactcatccggagatggaatttttcaatggggactcttcagattcgctgtctaatcaggagtcactaaagcgtatacttacaatatttgcaaaattgaatccgggtataagatatgtacaaggaatgaatgaggttttggcacctctctattatgttttcaagaatgaccctgaccaaagtcaagctgctttagcagagccagatgccttcttctgttttgtcgagctgcttagcgggttccgagacaacttttgcaagcaacttgacaacagcgtggttggcatacgctccacaattactacactatcacagcttctgagaagacacgacgaggaactctggcggcatttagaagttgtaaccaaggtcaatccacagttctacgcattcagatggatcaccttgctgctaacgcaggagttccagttccgtgactgcctcagcctgtgggacacactgttgggcgacccagaggggcctcaggctacgttgttgcgggtctgctgcgcgatgctaattcttgtccggagaaggctcttggctggcgatttcactgcgaatctcaagcttctccagaactacccacccacaaacatcgaccacatcctacacattgctaacaagctgcgaggaccgcttcctttctgaccagttggatcccttgcgtactttgttaccgtatacggttttgtgctagactatgtttatccagggaaagaaagctgcgttaagaactcttttaaaatgaacctacaaagcaacagttggttctcgtgtagtttccgttccggctttatgccggaatctggatgcccgtgcggctttgctgtttgtgaatgtcgactgaacgagtgccctgcacctctcaacttcagtcgaagtccgtggccacagggcaacatcaacacaagcatgtagcagcgcagtgttttgtgcaccaaactaaccctctctatactcactttccggtgc

SEQ ID NO: 16973 - DNA, 1754 bp, Zea Mays
accgggccggtccaggtccaccccacccgagacagagaccaaccgccgctgccccatctccggagtcccgctcctaaaaccccgccagccagcggtgccgccgccggtgacatggacgacggcgacactcccagacgcaaatccgtcccagattggctgaacagcccgatctggtctgcgcctccgccgtctccacgccacagctcccttccccccacggcaccgtccccccctcagccgccaccatctcctctgccccctccccagccacggcgggatccgactcccatccctcctcccaacgccccacgcgacgccgatgtttcagacgacgaaggcaagggcgcgggcgccccgtcgtgcgcccacctcgtcgctgagttcaaagtcgcgctggataggaaggtggtggatctggcagagctccggaggctcgcatgccagggcgtgcccgacgccgctggtattcggcccatcgtctggaagcttctcttgggatatgtgccaactgatcgtgctctatggccgtatgaactggagaaaaagaggtcccaatactgtgatttcaaagatgaacttctggttaatcctaagttactcgaagaatggaggaaatgacagcttctgaaagagaggaacataatgctgaaggcaccggtgtgctaccaagggcggaaatcgttcgtgatgagcatcctctaagccttgggaaaactagtgtttggaaccaatacttccaggagtctgagattgtagagcagattgatagagatgttaagcgcactcatccggagatggaatttttcaatggggactcttcagattcgctgtctaatcaggagtcactaaagcgtatacttacaatatttgcaaaattgaatccgggtataagatatgtacaaggaatgaatgaggttttggcacctctctattatgttttcaagaatgaccctgaccaaagtcaagctgctttagcagagccagatgccttcttctgttttgtcgagctgcttagcgggttccgagacaacttttgcaagcaacttgacaacagcgtggttggcatacgctccacaattactacactatcacagcttctgagaagacacgacgaggaactctggcggcatttagaagttgtaaccaaggtcaatccacagttctacgcattcagatggatcaccttgctgctaacgcaggagttccagttccgtgactgcctcagcctgtgggacacactgttgggcgacccagaggggcctcaggctacgttgttgcgggtctgctgcgcgatgctaattcttgtccggagaaggctcttggctggcgatttcactgcgaatctcaagcttctccagaactacccacccacaaacatcgaccacatcctacacattgctaacaagctgcgaggaccgcttcctttctgaccagttggatcccttgcgtactttgttaccgtatacggttttgtgctagactatgtttatccagggaaagaaagctgcgttaagaactcttttaaaatgaacctacaaagcaacagttggttctcgtgtagtttccgttccggctttatgccggaatctggatgcccgtgcggctttgctgtttgtgaatgtcgactgaacgagtgccctgcacctctcaacttcagtcgaagtccgtggccacagggcaacatcaacacaagcatgtagcagcgcagtgttttgtgcaccaaactaaccctctctatactcactttccggtgc

SEQ ID NO: 16974 - DNA, 1772 bp, Zea Mays
gcttggcaccgggccggtccaggtccaccccacccgagacagagaccaaccgccgctgccccatctccggagtcccgctcctaaaaccccgccagccagcggtgccgccgccggtgacatggacgacggcgacactcccagacgcaaatccgtcccagattggctgaacagcccgatctggtctgcgcctccgccgtctccacgccacagctcccttccccccacggcaccgtccccccctcagccgccaccatctcctctgccccctccccagccacggcgggatccgactcccatccctcctcccaacgccccacgcgacgccgatgtttcagacgacgaaggcaagggcgcgggcgccccgtcgtgcgcccacctcgtcgctgagttcaaagtcgcgctggataggaaggtggtggatctggcagagctccggaggctcgcatgccagggcgtgcccgacgccgctggtattcggcccatcgtctggaagttagcagcttctcttgggatatgtgccaactgatcgtgctctatggccgtatgaactggagaaaaagaggtcccaatactgtgatttcaaagatgaacttctggttaatccttcagaagttactcgaagaatggaggaaatgacagcttctgaaagagaggaacataatgctgaaggcaccggtgtgctaccaagggcggaaatcgttcgtgatgagcatcctctaagccttgggaaaactagtgtttggaaccaatacttccaggagtctgagattgtagagcagattgatagagatgttaagcgcactcatccggagatggaatttttcaatggggactcttcagattcgctgtctaatcaggagtcactaaagcgtatacttacaatatttgcaaaattgaatccgggtataagatatgtacaaggaatgaatgaggttttggcacctctctattatgttttcaagaatgaccctgaccaaagtcaagctgctttagcagagccagatgccttcttctgttttgtcgagctgcttagcgggttccgagacaacttttgcaagcaacttgacaacagcgtggttggcatacgctccacaattactacactatcacagcttctgagaagacacgacgaggaactctggcggcatttagaagttgtaaccaaggtcaatccacagttctacgcattcagatggatcaccttgctgctaacgcaggagttccagttccgtgactgcctcagcctgtgggacacactgttgggcgacccagaggggcctcaggctacgttgttgcgggtctgctgcgcgatgctaattcttgtccggagaaggctcttggctggcgatttcactgcgaatctcaagcttctccagaactacccacccacaaacatcgaccacatcctacacattgctaacaagctgcgaggaccgcttcctttctgaccagttggatcccttgcgtactttgttaccgtatacggttttgtgctagactatgtttatccagggaaagaaagctgcgttaagaactcttttaaaatgaacctacaaagcaacagttggttctcgtgtagtttccgttccggctttatgccggaatctggatgcccgtgcggctttgctgtttgtgaatgtcgactgaacgagtgccctgcacctctcaacttcagtcgaagtccgtggccacagggcaacatcaacacaagcatgtagcagcgcagtgttttgtgcaccaaactaaccctctctatactcactttccggtgc

SEQ ID NO: 16975 - DNA, 1710 bp, Zea Mays
cagccgcttggcaccgggccggtccaggtccaccccacccgagacagagaccaaccgccgctgccccatctccggagtcccgctcctaaaaccccgccagccagcggtgccgccgccggtgacatggacgacggcgacactcccagacgcaaatccgtcccagattggctgaacagcccgatctggtctgcgcctccgccgtctccacgccacagctcccttccccccacggcaccgtccccccctcagccgccaccatctcctctgccccctccccagccacggcgggatccgactcccatccctcctcccaacgccccacgcgacgccgatgtttcagacgacgaaggcaagggcgcgggcgccccgtcgtgcgcccacctcgtcgctgagttcaaagtcgcgctggataggaaggtggtggatctggcagagctccggaggctcgcatgccagggcgtgcccgacgccgctggtattcggcccatcgtctggaagaggtcccaatactgtgatttcaaagatgaacttctggttaatccttcagaagttactcgaagaatggaggaaatgacagcttctgaaagagaggaacataatgctgaaggcaccggtgtgctaccaagggcggaaatcgttcgtgatgagcatcctctaagccttgggaaaactagtgtttggaaccaatacttccaggagtctgagattgtagagcagattgatagagatgttaagcgcactcatccggagatggaatttttcaatggggactcttcagattcgctgtctaatcaggagtcactaaagcgtatacttacaatatttgcaaaattgaatccgggtataagatatgtacaaggaatgaatgaggttttggcacctctctattatgttttcaagaatgaccctgaccaaagtcaagctgctttagcagagccagatgccttcttctgttttgtcgagctgcttagcgggttccgagacaacttttgcaagcaacttgacaacagcgtggttggcatacgctccacaattactacactatcacagcttctgagaagacacgacgaggaactctggcggcatttagaagttgtaaccaaggtcaatccacagttctacgcattcagatggatcaccttgctgctaacgcaggagttccagttccgtgactgcctcagcctgtgggacacactgttgggcgacccagaggggcctcaggctacgttgttgcgggtctgctgcgcgatgctaattcttgtccggagaaggctcttggctggcgatttcactgcgaatctcaagcttctccagaactacccacccacaaacatcgaccacatcctacacattgctaacaagctgcgaggaccgcttcctttctgaccagttggatcccttgcgtactttgttaccgtatacggttttgtgctagactatgtttatccagggaaagaaagctgcgttaagaactcttttaaaatgaacctacaaagcaacagttggttctcgtgtagtttccgttccggctttatgccggaatctggatgcccgtgcggctttgctgtttgtgaatgtcgactgaacgagtgccctgcacctctcaacttcagtcgaagtccgtggccacagggcaacatcaacacaagcatgtagcagcgcagtgttttgtgcaccaaactaaccctctctatactcactttccggtgc

SEQ ID NO: 16976 - DNA, 1171 bp, Zea Mays
tcagaaagaagttactcgaagaatggaggaaatgacagcttctgaaagagaggaacataatgctgaaggcaccggtgtgctaccaagggcggaaatcgttcgtgatgagcatcctctaagccttgggaaaactagtgtttggaaccaatacttccaggagtctgagattgtagagcagattgatagagatgttaagcgcactcatccggagatggaatttttcaatggggactcttcagattcgctgtctaatcaggagtcactaaagcgtatacttacaatatttgcaaaattgaatccgggtataagatatgtacaaggaatgaatgaggttttggcacctctctattatgttttcaagaatgaccctgaccaaagtcaagctgctttagcagagccagatgccttcttctgttttgtcgagctgcttagcgggttccgagacaacttttgcaagcaacttgacaacagcgtggttggcatacgctccacaattactacactatcacagcttctgagaagacacgacgaggaactctggcggcatttagaagttgtaaccaaggtcaatccacagttctacgcattcagatggatcaccttgctgctaacgcaggagttccagttccgtgactgcctcagcctgtgggacacactgttgggcgacccagaggggcctcaggctacgttgttgcgggtctgctgcgcgatgctaattcttgtccggagaaggctcttggctggcgatttcactgcgaatctcaagcttctccagaactacccacccacaaacatcgaccacatcctacacattgctaacaagctgcgaggaccgcttcctttctgaccagttggatcccttgcgtactttgttaccgtatacggttttgtgctagactatgtttatccagggaaagaaagctgcgttaagaactcttttaaaatgaacctacaaagcaacagttggttctcgtgtagtttccgttccggctttatgccggaatctggatgcccgtgcggctttgctgtttgtgaatgtcgactgaacgagtgccctgcacctctcaacttcagtcgaagtccgtggccacagggcaacatcaacacaagcatgtagcagcgcagtgttttgtgcaccaaactaaccctctctatactcactttccggtgc

SEQ ID NO: 16977 - DNA, 2298 bp, Zea Mays
cgacgaatcttggttcccgaatcccaatggcgctctgtgctcaataaaagtgtgatggtcacatcgatcctctcgccagctcttgctcccctcctcctcctctgcttcttattccttcttctaaagctgcaacgattccaacctttacctcttttgctttcgcgatgtttctctttcccttttgatcggtttgatgtgacagtcttgtcaccataggcatcactccttcttgaccgcatccgcatcagtgaccgaccggtgacactgagcactgacggcactcgcattgctctctgctccttcctggttggtggtgttggtgagcaggacgagcaggaggaggaagcaagaagaatcctgggagctcgcgatgccgaggtggggggacgcggaggaaggagcagctgctgacgaggctatcgcggcggcagcggcagtgaggctggccaacaagatccggaagcgccgcgcggtgtcgtcgtcggggggctcggacccggcggccgggaggcggctacggtccaggaggcccgcggtgctgctgccgcggcgccggaccagcgcgggcggggacatgtcggagtcgtcccgtggccggcattgccgcggaggcggtacccgcctcgccgacgggacatggccgtccgcgtcggcgaggaggctcgtcgacgcgttctggcaggatatggacagcgacctgcttgaaggggatgcggcggcggcggcggcgcgccggagcttggttcagtggagcggcgcctccacggagagatcgagaagcaagagcaagatcttggaggctgatggcaagggaagtcggcgcaacggccatgcccggtggctttcggcagatatgacgagcaacggccatgcccggtggctttcggcagatatgacgagcaacggcagcggaatggaggttggtaaattctcccaagacgatgtttcaagatgtcctgagaaaacagtgaacctacaggatcttcagaacagcttgattgcatctaaggagcttgtaaaagtacttgcccacatatggggacctggagaactgaatccgtctagtgtatcactcatctctgctctacgttcagagcttgatgttgcccgttctcatgttagaaagctaataaaagaaaagaagtctaatccctatgaaattgaggacttaaagaagcaacttgcagaagaaatggaatcgtggaaggtcaaacaaaaggagaaggttgcaaatgctctccaatttatagtttcagagctagacactgagaagaagtcaaggaaaagagcagagaagacaaataagaagttgagtgttgccttagccaacactgaagcctcactgcaggcagtgacgaaagaacttgaaagggagaggaaatctaaaggaagagttgagaagatctgcaacgagctcatcaaaggcattgacgaggacaaagctgaggtggaggcactgaagagagaaaccgagaaggcacaagaagagctccagaaagagcgtgaaatgcttcaacttgcagacgagtggcgtgaacaaagggttcagatgaagctgctagaagcacggcttcagtttgaggagaaaaatgcagctgttaatcagctgcgcgatgaactccaagcttatctggatactaggaaagagcaggaaccaatgaacgatccaatgcaactgtcccatgcgtctgaaaatggcgccaccgcagctgatgatgtagtccctgacagaaatggtggaaacttcagcgaagacgacgcatcggaaggcagtgacatacactcgattgagctgaacgtcgatggcgtcaacaggacctacacctggagctacactccttcctcgaaaggcaggcagaggagcgcatcgaggcatgaatcgttttcggatagagggatggacggcgtgaactcgtggcgtttagagcaaagctttcggggcatggatgaggagctggagggagactgggcagaagggtgtagcaacggaatactgaccatggatcacgacgaggagaggtatctggcaatcaagaatctcagagagcagatgctggccgggtcagggttcatcctatcacaaggtagagaaaatgctgaaagagagtgttgtggcttgtaagataaactgcatatgaagagaattttaaagtaatgtgtcatatgggtcgctgtttgatgctaagatccagctgttcgagaattttaaagttatgttccatgattctgaggttttgtatgtgtgttgttgtccatttaagtggccggaaatagtttataaaaaaagcgaccggaaat

SEQ ID NO: 16978 - DNA, 2127 bp, Zea Mays
cgtccgtccatctccccactcgtgcgagatagcgatgctcctgagcagaagctccaaagcctcatgatggcagcaccggccagagccggcattcgcagcagctgatcgaccgagatcggacaggcacgccaggcagctcatcaatgggacgagcaggaggaggaagcaagaagaatcctgggagctcgcgatgccgaggtggggggacgcggaggaaggagcagctgctgacgaggctatcgcggcggcagcggcagtgaggctggccaacaagatccggaagcgccgcgcggtgtcgtcgtcggggggctcggacccggcggccgggaggcggctacggtccaggaggcccgcggtgctgctgccgcggcgccggaccagcgcgggcggggacatgtcggagtcgtcccgtggccggcattgccgcggaggcggtacccgcctcgccgacgggacatggccgtccgcgtcggcgaggaggctcgtcgacgcgttctggcaggatatggacagcgacctgcttgaaggggatgcggcggcggcggcggcgcgccggagcttggttcagtggagcggcgcctccacggagttgtcccagagatcgagaagcaagagcaagatcttggaggctgatggcaagggaagtcggcgcaacggccatgcccggtggctttcggcagatatgacgagcaacggccatgcccggtggctttcggcagatatgacgagcaacggcagcggaatggaggttggtaaattctcccaagacgatgtttcaagatgtcctgagaaaacagtgaacctacaggatcttcagaacagcttgattgcatctaaggagcttgtaaaagtacttgcccacatatggggacctggagaactgaatccgtctagtgtatcactcatctctgctctacgttcagagcttgatgttgcccgttctcatgttagaaagctaataaaagaaaagaagtctaatccctatgaaattgaggacttaaagaagcaacttgcagaagaaatggaatcgtggaaggtcaaacaaaaggagaaggttgcaaatgctctccaatttatagtttcagagctagacactgagaagaagtcaaggaaaagagcagagaagacaaataagaagttgagtgttgccttagccaacactgaagcctcactgcaggcagtgacgaaagaacttgaaagggagaggaaatctaaaggaagagttgagaagatctgcaacgagctcatcaaaggcattgacgaggacaaagctgaggtggaggcactgaagagagaaaccgagaaggcacaagaagagctccagaaagagcgtgaaatgcttcaacttgcagacgagtggcgtgaacaaagggttcagatgaagctgctagaagcacggcttcagtttgaggagaaaaatgcagctgttaatcagctgcgcgatgaactccaagcttatctggatactaggaaagagcaggaaccaatgaacgatccaatgcaactgtcccatgcgtctgaaaatggcgccaccgcagctgatgatgtagtccctgacagaaatggtggaaacttcagcgaagacgacgcatcggaaggcagtgacatacactcgattgagctgaacgtcgatggcgtcaacaggacctacacctggagctacactccttcctcgaaaggcaggcagaggagcgcatcgaggcatgaatcgttttcggatagagggatggacggcgtgaactcgtggcgtttagagcaaagctttcggggcatggatgaggagctggagggagactgggcagaagggtgtagcaacggaatactgaccatggatcacgacgaggagaggtatctggcaatcaagaatctcagagagcagatgctggccgggtcagggttcatcctatcacaaggtagagaaaatgctgaaagagagtgttgtggcttgtaagataaactgcatatgaagagaattttaaagtaatgtgtcatatgggtcgctgtttgatgctaagatccagctgttcgagaattttaaagttatgttccatgattctgaggttttgtatgtgtgttgttgtccatttaagtggccggaaatagtttataaaaaaagcgaccggaaat

SEQ ID NO: 16979 - DNA, 1676 bp, Zea Mays
cgtccgtccatctccccactcgtgcgagatagcgatgctcctgagcagaagctccaaagcctcatgatggcagcaccggccagagccggcattcgcagcagctgatcgaccgagatcggacaggcacgccaggcagctcatcaatggagatcgagaagcaagagcaagatcttggaggctgatggcaagggaagtcggcgcaacggccatgcccggtggctttcggcagatatgacgagcaacggccatgcccggtggctttcggcagatatgacgagcaacggcagcggaatggaggttggtaaattctcccaagacgatgtttcaagatgtcctgagaaaacagtgaacctacaggatcttcagaacagcttgattgcatctaaggagcttgtaaaagtacttgcccacatatggggacctggagaactgaatccgtctagtgtatcactcatctctgctctacgttcagagcttgatgttgcccgttctcatgttagaaagctaataaaagaaaagaagtctaatccctatgaaattgaggacttaaagaagcaacttgcagaagaaatggaatcgtggaaggtcaaacaaaaggagaaggttgcaaatgctctccaatttatagtttcagagctagacactgagaagaagtcaaggaaaagagcagagaagacaaataagaagttgagtgttgccttagccaacactgaagcctcactgcaggcagtgacgaaagaacttgaaagggagaggaaatctaaaggaagagttgagaagatctgcaacgagctcatcaaaggcattgacgaggacaaagctgaggtggaggcactgaagagagaaaccgagaaggcacaagaagagctccagaaagagcgtgaaatgcttcaacttgcagacgagtggcgtgaacaaagggttcagatgaagctgctagaagcacggcttcagtttgaggagaaaaatgcagctgttaatcagctgcgcgatgaactccaagcttatctggatactaggaaagagcaggaaccaatgaacgatccaatgcaactgtcccatgcgtctgaaaatggcgccaccgcagctgatgatgtagtccctgacagaaatggtggaaacttcagcgaagacgacgcatcggaaggcagtgacatacactcgattgagctgaacgtcgatggcgtcaacaggacctacacctggagctacactccttcctcgaaaggcaggcagaggagcgcatcgaggcatgaatcgttttcggatagagggatggacggcgtgaactcgtggcgtttagagcaaagctttcggggcatggatgaggagctggagggagactgggcagaagggtgtagcaacggaatactgaccatggatcacgacgaggagaggtatctggcaatcaagaatctcagagagcagatgctggccgggtcagggttcatcctatcacaaggtagagaaaatgctgaaagagagtgttgtggcttgtaagataaactgcatatgaagagaattttaaagtaatgtgtcatatgggtcgctgtttgatgctaagatccagctgttcgagaattttaaagttatgttccatgattctgaggttttgtatgtgtgttgttgtccatttaagtggccggaaatagtttataaaaaaagcgaccggaaat

SEQ ID NO: 16980 - DNA, 1999 bp, Zea Mays
gcccgccgcacgccgccgtcctactccggacgagcaggaggaggaagcaagaagaatcctgggagctcgcgatgccgaggtggggggacgcggaggaaggagcagctgctgacgaggctatcgcggcggcagcggcagtgaggctggccaacaagatccggaagcgccgcgcggtgtcgtcgtcggggggctcggacccggcggccgggaggcggctacggtccaggaggcccgcggtgctgctgccgcggcgccggaccagcgcgggcggggacatgtcggagtcgtcccgtggccggcattgccgcggaggcggtacccgcctcgccgacgggacatggccgtccgcgtcggcgaggaggctcgtcgacgcgttctggcaggatatggacagcgacctgcttgaaggggatgcggcggcggcggcggcgcgccggagcttggttcagtggagcggcgcctccacggagagatcgagaagcaagagcaagatcttggaggctgatggcaagggaagtcggcgcaacggccatgcccggtggctttcggcagatatgacgagcaacggccatgcccggtggctttcggcagatatgacgagcaacggcagcggaatggaggttggtaaattctcccaagacgatgtttcaagatgtcctgagaaaacagtgaacctacaggatcttcagaacagcttgattgcatctaaggagcttgtaaaagtacttgcccacatatggggacctggagaactgaatccgtctagtgtatcactcatctctgctctacgttcagagcttgatgttgcccgttctcatgttagaaagctaataaaagaaaagaagtctaatccctatgaaattgaggacttaaagaagcaacttgcagaagaaatggaatcgtggaaggtcaaacaaaaggagaaggttgcaaatgctctccaatttatagtttcagagctagacactgagaagaagtcaaggaaaagagcagagaagacaaataagaagttgagtgttgccttagccaacactgaagcctcactgcaggcagtgacgaaagaacttgaaagggagaggaaatctaaaggaagagttgagaagatctgcaacgagctcatcaaaggcattgacgaggacaaagctgaggtggaggcactgaagagagaaaccgagaaggcacaagaagagctccagaaagagcgtgaaatgcttcaacttgcagacgagtggcgtgaacaaagggttcagatgaagctgctagaagcacggcttcagtttgaggagaaaaatgcagctgttaatcagctgcgcgatgaactccaagcttatctggatactaggaaagagcaggaaccaatgaacgatccaatgcaactgtcccatgcgtctgaaaatggcgccaccgcagctgatgatgtagtccctgacagaaatggtggaaacttcagcgaagacgacgcatcggaaggcagtgacatacactcgattgagctgaacgtcgatggcgtcaacaggacctacacctggagctacactccttcctcgaaaggcaggcagaggagcgcatcgaggcatgaatcgttttcggatagagggatggacggcgtgaactcgtggcgtttagagcaaagctttcggggcatggatgaggagctggagggagactgggcagaagggtgtagcaacggaatactgaccatggatcacgacgaggagaggtatctggcaatcaagaatctcagagagcagatgctggccgggtcagggttcatcctatcacaaggtagagaaaatgctgaaagagagtgttgtggcttgtaagataaactgcatatgaagagaattttaaagtaatgtgtcatatgggtcgctgtttgatgctaagatccagctgttcgagaattttaaagttatgttccatgattctgaggttttgtatgtgtgttgttgtccatttaagtggccggaaatagtttataaaaaaagcgaccggaaat

SEQ ID NO: 16981 - DNA, 2751 bp, Zea Mays
atgtaccagtggcgcaagttcgagttctttgaggagaagtctgccggccgcggcggcggcgggggttcagccgccgccgtgccggccgagatcgcgggccgagtcacctgctgctcgggcggccggggccgcgtcgcggtggggtgcgacgacggcaccgtgggccttctcgaccgcgggttccgcctctcctatggcttccaggcctacgcctcctcggtcctcttcctccagcagctcaagaaatgttcttgtcacggttggagacgatgaccagtcatcttctcaggcatcagcaatctgtctaaaggtttttgacctcgataaagtacaagaagaaggatcaagcacaacaactcctttctgtgttcaaattttgcggatcttcactgatcaatttcctcaagcaaagattacatcatttatggttctagaagaagcaccacccatactgatgattgccattggactggacaatggtttcatttattgcatcaaagcttgcatattcaaccaccaaggaggcaaacacttgatcagattggttgtcagacgaatgctgtagcaatgagtgaccgtatggacttaattattggtagacctgaagctgtatatttctacgaagttgatggtagaggcccttgctgggcatttgatggtgagaaaaagtttgtaggttggtttcgaggctatttactctgcattattgaagatcagagaacacataaaagcacacttaatgtttatgatcttaagaatcggttgattgcacatagcatgcctgtgggggatgtttcacacttagtatgtgagtggggttatattattctcataatgtcagacaaaaagattctgtgcattggagagaaagacatggaaagtaagcttgatatgttgttcaagaaaaatctttatacagttgcaatcaatcttgtacaaagtcagcaggctgatcctgcttccactgctgaggtgctgcggaagtatggtgaccatctgtatggaaaacaggaatatgatgaggctatgtcccagtatatccacactattggtcatcttgaaccatcgtatgttatacagaagttccttgatgcaaagcgcatctacaacttgacaaattatttagagaagttacatgatcgagggttagcatctaaagaccacaccacccttctgttgaactgctataccaaattgaaagatgtggagaaacttaaccattttatcaaggatgaagatggggttggtgagatcaagtttgatgtggaaactgccataagagtatgccgagcagctggatatcatgaacatgctatgtttgtggcaaaaaaggctgggaggcatgagttgtacttgaagattttacttgaggatcttggtagatatgacgaggcactgcaatatatatctggcctcgaggcaaaccaggcaggtcttactgtaaaagaatatgggaaaattcttgtggaacataggcctgctgaaacagttgaaatactgttaaggctctgtacagatgttggagatcctacgtcgagaagaggttcaaacagtatgcacttgcttatgataccatccccaatggactttgtgaatatatttgtgcacagcccgcaatatctgatgggatttctggaaaattatatcaaaacagtaacggactcacctgcgcaaacagaaattcataacacccttctggagctctatatttcaaatgatttgagcttcccgtctatctctcaagaaaatgaatatgagaatcactatatcaaagaaataaaaggtaaagaaactgctaatgtctataggtcaggaataaaggaaaaaactggtcttggaaaagaagatcctaaagtagcaaagaatattgttgataggagaaggaaagggcttgcgttactcaaatctgcttggacatctgagatggaagatcctttgtatgatgttgatcttgctctcattctttgtaacactaatgcattcaaagatggtttgctatttctatatgagaaactaaaactttacaaagaggttattagttgttacaagcaagcacatgatcatcaaggtttaattgcatgttgcaagaagttgggggactcatctcaaggaggggatccttctctctggggggatctattgaagtattttggggatcttggggaagattgctctaaagaagttaaagaggtcttgacctacattgagaaagaggatgttgtacctcccatcgttgtgctacagacactatcaaaaaacccatgcttgacactctcagtcgtcaaagattacattgctcgcaagcttgaacaagaatcaaagctaattgaagatgatagaaaatccattgataagtatcaggcagagacagagttgatgaaaagggaaatacaagatctcaagacgaacgcgaaggttttccaactgagcaagtgtagcgcgtgcactttcacccttgatctacctgctgtccatttcctgtgcatgcactcgttccaccttcgctgccttggtgacaacgaaaaagaatgcccagaatgcgcgcctgaatacagatccgtcatggaggcaaagcagaagctagagcaaaacgccagggaccatgatctctttttcaggcagttgaggggttccaaggacggcttctctgtcattgcagactattttagcaagggcatattttggaaactttggtctcagccaaagtttttctctgcaaagagagcgccagctgggtcccgctctggctga

SEQ ID NO: 16982 - DNA, 2812 bp, Zea Mays
cccgtctaagccgcacgccgttccggccccgatccgccgcatcacgtcggcccgacatgtaccagtggcgcaagttcgagttctttgaggagaagtctgccggccgcggcggcggcgggggttcagccgccgccgtgccggccgagatcgcgggccgagtcacctgctgctcgggcggccggggccgcgtcgcggtggggtgcgacgacggcaccgtgggccttctcgaccgcgggttccgcctctcctatggcttccaggcctacgcctcctcggtcctcttcctccagcagctcaagcaaagaaatgttcttgtcacggttggagacgatgaccagtcatcttctcaggcatcagcaatctgtctaaaggtttttgacctcgataaagtacaagaagaaggatcaagcacaacaactcctttctgtgttcaaattttgcggatcttcactgatcaatttcctcaagcaaagattacatcatttatggttctagaagaagcaccacccatactgatgattgccattggactggacaatggtttcatttattgcatcaaagcttgcatattcaaccaccaaggaggcaaacacttgatcagattggttgtcagacgaatgctgtagcaatgagtgaccgtatggacttaattattggtagacctgaagctgtatatttctacgaagttgatggtagaggcccttgctgggcatttgatggtgagaaaaagtttgtaggttggtttcgaggctatttactctgcattattgaagatcagagaacacataaaagcacacttaatgtttatgatcttaagaatcggttgattgcacatagcatgcctgtgggggatgtttcacacttagtatgtgagtggggttatattattctcataatgtcagacaaaaagattctgtgcattggagagaaagacatggaaagtaagcttgatatgttgttcaagaaaaatctttatacagttgcaatcaatcttgtacaaagtcagcaggctgatcctgcttccactgctgaggtgctgcggaagtatggtgaccatctgtatggaaaacaggaatatgatgaggctatgtcccagtatatccacactattggtcatcttgaaccatcgtatgttatacagaagttccttgatgcaaagcgcatctacaacttgacaaattatttagagaagttacatgatcgagggttagcatctaaagaccacaccacccttctgttgaactgctataccaaattgaaagatgtggagaaacttaaccattttatcaaggatgaagatggggttggtgagatcaagtttgatgtggaaactgccataagagtatgccgagcagctggatatcatgaacatgctatgtttgtggcaaaaaaggctgggaggcatgagttgtacttgaagattttacttgaggatcttggtagatatgacgaggcactgcaatatatatctggcctcgaggcaaaccaggcaggtcttactgtaaaagaatatgggaaaattcttgtggaacataggcctgctgaaacagttgaaatactgttaaggctctgtacagatgttggagatcctacgtcgagaagaggttcaaacagtatgcacttgcttatgataccatccccaatggactttgtgaatatatttgtgcacagcccgcaatatctgatgggatttctggaaaattatatcaaaacagtaacggactcacctgcgcaaacagaaattcataacacccttctggagctctatatttcaaatgatttgagcttcccgtctatctctcaagaaaatgaatatgagaatcactatatcaaagaaataaaaggtaaagaaactgctaatgtctataggtcaggaataaaggaaaaaactggtcttggaaaagaagatcctaaagtagcaaagaatattgttgataggagaaggaaagggcttgcgttactcaaatctgcttggacatctgagatggaagatcctttgtatgatgttgatcttgctctcattctttgtaacactaatgcattcaaagatggtttgctatttctatatgagaaactaaaactttacaaagaggttattagttgttacaagcaagcacatgatcatcaaggtttaattgcatgttgcaagaagttgggggactcatctcaaggaggggatccttctctctggggggatctattgaagtattttggggatcttggggaagattgctctaaagaagttaaagaggtcttgacctacattgagaaagaggatgttgtacctcccatcgttgtgctacagacactatcaaaaaacccatgcttgacactctcagtcgtcaaagattacattgctcgcaagcttgaacaagaatcaaagctaattgaagatgatagaaaatccattgataagtatcaggcagagacagagttgatgaaaagggaaatacaagatctcaagacgaacgcgaaggttttccaactgagcaagtgtagcgcgtgcactttcacccttgatctacctgctgtccatttcctgtgcatgcactcgttccaccttcgctgccttggtgacaacgaaaaagaatgcccagaatgcgcgcctgaatacagatccgtcatggaggcaaagcagaagctagagcaaaacgccagggaccatgatctctttttcaggcagttgaggggttccaaggacggcttctctgtcattgcagactattttagcaagggcatattttggaaactttggtctcagccaaagtttttctctgcaaagagagcgccagctgggtcccgctctggctga

SEQ ID NO: 16983 - DNA, 3159 bp, Zea Mays
atgtaccagtggcgcaagttcgagttctttgaggagaagtctgccggccgcggcggcggcgggggttcagccgccgccgtgccggccgagatcgcgggccgagtcacctgctgctcgggcggccggggccgcgtcgcggtggggtgcgacgacggcaccgtgggccttctcgaccgcgggttccgcctctcctatggcttccaggcctacgcctcctcggtcctcttcctccagcagctcaagcaaagaaatgttcttgtcacggttggagacgatgaccagtcatcttctcaggcatcagcaatctgtctaaaggtttttgacctcgataaagtacaagaagaaggatcaagcacaacaactcctttctgtgttcaaattttgcggatcttcactgatcaatttcctcaagcaaagattacatcatttatggttctagaagaagcaccacccatactgatgattgccattggactggacaatggtttcatttattgcatcaaaggtgacattgcacgtgagcgtattacacgtttcaagttgcaagttgaggctgcttcagatggcagcactagtttgcctattactggtcttggttttcgagttgaggggcaagcacaccagctcttttctgtaactcctggttctgtaaccttgttcagcttgcatattcaaccaccaaggaggcaaacacttgatcagattggttgtcagacgaatgctgtagcaatgagtgaccgtatggacttaattattggtagacctgaagctgtatatttctacgaagttgatggtagaggcccttgctgggcatttgatggtgagaaaaagtttgtaggttggtttcgaggctatttactctgcattattgaagatcagagaacacataaaagcacacttaatgtttatgatcttaagaatcggttgattgcacatagcatgcctgtgggggatgtttcacacttagtatgtgagtggggttatattattctcataatgtcagacaaaaagattctgtgcattggagagaaagacatggaaagtaagcttgatatgttgttcaagaaaaatctttatacagttgcaatcaatcttgtacaaagtcagcaggctgatcctgcttccactgctgaggtgctgcggaagtatggtgaccatctgtatggaaaacaggaatatgatgaggctatgtcccagtatatccacactattggtcatcttgaaccatcgtatgttatacagaagttccttgatgcaaagcgcatctacaacttgacaaattatttagagaagttacatgatcgagggttagcatctaaagaccacaccacccttctgttgaactgctataccaaattgaaagatgtggagaaacttaaccattttatcaaggatgaagatggggttggtgagatcaagtttgatgtggaaactgccataagagtatgccgagcagctggatatcatgaacatgctatgtttgtggcaaaaaaggctgggaggcatgagttgtacttgaagattttacttgaggatcttggtagatatgacgaggcactgcaatatatatctggcctcgaggcaaaccaggcaggtcttactgtaaaagaatatgggaaaattcttgtggaacataggcctgctgaaacagttgaaatactgttaaggctctgtacagatgttggagatcctacgtcgagaagaggttcaaacagtatgcacttgcttatgataccatccccaatggactttgtgaatatatttgtgcacagcccgcaatatctgatgggatttctggaaaattatatcaaaacagtaacggactcacctgcgcaaacagaaattcataacacccttctggagctctatatttcaaatgatttgagcttcccgtctatctctcaagaaaatgaatatgagaatcactatatcaaagaaataaaaggtaaagaaactgctaatgtctataggtcaggaataaaggaaaaaactggtcttggaaaagaagatcctaaagtagcaaagaatattgttgataggagaaggaaagggcttgcgttactcaaatctgcttggacatctgagatggaagatcctttgtatgatgttgatcttgctctcattctttgtaacactaatgcattcaaagatggtttgctatttctatatgagaaactaaaactttacaaagaggttattagttgttacaagcaagcacatgatcatcaaggtttaattgcatgttgcaagaagttgggggactcatctcaaggaggggatccttctctctggggggatctattgaagtattttggggatcttggggaagattgctctaaagaagttaaagaggtcttgacctacattgagaaagaggatgttgtacctcccatcgttgtgctacagacactatcaaaaaacccatgcttgacactctcagtcgtcaaagattacattgctcgcaagcttgaacaagaatcaaagctaattgaagatgatagaaaatccattgataagtatcagagacagagttgatgaaaagggaaatacaagatctcaagacgaacgcgaaggttttccaactgagcaagtgtagcgcgtgcactttcacccttgatctacctgctgtccatttcctgtgcatgcactcgttccaccttcgctgccttggtgacaacgaaaaagaatgcccagaatgcgcgcctgaatacagatccgtcatggaggcaaagcagaagctagagcaaaacgccagggaccatgatctctttttcaggcagttgaggggttccaaggacggcttctctgtcattgcagactattttagcaagggcatagtgagcaagacaaccttacctcctgagaatggacggtagtgaaggaccactggtactccgttgccttgtacgacattatatggtgttatttccctttcatgcaccgggttatgcaatctggcctgtttcagccatgcagtgagggtttttttttctttttctttttggtttgacattgtagatactcattttccggcagtttctttctgaacccaagtgcatttgctttgacattgctgtgcagttttccagcattgggtttcgatgtttggctcgtgccctcctacttttgaaagaagtattatatgaatcatgttttttg

SEQ ID NO: 16984 - DNA, 3234 bp, Zea Mays
gagcccgatcgagttcccgtctaagccgcacgccgttccggccccgatccgccgcatcacgtcggcccgacatgtaccagtggcgcaagttcgagttctttgaggagaagtctgccggccgcggcggcggcgggggttcagccgccgccgtgccggccgagatcgcgggccgagtcacctgctgctcgggcggccggggccgcgtcgcggtggggtgcgacgacggcaccgtgggccttctcgaccgcgggttccgcctctcctatggcttccaggcctacgcctcctcggtcctcttcctccagcagctcaagcaaagaaatgttcttgtcacggttggagacgatgaccagtcatcttctcaggcatcagcaatctgtctaaaggtttttgacctcgataaagtacaagaagaaggatcaagcacaacaactcctttctgtgttcaaattttgcggatcttcactgatcaatttcctcaagcaaagattacatcatttatggttctagaagaagcaccacccatactgatgattgccattggactggacaatggtttcatttattgcatcaaaggtgacattgcacgtgagcgtattacacgtttcaagttgcaagttgaggctgcttcagatggcagcactagtttgcctattactggtcttggttttcgagttgaggggcaagcacaccagctcttttctgtaactcctggttctgtaaccttgttcagcttgcatattcaaccaccaaggaggcaaacacttgatcagattggttgtcagacgaatgctgtagcaatgagtgaccgtatggacttaattattggtagacctgaagctgtatatttctacgaagttgatggtagaggcccttgctgggcatttgatggtgagaaaaagtttgtaggttggtttcgaggctatttactctgcattattgaagatcagagaacacataaaagcacacttaatgtttatgatcttaagaatcggttgattgcacatagcatgcctgtgggggatgtttcacacttagtatgtgagtggggttatattattctcataatgtcagacaaaaagattctgtgcattggagagaaagacatggaaagtaagcttgatatgttgttcaagaaaaatctttatacagttgcaatcaatcttgtacaaagtcagcaggctgatcctgcttccactgctgaggtgctgcggaagtatggtgaccatctgtatggaaaacaggaatatgatgaggctatgtcccagtatatccacactattggtcatcttgaaccatcgtatgttatacagaagttccttgatgcaaagcgcatctacaacttgacaaattatttagagaagttacatgatcgagggttagcatctaaagaccacaccacccttctgttgaactgctataccaaattgaaagatgtggagaaacttaaccattttatcaaggatgaagatggggttggtgagatcaagtttgatgtggaaactgccataagagtatgccgagcagctggatatcatgaacatgctatgtttgtggcaaaaaaggctgggaggcatgagttgtacttgaagattttacttgaggatcttggtagatatgacgaggcactgcaatatatatctggcctcgaggcaaaccaggcaggtcttactgtaaaagaatatgggaaaattcttgtggaacataggcctgctgaaacagttgaaatactgttaaggctctgtacagatgttggagatcctacgtcgagaagaggttcaaacagtatgcacttgcttatgataccatccccaatggactttgtgaatatatttgtgcacagcccgcaatatctgatgggatttctggaaaattatatcaaaacagtaacggactcacctgcgcaaacagaaattcataacacccttctggagctctatatttcaaatgatttgagcttcccgtctatctctcaagaaaatgaatatgagaatcactatatcaaagaaataaaaggtaaagaaactgctaatgtctataggtcaggaataaaggaaaaaactggtcttggaaaagaagatcctaaagtagcaaagaatattgttgataggagaaggaaagggcttgcgttactcaaatctgcttggacatctgagatggaagatcctttgtatgatgttgatcttgctctcattctttgtaacactaatgcattcaaagatggtttgctatttctatatgagaaactaaaactttacaaagaggttattagttgttacaagcaagcacatgatcatcaaggtttaattgcatgttgcaagaagttgggggactcatctcaaggaggggatccttctctctggggggatctattgaagtattttggggatcttggggaagattgctctaaagaagttaaagaggtcttgacctacattgagaaagaggatgttgtacctcccatcgttgtgctacagacactatcaaaaaacccatgcttgacactctcagtcgtcaaagattacattgctcgcaagcttgaacaagaatcaaagctaattgaagatgatagaaaatccattgataagtatcaggcagagacagagttgatgaaaagggaaatacaagatctcaagacgaacgcgaaggttttccaactgagcaagtgtagcgcgtgcactttcacccttgatctacctgctgtccatttcctgtgcatgcactcgttccaccttcgctgccttggtgacaacgaaaaagaatgcccagaatgcgcgcctgaatacagatccgtcatggaggcaaagcagaagctagagcaaaacgccagggaccatgatctctttttcaggcagttgaggggttccaaggacggcttctctgtcattgcagactattttagcaagggcatagtgagcaagacaaccttacctcctgagaatggacggtagtgaaggaccactggtactccgttgccttgtacgacattatatggtgttatttccctttcatgcaccgggttatgcaatctggcctgtttcagccatgcagtgagggtttttttttctttttctttttggtttgacattgtagatactcattttccggcagtttctttctgaacccaagtgcatttgctttgacattgctgtgcagttttccagcattgggtttcgatgtttggctcgtgccctcctacttttgaaagaagtattatatgaatcatgttttttg

SEQ ID NO: 16985 - DNA, 1391 bp, Zea Mays
attacggacacacgggcaccccgtctcctcttctttctctgtgtctctgtctcctcaccaaagaaccgcaactaggaacggctcgccacagaagaacgtacggctatgaagacgaggcgcggtgcctgctactcctgccatgcggcgccgggcgagggcccggaggtgcaacgccggaagaggcgcaggacggcggccgaggcatcgccggcggctgccgaagatccaggtgtccgcctgggcgccagagacatgttcgaggatctgcccgacgatctcgtcgtctccatactgagggacgtcgccgcgtccgccggctcgccggccgatctcgccggcgccatgctcacgtgcaagagattcagggagctagtagcgcggagcaaggtggtggtgctcgcgcgggcgtcgccgcggtgcctctcggtgcgcgccaaggcctggtcggacgaggcgcaccggttcctgcagcgctgcgccgacgccggcaacctcgaagcctgctaccttctcggcatattcggttctactgcctggggagccgcggctcgggcgcggcgctgatggcggcggcggcggtgggcgggcaccgcgaggcgctgtactcgctggccgtgatccagttcaacggcagcggcggcgggaaggacgaccgcgacctccgcgccggagccgcgctgtgcgcgcgcgcggcggcgcggggccacgtggacgcgctccgcgagctggggcactgcctgcaggacggctacggcgtgcgccggtccgtgctggacgggcggcgcctcctcatccaggcgaacgcgcgcgagctcgcggccgcctcggtggcgcacccgtgcctcctcatgagcgacctggggtgccgcgccggcgaggcgcacgcggccaaccggttcctggtggactggttcgcgtcgcggccgctgggcttgacgcccggcggcaacggcaacggcagcgccgggacggcgggctcgccggaggaggacggcgttggcggtctccggctgtgctcgcaggcgctgtgcgggcggcccgagacgcggcggcacgagttcaggcggtgctcggtgtgcggcgtggtgaactactgctcccgcgcgtgccaggcgctgcactggaggatggcgcacaaggcggagtgcacgcccatggaccggtggctcgacgcggtgcagcccaacgccatcgccaatgcggacgcggcggccccggcgccgtgacgttctccgttactatatatgtcagttagcggccggccgtttctctgttttgccttttgcgtcgttctctgaacctgcgtacgtacatggtttgttggcaaatgctgatgtaacgttcttctggcgcgggcgatacgtagaacataggcagtgaaatttttttca

SEQ ID NO: 16986 - DNA, 1823 bp, Zea Mays
cacaaaccctatcctaatcggcccactaggggcccaacacctaaccctagcgcgcgccctggctcctccctgtggccgccgcctcctacttcctctccctcagccgccacccactctctcctcttccctctctctgcaccgacttctgcggcagcggcggcgacgccatgggcccggtgggcttggccgccgtcctgtgctacggggacaccgtgacgcagctccacatcgtgggcgccgcgggcgcgggcgcaccgcctctgcccaggaacttctccatcggggtcgtggtcacaacgctgtccaggctccccgacctcaaggtgctcacgctgtccgggctcgagctctgggcccgctgccgggcaagctcggtcgcctcgcgtcgctggagatcgtcaacatgagcggcaactatctcttcggcgaggtcctgcggggcgtgtcgcgcctcgccggtctccagacactggtcctcgatgacaacatgctgggcggtgaggtgccgacctggatcggcgcccagccgtcgctggccgtcctgagcctgcggaacaacacgttccagggcgtcgtgccggagtccctgggaagcgccccctcgctgcggtcgctcgttctcgcgtccaacaacctgtccgggaacctgccggacatgagccagcaggccaacctccaggtgctcgacgtcggcggcaactcgctcgagccggcgttccccaagctcgggaggaaggtggtcaccgtggtcctggctaggaaccggttcgtcgccttcctccagaacccgcagctcgtgcaggagttcaggcccgacaaacagtacaacatccacatgctccaggagcgatatcaggtccgggttcccccctactccctctgctcaagtcccgtttttgagacatgtatactttggttggctaggcatgcgggtttgtggatttccgtgtttattagatgttgttatgaaattatgaggttgtgcggtcattaaaaagtctcaaattgatttgctcatacatcggagcaatcttaggggctaggtgtttagttagcatatgatttggtcctagttgtacactatgttgcgaggaatcttgaattggctgaatggtgactttagctcccatattatggtaagtagattgtgagatgtgttttattggcactatctataatttagtatgttataggcattttagcacatgtgtcctagaatatagacatatgtagttcttcctattatcttagttgattcccttgtatcttatagtccaaaaagtgatttcgccattgtggctagttcaggtttatgttctttcaactctagcaagggacaattcacagtgagagttttctctgctggatcactgtagggaaaggacaatgcatattaaataggatcaaaattcagatgaaacattgaagatcggtcctgaccagattgaagctctgtatcagtgtgccaaatttcagtttgagtgtggtaactactcaggagcagctagagtgatgtagttgtgggcttttgaacaatagctggagtaatatgaaacattagtgatgtagttgtgggcttttgaactgcttcaagctggagtgatgtcgttgtggtgcttttgtgactgatcatctctggagcttttgtgaatgatctagctagctatctataaatgatctagttgtgaatgatattataattgtgatgcttttgtgaatatataattgtggtgcttttgtgtttatgtgatggatctatgactgtggtatactgattaactgtgtatgtctttatgatttgtgtataaaattcgtgatttgtg

SEQ ID NO: 16987 - DNA, 1322 bp, Zea Mays
ttcgaaaaaagaaaaaaaacacaaaccctatcctaatcggcccactaggggcccaacacctaaccctagcgcgcgccctggctcctccctgtggccgccgcctcctacttcctctccctcagccgccacccactctctcctcttccctctctctgcaccgacttctgcggcagcggcggcgacgccatgggcccggtgggcttggccgccgtcctgtgctacggggacaccgtgacgcagctccacatcgtgggcgccgcgggcgcgggcgcaccgcctctgcccaggaacttctccatcggggtcgtggtcacaacgctgtccaggctccccgacctcaaggtgctcacgctgtccgggctcgagctctgggcccgctgccgggcaagctcggtcgcctcgcgtcgctggagatcgtcaacatgagcggcaactatctcttcggcgaggtcctgcggggcgtgtcgcgcctcgccggtctccagacactggtcctcgatgacaacatgctgggcggtgaggtgccgacctggatcggcgcccagccgtcgctggccgtcctgagcctgcggaacaacacgttccagggcgtcgtgccggagtccctgggaagcgccccctcgctgcggtcgctcgttctcgcgtccaacaacctgtccgggaacctgccggacatgagccagcaggccaacctccaggtgctcgacgtcggcggcaactcgctcgagccggcgttccccaagctcgggaggaaggtggtcaccgtggtcctggctaggaaccggttcgtcgccttcctccagaacccgcagctcgtgcaggagttcaggcccgacaaacagtacaacatccacatgctccaggagcgatatcagggaaaggacaatgcatattaaataggatcaaaattcagatgaaacattgaagatcggtcctgaccagattgaagctctgtatcagtgtgccaaatttcagtttgagtgtggtaactactcaggagcagctagagtgatgtagttgtgggcttttgaacaatagctggagtaatatgaaacattagtgatgtagttgtgggcttttgaactgcttcaagctggagtgatgtcgttgtggtgcttttgtgactgatcatctctggagcttttgtgaatgatctagctagctatctataaatgatctagttgtgaatgatattataattgtgatgcttttgtgaatatataattgtggtgcttttgtgtttatgtgatggatctatgactgtggtatactgattaactgtgtatgtctttatgatttgtgtataaaattcgtgatttgtg

SEQ ID NO: 16988 - DNA, 740 bp, Zea Mays
atcaggttggtataagctccaagaaagatcaagcctgtcaacaagtcgagacaacatagaaaaggtgaggtttaattagtaaaccgagcattgcacgtaaaagaggggagcagggtaagcataaagcatatggtctattaaaggaccacactgcttgaggaagtgcattagatatcagatccccaaaaatatccaggcattctaaaaaatgataatgtcacatcctatcaaaagcaaatgttgtctttgatttcttctgacttccttatcatcccaaacaagcaatgagcatgttagtcctgacctcaattttaaaaaaagatattatcataaataagcatcctcaatgagataatatgtgtgtttggtttaataaaaaaacaatacctctagcaaaagcatgaaaatccataacaccaaaagatgttgaaaggtgaaaatctggcataatatagactccagaaaacttttacagtgtagactcattaagtcaaaacgaaacaatgggtaagatattagtatatggtatatcagcacaatggtcaaatttaagtatagtagtatatagtacataaataacaaaacacatagaataacacaaacatgggtttccatgtcaataaaattgcaaatcatgcccaattgcatcttgcgaaattaatagaacacgcagagagagatcatgttaagttaccttttgcccttcattggaagaatcacccaacttcgcttatatcact

SEQ ID NO: 16989 - DNA, 113 bp, Zea Mays
ccacttaaaaaaacgatatgccaaaggctaaataaatttatattgcaaattgaggtggctaacgctctagattcgaggtcacattaaactgaatataagcaacctatgtctac

SEQ ID NO: 16990 - DNA, 4325 bp, Zea Mays
cgattacccatggagagaaatatctagaaccggaacaatctagcatctaggattttcagtccaccatccagcaatccagcgagcatttacttgtgtcctagtgggttgccgaccaactatgggcccgtaggaaagaagcagcaatgcaacaattcaacaaagtaaaaaaacctaaactatgcgcgtgctccccagccgcttgccctcgaatctcaatcgctcaagcagtgcttcagtcgccggtcgccgctcgctggactgtcgctcgcccgaaccgccgctcgcccagaccgtcgcttgcctagagcctcggacgcagagcccagaccccggagtcccaggaccgtcgctcgcccacacgcagagcccatcagccgccgcttgctggacgcttggacagtcgcagagacggcagagcccgtcagtcgccgctcgcccggacgcttggagtcccggactgctcgctggacgcccggatggcatcttcatcgatgccgacgccgatgaacactgctgacgagcaaggaagttctattgcgggggctgagagtgggaatgaaactgagagcagcatgcaaccccaatctgtgaatgattcagagccaatacagattgatgatgatgttgatgaaattgaagaagtgattgcagaaccaaagaggaagcttacatctgttgtttggaatgaattcaagagggtgaagttaagttctagtgaaatcaaggcacaatgttcttattgtcataagaagcttaatgggaaaagtactcatggaacaaagcatcttcatgatcatttgaagatttgtgttttgcgcaagataaagctcactagccagaacaagattatgtcacaatcatctttgaggtttagttcacaagaaggggggaaagtatccgtggagagctacacttttgatcctgaagttgctagaaaggagcttgctgctatgatagcattgcatgaatatcctttatgcatcgttgagcatattggctttcgtcgatttgtgagtgcatgtcagccattattcaagatggttagcgagaatactattaggacattatggatgcatatacagaagaaaagaaaagagtgttgcagtacatgtgtgcatgtaagtcacgagttgctatcactagagacatgtggacttctgacaactaaaaaagaggttacatggctgtcacagcccatttcatcgatgattcttggaacttgaggaacattataatgaggttcatatatgtgcctgcaccacatacagctgagattatctgtgaggttctatatgatgctttggttgaatggaatattgatgagaagacctccaccttgacactagacaattgcacaactaatactgcggtaatctctgaccttaccaagaagattggtccatctaaacttgttttagaggggtcgttgatgcatatgcgttgtgctgcacacattctaaatttgatagtgaaggatggtttagatgtgatacaacctgcaattaaaaagattcgtgatagtgtagcattctggacagccacacctaaaagagtagagaaatttgaagagatggctaagtttgtcaaagtctctttggtacacaagctaggattgcaaaactaggtggaactctacatacaagatgctctctattgctattccatatgagcctatttttaactgtgccactcgtgttgaaaaactttatgactgtgcaccaaataaggaagagtgggattttgcgagacaagtggttgatagactcaagatgtttaatgagattaccaaggtcttctctggaacagattatgtgactgcaaatattcaactccttaaaatttgtgaggctaattaaggtgaaaattacacagtggtctgaatgtggaaatcctatcatagaagagatgtcaaaaaatatgatagaaaaaattgaaaaatattggaaggatattcaaggaccaatgggaatagcaactattttagatcctaggtttaaggttgattatctccttgggttctttgagactttgataggtcaaaatagtgatcagtgtgtgctaaaatttgatgaagtaaaagagtctttatgtgatttgatgaagtactatgaaatggatgagggtgaagatacaacagagtcatcaactcctctacttgacactagtttgttatcaacaattagtgcacatgctgctagtcgaaggccagcgatgacaagagttaaaattgagctagatagatacttggaggatgatttggttcaaatttcaactgagaacttccagatcctagactggtggaaggtggctggaacccgttatcctacacttagaaagatagcacgtgacatattggctattccgatcagcactgttgcatcagagtcagcttttaacactagttggtggattcttagtgaacatcgcagcaggcttactcctgaaattttagaggctttaatgtgttcacaggactggataagaaacaattacaaagatggtgctgaggttaatcaaccaagtttttgggactgcttgcaagagattcaagaaggtgtcgagattgtgatgatgaagcccgaaaggacttggacgtcaagctatcagtttgggcgacatgaatcctattacttgatgctcgcttgctactcttgcttttgtattgttgcttaaatgataaaacatgtactgagagatatttctgtttactgtttgattatatttgtgatgtatggacatgtggctactagaagacaatatttgttttgagtatgttgatgaaactacaaaatatgcatgctagaatgaatgttgaattgtctctaatgtccataatctatatgctgaaattctgaatttttgaataatcgggtcaggtatggatacccatgggtatttagtacccggtcgggtatgcgtatgggaggtttttcgtacccgaggtcgggttcgggttcggggatgggggcgggtctatgttcatgggtacgggtctagggagttaatccccactggggaattccccattgacatctctagtccggtgcccccagaacaggaaacaagctaatcagggatctcatagccattgcactgttcactgtctggtgcacccacagacagaaggcaaccagggccttccaaatggagctccaatggcttctaggttctttagggctataaaagggacccctaggcgcatggagctccacaccaagctttcattgaacatgctacaacaccgagcatcgaattcacgcctttgctttagtagatagagatttgggcacgtgttttgagctgtaacaccgttgtgctgtctttgtgctcttctctcttgacttgtgtgcgtgagttgctgcaaatttgtcttgtgtatttgattctacttccctccttactcttgtggtttacttgagatcaattgtgtaagggtgagagactccaacttatggagattcctcacaaagggaaaacttgagatacggaagaaaactgtggtactcaagtttgatcgttcgatcacttgagaggggttgagtgcaacccttgactgaaggaggtaaccacaacgtggagtaggcattggctgaaccacgggataaaatcaccatgtcacttgtgcatctttttattgtgatcgttttcttccatagagttctcatatattcacttgcactattgttcctaagtttaatacatatcttaaaggaacaatcaagtgaagagttctcttcttctctctacctctattcatatcaatttggttttgactctactaacatttattataaaccaagtttgtcttgtttagagttaatttttgtaggatcacctattcacccccatctaggttctctcacttccactgcataacgatatcaaggttctttgtctatatttccttggtttctcactgcttcttgctttcattttctatttttcgtgaggcactaaagtgattatattagaagcaggttaaaaagctgagcgcttggcagtctataacatcttctggtggccacaagctggaaaaagcataaacaaatagggccattgttcactcccatacaccgccgcaacgcatctgagtcattctagtgagatctaaggacgtctttgagctgttctagtcattatgtgagaagttcttatgatcttctttcttgccttgtgtggctgcgttttgcacttgtgtgtactctcctctcacttttgctgtcactttgaagttgtaactcattcttttttgtacggttgcaagagactccaacatgtgtagattctttgtgagggtattgattatgatataaggaagattgtgg

SEQ ID NO: 16991 - DNA, 4329 bp, Zea Mays
cgattacccatggagagaaatatctagaaccggaacaatctagcatctaggattttcagtccaccatccagcaatccagcgagcatttacttgtgtcctagtgggttgccgaccaactatgggcccgtaggaaagaagcagcaatgcaacaattcaacaaagtaaaaaaacctaaactatgcgcgtgctccccagccgcttgccctcgaatctcaatcgctcaagcagtgcttcagtcgccggtcgccgctcgctggactgtcgctcgcccgaaccgccgctcgcccagaccgtcgcttgcctagagcctcggacgcagagcccagaccccggagtcccaggaccgtcgctcgcccacacgcagagcccatcagccgccgcttgctggacgcttggacagtcgcagagacggcagagcccgtcagtcgccgctcgcccggacgcttggagtcccggactgctcgctggacgcccggatggcatcttcatcgatgccgacgccgatgaacactgctgacgagcaaggaagttctattgcgggggctgagagtgggaatgaaactgagagcagcatgcaaccccaatctgtgaatgattcagagccaatacagattgatgatgatgttgatgaaattgaagaagtgattgcagaaccaaagaggaagcttacatctgttgtttggaatgaattcaagagggtgaagttaagttctagtgaaatcaaggcacaatgttcttattgtcataagaagcttaatgggaaaagtactcatggaacaaagcatcttcatgatcatttgaagatttgtgttttgcgcaagataaagctcactagccagaacaagattatgtcacaatcatctttgaggtttagttcacaagaaggggggaaagtatccgtggagagctacacttttgatcctgaagttgctagaaaggagcttgctgctatgatagcattgcatgaatatcctttatgcatcgttgagcatattggctttcgtcgatttgtgagtgcatgtcagccattattcaagatggttagcgagaatactattagaaaggacattatggatgcatatacagaagaaaagaaaagagtgttgcagtacatgtgtgcatgtaagtcacgagttgctatcactagagacatgtggacttctgacaactaaaaaagaggttacatggctgtcacagcccatttcatcgatgattcttggaacttgaggaacattataatgaggttcatatatgtgcctgcaccacatacagctgagattatctgtgaggttctatatgatgctttggttgaatggaatattgatgagaagacctccaccttgacactagacaattgcacaactaatactgcggtaatctctgaccttaccaagaagattggtccatctaaacttgttttagaggggtcgttgatgcatatgcgttgtgctgcacacattctaaatttgatagtgaaggatggtttagatgtgatacaacctgcaattaaaaagattcgtgatagtgtagcattctggacagccacacctaaaagagtagagaaatttgaagagatggctaagtttgtcaaagtctctttggtacacaagctaggattgcaaaactaggtggaactctacatacaagatgctctctattgctattccatatgagcctatttttaactgtgccactcgtgttgaaaaactttatgactgtgcaccaaataaggaagagtgggattttgcgagacaagtggttgatagactcaagatgtttaatgagattaccaaggtcttctctggaacagattatgtgactgcaaatattcaactccttaaaatttgtgaggctaattaaggtgaaaattacacagtggtctgaatgtggaaatcctatcatagaagagatgtcaaaaaatatgatagaaaaaattgaaaaatattggaaggatattcaaggaccaatgggaatagcaactattttagatcctaggtttaaggttgattatctccttgggttctttgagactttgataggtcaaaatagtgatcagtgtgtgctaaaatttgatgaagtaaaagagtctttatgtgatttgatgaagtactatgaaatggatgagggtgaagatacaacagagtcatcaactcctctacttgacactagtttgttatcaacaattagtgcacatgctgctagtcgaaggccagcgatgacaagagttaaaattgagctagatagatacttggaggatgatttggttcaaatttcaactgagaacttccagatcctagactggtggaaggtggctggaacccgttatcctacacttagaaagatagcacgtgacatattggctattccgatcagcactgttgcatcagagtcagcttttaacactagttggtggattcttagtgaacatcgcagcaggcttactcctgaaattttagaggctttaatgtgttcacaggactggataagaaacaattacaaagatggtgctgaggttaatcaaccaagtttttgggactgcttgcaagagattcaagaaggtgtcgagattgtgatgatgaagcccgaaaggacttggacgtcaagctatcagtttgggcgacatgaatcctattacttgatgctcgcttgctactcttgcttttgtattgttgcttaaatgataaaacatgtactgagagatatttctgtttactgtttgattatatttgtgatgtatggacatgtggctactagaagacaatatttgttttgagtatgttgatgaaactacaaaatatgcatgctagaatgaatgttgaattgtctctaatgtccataatctatatgctgaaattctgaatttttgaataatcgggtcaggtatggatacccatgggtatttagtacccggtcgggtatgcgtatgggaggtttttcgtacccgaggtcgggttcgggttcggggatgggggcgggtctatgttcatgggtacgggtctagggagttaatccccactggggaattccccattgacatctctagtccggtgcccccagaacaggaaacaagctaatcagggatctcatagccattgcactgttcactgtctggtgcacccacagacagaaggcaaccagggccttccaaatggagctccaatggcttctaggttctttagggctataaaagggacccctaggcgcatggagctccacaccaagctttcattgaacatgctacaacaccgagcatcgaattcacgcctttgctttagtagatagagatttgggcacgtgttttgagctgtaacaccgttgtgctgtctttgtgctcttctctcttgacttgtgtgcgtgagttgctgcaaatttgtcttgtgtatttgattctacttccctccttactcttgtggtttacttgagatcaattgtgtaagggtgagagactccaacttatggagattcctcacaaagggaaaacttgagatacggaagaaaactgtggtactcaagtttgatcgttcgatcacttgagaggggttgagtgcaacccttgactgaaggaggtaaccacaacgtggagtaggcattggctgaaccacgggataaaatcaccatgtcacttgtgcatctttttattgtgatcgttttcttccatagagttctcatatattcacttgcactattgttcctaagtttaatacatatcttaaaggaacaatcaagtgaagagttctcttcttctctctacctctattcatatcaatttggttttgactctactaacatttattataaaccaagtttgtcttgtttagagttaatttttgtaggatcacctattcacccccatctaggttctctcacttccactgcataacgatatcaaggttctttgtctatatttccttggtttctcactgcttcttgctttcattttctatttttcgtgaggcactaaagtgattatattagaagcaggttaaaaagctgagcgcttggcagtctataacatcttctggtggccacaagctggaaaaagcataaacaaatagggccattgttcactcccatacaccgccgcaacgcatctgagtcattctagtgagatctaaggacgtctttgagctgttctagtcattatgtgagaagttcttatgatcttctttcttgccttgtgtggctgcgttttgcacttgtgtgtactctcctctcacttttgctgtcactttgaagttgtaactcattcttttttgtacggttgcaagagactccaacatgtgtagattctttgtgagggtattgattatgatataaggaagattgtgg

SEQ ID NO: 16992 - DNA, 1721 bp, Zea Mays
gacgagcaaggaagttctattgcgggggctgagagtgggaatgaaactgagagcagcatgcaaccccaatctgtgaatgattcagagccaatacagattgatgatgatgttgatgaaattgaagaagtgattgcagaaccaaagaggaagcttacatctgttgtttggaatgaattcaagagggtgaagttaagttctagtgaaatcaaggcacaatgttcttattgtcataagaagcttaatgggaaaagtactcatggaacaaagcatcttcatgatcatttgaagatttgtgttttgcgcaagataaagctcactagccagaacaagattatgtcacaatcatctttgaggtttagttcacaagaaggggggaaagtatccgtggagagctacacttttgatcctgaagttgctagaaaggagcttgctgctatgatagcattgcatgaatatcctttatgcatcgttgagcatattggctttcgtcgatttgtgagtgcatgtcagccattattcaagatggttagcgagaatactattagaaaggacattatggatgcatatacagaagaaaagaaaagagtgttgcagtacatgtgtgcatgtaagtcacgagttgctatcactagagacatgtggacttctgacaactaaaaaagaggttacatggctgtcacagcccatttcatcgatgattcttggaacttgaggaacattataatgaggttcatatatgtgcctgcaccacatacagctgagattatctgtgaggttctatatgatgctttggttgaatggaatattgatgagaagacctccaccttgacactagacaattgcacaactaatactgcggtaatctctgaccttaccaagaagattggtccatctaaacttgttttagaggggtcgttgatgcatatgcgttgtgctgcacacattctaaatttgatagtgaaggatggtttagatgtgatacaacctgcaattaaaaagattcgtgatagtgtagcattctggacagccacacctaaaagagtagagaaatttgaagagatggctaagtttgtcaaagtctctttggtacacaagctaggattgcaaaactaggtggaactctacatacaagatgctctctattgctattccatatgagcctatttttaactgtgccactcgtgttgaaaaactttatgactgtgcaccaaataaggaagagtgggattttgcgagacaagtggttgatagactcaagatgtttaatgagattaccaaggtcttctctggaacagattatgtgactgcaaatattcaactccttaaaatttgtgaggctaattaaggtgaaaattacacagtggtctgaatgtggaaatcctatcatagaagagatgtcaaaaaatatgatagaaaaaattgaaaaatattggaaggatattcaaggaccaatgggaatagcaactattttagatcctaggtttaaggttgattatctccttgggttctttgagactttgataggtcaaaatagtgatcagtgtgtgctaaaatttgatgaagtaaaagagtctttatgtgatttgatgaagtactatgaaatggatgagggtgaagatacaacagagtcatcaactcctctacttgacactagtttgttatcaacaattagtgcacatgctgctagtcgaaggccagcgatgacaagagttaaaattgag

SEQ ID NO: 16993 - DNA, 1644 bp, Zea Mays
cttgctccgcggtctggaaaggtattttctcgccttctcggcgcgctacgcctacgactgagctgaaagaagcggtagatcggcgttagcggcgagctagggttccggcgagtgcacccaatggcatcggaggcggcgcggcggcggcaggagatggcagaggaggggcaacggcacctggaggagactatcgcagcctcgttccagatcctcgtatcgatgaacgacgagctctgcaacgccggcctttggtcctcctcatccgtctcggccaccgctgcggctggctaccagcaccatcactctgctactcttccgaccccacactctgtagattccgacgccgccgacgcagggggcgcgcccagccccggcgggtcgctcgacgaggcgaggcaccgctacaagtcagccgtggcggcgctgcgggcatctatctctgccgtgtcgtcctgcgctcaggacattggatcaacagaatctgaagctgaccatgcagagattgagagattggaagagcatgcttctgctttgagaaaggtgctaccctgtaatttctctagttagtttaatctagtctactatattatattactctcaaagtttggacagctgtgtgaattatatttgcccatttgcaatccaagccgtgtcttcctgttatcttcaggcggcaagttcttttatgttctattcataagtagttaagtacagagtgaggaaatactgtttttctatccttttccagcattttttcaatctttttttgtgatttgaagagtatagttctatgtgtcgctatcaatttagttttggatttcatctatggtagcatatgctgtatttagaaatcgaaagaaacatgatttttgtcaacttctgatatacacttcttttatcaagctaatttaacacacatttgacagataaattcatatctttctaacattgagatctaatgcaggaaattgaaagcaaaaacaagcaagtaaaactcctcattgatcagctccgtgacctaatagctgacatagcaatgtggcagagcccttgctcagtgtgaagtgtcgaagttagagaccgtagcctggacgtctggtataggcatactgtgcatgttggttaactgaccacttggaagggagcaatagatggaatatgactgggctgcacgggaaaagaaaatgaagctgtccaatgcagatagggatgtaatatgttggacatgaatgttattttggacacgactgtagatacacgtatctttttgaaacgtgtggattttcgctgtgacgaaagtcctgtaatgttttcttgtgtttccttgagaaaaacaatctagaatgatatttggattctcacatgcaatgcacattatttctgttaactgaaaaaggaagaaagattgcaatgtgcgcgtttaacagtctgaagttgcgttttgccagtcatataatgacttcatacaatgattatattagattcttgaatgatgaaaggaatacttcgattgatctgtcgtctatgtacaagccttgggaaacaatatcttacaagtacgtgataaaaaaaggtcatattaggagccaccgtatgacatgaatggtctgtattagttttaacagcattattgaagtattcctt

SEQ ID NO: 16994 - DNA, 1149 bp, Zea Mays
cgatcgatacccgttcggcgttcgcatcagcttgttgctgctgctgaaggaaaagacaattttctccttacctcctgggctcaggcctcaggcgcacagccttctgcttctcttcctctcctcgcgtccccccaccaaaccctaacccgagcacccagcccctcctcgcgtctgctcgcgccggcctttggggctctcactctgagcggcagggacccgcagggctccggttgtgtccaggaaacatcccagttgttggcgagagaccaagaaatggcggagaaggagggagcgaaggttggagcggaagagatggaagagcgggagcaggaaggggaggcagaggaggtggaggtgaagtttcgtctcttcgatggctctgacatcggtcccgtgcgctgcaacgccgccgccactaccgtagccgccctcaaggatcgcgtcgtcgccgattggcccaaagataaatcaattatcccaaagactgctagtgatgtgaaactaataagtggaggcaaaattctagaaaatgacaagaatgttgcacagtgcagagctccttttggtgatcttcccagtagtgctatcacgatgcatgttgttgttcaaccatcgtcagcaaaatcaaaaccagaaggcgaacaagttgcccaaaaccactcgttgctcatgtaccatactatgaactacgaaggtccaagtccctccgagaccaacaataatttgtacgtccaccgaagattctgcagaggatttgagaacgaaagatccaagatgtccacgtcattcttctctgccaacgggtggcaatggcgaaagacaacaacgtccatatgttgtaagctatgtaattgtaacttaggtacaaagagtgggtccctctgccgtacggatgggggaaaaatagtctactggctgccctgttttaccctacacaagattgttctatatgatgtaccacaagatacatacacgctactattttgggtgtagtgaccttgttcccacttcaccttttgaaagttcgttccagagttgagtacccttttgggcactgagtcaatgtgaaatctaagttggttgatttccgaaacacagtcttctctcattttttactgagtcaatatatgaaatgtaagtcggttgatt

SEQ ID NO: 16995 - DNA, 781 bp, Zea Mays
cgatcgatacccgttcggcgttcgcatcagcttgttgctgctgctgaaggaaaagacaattttctccttacctcctgggctcaggcctcaggcgcacagccttctgcttctcttcctctcctcgcgtccccccaccaaaccctaacccgagcacccagcccctcctcgcgtctgctcgcgccggcctttggggctctcactctgagcggcagggacccgcagggctccggttgtgtccaggaaacatcccagttgttggcgagagaccaagaaatggcggagaaggagggagcgaaggttggagcggaagagatggaagagcgggagcaggaaggggaggcagaggaggtggaggtgaagtttcgtctcttcgatggctctgacatcggtcccgtgcgctgcaacgccgccgccactaccgtagccgccctcaaggatcgcgtcgtcgccgattggcccaaagagctccttttggtgatcttcccagtagtgctatcacgatgcatgttgttgttcaaccatcgtcagcaaaatcaaaaccaggtgagttgcaagtttttgcactttgaggaaatttgttcttatggttttctgacttataccattcaacttattagacttgatataaactttttttatcagtatcatattatctgaaaattccagttctgctgataaaagcttcagtattttattgttatcactattgctttagttttcttaggctttattttctttccttatctaaggttcatgctttaccatgctgccatcatttttt

SEQ ID NO: 16996 - DNA, 3003 bp, Zea Mays
acgtgaaggaatggcgttgccgtcggccaccgtgctgtggacggccagcatcaccttccggcttgcacagaacatggtggtgttgttcttcctggcggcgctactggcggccccggcgcgttcgtcgtcgccgtcgtccaacaacggcgccggtcttcagcagcccaccctgaccctctgctccggtcactccactgtcgccaagagcggcgagttcgccagcttcctcgcagccgtgtgcgccggagcctacggcggcggcgtcgcccacatgtcccacagcatgtcctcgtacgtcgccgccgagaaccggaccatgtacggggtcgcgcagtgccgccccgacgtgtcggcctccgactgtactgcctgcctcgctgcagcctcgtccaagctcatcaccgggaccgcgtgcgcgacgtcggcggtctggcacgacgcctgcttcctccggtactcggaccgcgacaccggccggttccgcgaggacgaacacacggagaccgtgttcaacgcgagccgcgcgctgtcgtcgttgccgccccacgttggcgccaacaaagcggtggtggtgaggcgcctacttgccgccgtcgcggacagcacgaggagcggccacatgtgcagcgacatcggtgtcggcactggtgcggcaggcggcggccggatctacggactcacgcggtgcgccgccgagatctcgtgcgcagactgccgccgctgcctcggcggcgctctcgcggtggtagagcgcgagtacaacggcagcgcggggatgcaggtcctgcggctcagctgcatggccaggtacgagagctaccccttctacaacaccaagttcttgacccggcgattgctggcgtcggcgacgagcgggagcccccggccgactcatggaggaatcgtctttaactcttctatatcttttgggccttttgggctcgtgcactctggcggtcctaacccaccgccttcaccgccagtatcacctccaccaccagcattcacgaccatctccgtgcctgctagtgtgggcactgcacaacccaccccaccgccttcacggcctgcacaagcacagccatcaccacctccaccagcagcatccatgatcgtctccgggcctgcgactgcgactccgagggctgcacaagcacaacccaccccagcgcccccaggcggtcataacccaccgcctgcatcacctccaccagcatccatcatgaacatctccgggcctgcgactgcgactccgactccgagggctgcacaacccaccccagcgcctcctggcggtcctaccccacagcctgtagctgccgcaacgaatgaaaacaaagggaagggaacattgaatacaccaaaatggcagatcgtctctattgcaactgggttggtggctgctttcatcatcctcgcactcaccgtatggtgccgtcggaaacagcaactgtctcagagagaacatgtcatagatggagtgccaggtgagactatgcatcacctagaaaagaaacatttgggctccgaagaagacgacgacggaggaagaacaagctgccaactctacagctacctggttcttgaggctgctacatgtcgcttctcaagtagaaacaagctagggagcggtggatttggaacggtatacaagggcacgcttgagaatgggaaggacgtagcagtgaaaaggctcagggactccaagagggcgatacaagaactagagagggagatctccatcgtggctagcttgcgccataagaacatcgtgaggtttttagggtactgcttccaagaggaagggaggttcttcatctacgagtatgtgcttaacaacagccttgataaattttggtacaaaggtaagttcattactcccactattaattatgtttaagcgggtgctcgttttaatctcaatccatatggattgaaggggattcgattagtttaaatctctagcaagtcaacatctatcctaatttctctcaattccctccaatccatatgagaggggaataagcaaacaaggtctaacagggtagagattaccaaggagaaaacaaacacccaaaaagttggcttgcaattgcagcatcttctcaatgccagaagctagagtgggctacatggttcaacatcatcttaggggttgctcgcggccttctgtttctccatgacatggggatcattcatcgggacctcaagccacacaatatacttcttgaccgtaacttcaacccaaagatcgctgatttcgatctcatgaggatgtatgatcaacagaaaactcacgagagcactgagaaggtcgctggaacatttgggtacatggctccagagtgcacgtccggacgaaaattcctactttcgatcaagtctgacgtgtacagctacggggtgttagtgctggagatcatcaccggccacaagatctacactttcgaaggccaaaactctgaaggcctcgtcgaatacgtgtggcagcactggtccactggatagagaagagagcgagcgacgtcatggatgctgacttaggtgtggaagggcatgagcacgcgccacggcaagcgctgcggtgcgtgcacgtcgcgcttctctgcgtgcagtctgaccggtcgaggcggccaaccatggggcaggtcatcgccatgcttagcagtggcgacgacgggacagatgacctgccggagccatctctgcccgggtacgtcctccgtccaatggcggcgtcaggtgtccagctatgctttgggtgcaggtagcgccgcttgatgacgtacgacggtccatggccagtacaaacataggtaataatctctggtctctccatcaacaaaatggatgtaatcctagcaaggcttaaatttgatcaactataaactttagcggacccagtgtttgatcatagcctgagcaaatttcattgagctaatcaaatcgtgtattttggaacacgggctacaattgaaacacaaggacgcaacaacataatta

SEQ ID NO: 16997 - DNA, 2797 bp, Zea Mays
acgtgaaggaatggcgttgccgtcggccaccgtgctgtggacggccagcatcaccttccggcttgcacagaacatggtggtgttgttcttcctggcggcgctactggcggccccggcgcgttcgtcgtcgccgtcgtccaacaacggcgccggtcttcagcagcccaccctgaccctctgctccggtcactccactgtcgccaagagcggcgagttcgccagcttcctcgcagccgtgtgcgccggagcctacggcggcggcgtcgcccacatgtcccacagcatgtcctcgtacgtcgccgccgagaaccggaccatgtacggggtcgcgcagtgccgccccgacgtgtcggcctccgactgtactgcctgcctcgctgcagcctcgtccaagctcatcaccgggaccgcgtgcgcgacgtcggcggtctggcacgacgcctgcttcctccggtactcggaccgcgacaccggccggttccgcgaggacgaacacacggagaccgtgttcaacgcgagccgcgcgctgtcgtcgttgccgccccacgttggcgccaacaaagcggtggtggtgaggcgcctacttgccgccgtcgcggacagcacgaggagcggccacatgtgcagcgacatcggtgtcggcactggtgcggcaggcggcggccggatctacggactcacgcggtgcgccgccgagatctcgtgcgcagactgccgccgctgcctcggcggcgctctcgcggtggtagagcgcgagtacaacggcagcgcggggatgcaggtcctgcggctcagctgcatggccaggtacgagagctaccccttctacaacaccaagttcttgacccggcgattgctggcgtcggcgacgagcgggagcccccggccgactcatggaggaatcgtctttaactcttctatatcttttgggccttttgggctcgtgcactctggcggtcctaacccaccgccttcaccgccagtatcacctccaccaccagcattcacgaccatctccgtgcctgctagtgtgggcactgcacaacccaccccaccgccttcacggcctgcacaagcacagccatcaccacctccaccagcagcatccatgatcgtctccgggcctgcgactgcgactccgagggctgcacaagcacaacccaccccagcgcccccaggcggtcataacccaccgcctgcatcacctccaccagcatccatcatgaacatctccgggcctgcgactgcgactccgactccgagggctgcacaacccaccccagcgcctcctggcggtcctaccccacagcctgtagctgccgcaacgaatgaaaacaaagggaagggaacattgaatacaccaaaatggcagatcgtctctattgcaactgggttggtggctgctttcatcatcctcgcactcaccgtatggtgccgtcggaaacagcaactgtctcagagagaacatgtcatagaaccccatgttttgaatcatcaagcagatggagtgccaggtgagactatgcatcacctagaaaagaaacatttgggctccgaagaagacgacgacggaggaagaacaagctgccaactctacagctacctggttcttgaggctgctacatgtcgcttctcaagtagaaacaagctagggagcggtggatttggaacggtatacaagggcacgcttgagaatgggaaggacgtagcagtgaaaaggctcagggactccaagagggcgatacaagaactagagagggagatctccatcgtggctagcttgcgccataagaacatcgtgaggtttttagggtactgcttccaagaggaagggaggttcttcatctacgagtatgtgcttaacaacagccttgataaattttggtacaaagcatcttctcaatgccagaagctagagtgggctacatggttcaacatcatcttaggggttgctcgcggccttctgtttctccatgacatggggatcattcatcgggacctcaagccacacaatatacttcttgaccgtaacttcaacccaaagatcgctgatttcgatctcatgaggatgtatgatcaacagaaaactcacgagagcactgagaaggtcgctggaacatttgggtacatggctccagagtgcacgtccggacgaaaattcctactttcgatcaagtctgacgtgtacagctacggggtgttagtgctggagatcatcaccggccacaagatctacactttcgaaggccaaaactctgaaggcctcgtcgaatacgtgtggcagcactggtccactggatagagaagagagcgagcgacgtcatggatgctgacttaggtgtggaagggcatgagcacgcgccacggcaagcgctgcggtgcgtgcacgtcgcgcttctctgcgtgcagtctgaccggtcgaggcggccaaccatggggcaggtcatcgccatgcttagcagtggcgacgacgggacagatgacctgccggagccatctctgcccgggtacgtcctccgtccaatggcggcgtcaggtgtccagctatgctttgggtgcaggtagcgccgcttgatgacgtacgacggtccatggccagtacaaacataggtaataatctctggtctctccatcaacaaaatggatgtaatcctagcaaggcttaaatttgatcaactataaactttagcggacccagtgtttgatcatagcctgagcaaatttcattgagctaatcaaatcgtgtattttggaacacgggctacaattgaaacacaaggacgcaacaacataatta

SEQ ID NO: 16998 - DNA, 3030 bp, Zea Mays
acgtgaaggaatggcgttgccgtcggccaccgtgctgtggacggccagcatcaccttccggcttgcacagaacatggtggtgttgttcttcctggcggcgctactggcggccccggcgcgttcgtcgtcgccgtcgtccaacaacggcgccggtcttcagcagcccaccctgaccctctgctccggtcactccactgtcgccaagagcggcgagttcgccagcttcctcgcagccgtgtgcgccggagcctacggcggcggcgtcgcccacatgtcccacagcatgtcctcgtacgtcgccgccgagaaccggaccatgtacggggtcgcgcagtgccgccccgacgtgtcggcctccgactgtactgcctgcctcgctgcagcctcgtccaagctcatcaccgggaccgcgtgcgcgacgtcggcggtctggcacgacgcctgcttcctccggtactcggaccgcgacaccggccggttccgcgaggacgaacacacggagaccgtgttcaacgcgagccgcgcgctgtcgtcgttgccgccccacgttggcgccaacaaagcggtggtggtgaggcgcctacttgccgccgtcgcggacagcacgaggagcggccacatgtgcagcgacatcggtgtcggcactggtgcggcaggcggcggccggatctacggactcacgcggtgcgccgccgagatctcgtgcgcagactgccgccgctgcctcggcggcgctctcgcggtggtagagcgcgagtacaacggcagcgcggggatgcaggtcctgcggctcagctgcatggccaggtacgagagctaccccttctacaacaccaagttcttgacccggcgattgctggcgtcggcgacgagcgggagcccccggccgactcatggaggaatcgtctttaactcttctatatcttttgggccttttgggctcgtgcactctggcggtcctaacccaccgccttcaccgccagtatcacctccaccaccagcattcacgaccatctccgtgcctgctagtgtgggcactgcacaacccaccccaccgccttcacggcctgcacaagcacagccatcaccacctccaccagcagcatccatgatcgtctccgggcctgcgactgcgactccgagggctgcacaagcacaacccaccccagcgcccccaggcggtcataacccaccgcctgcatcacctccaccagcatccatcatgaacatctccgggcctgcgactgcgactccgactccgagggctgcacaacccaccccagcgcctcctggcggtcctaccccacagcctgtagctgccgcaacgaatgaaaacaaagggaagggaacattgaatacaccaaaatggcagatcgtctctattgcaactgggttggtggctgctttcatcatcctcgcactcaccgtatggtgccgtcggaaacagcaactgtctcagagagaacatgtcatagaaccccatgttttgaatcatcaagcagatggagtgccaggtgagactatgcatcacctagaaaagaaacatttgggctccgaagaagacgacgacggaggaagaacaagctgccaactctacagctacctggttcttgaggctgctacatgtcgcttctcaagtagaaacaagctagggagcggtggatttggaacggtatacaagggcacgcttgagaatgggaaggacgtagcagtgaaaaggctcagggactccaagagggcgatacaagaactagagagggagatctccatcgtggctagcttgcgccataagaacatcgtgaggtttttagggtactgcttccaagaggaagggaggttcttcatctacgagtatgtgcttaacaacagccttgataaattttggtacaaaggtaagttcattactcccactattaattatgtttaagcgggtgctcgttttaatctcaatccatatggattgaaggggattcgattagtttaaatctctagcaagtcaacatctatcctaatttctctcaattccctccaatccatatgagaggggaataagcaaacaaggtctaacagggtagagattaccaaggagaaaacaaacacccaaaaagttggcttgcaattgcagcatcttctcaatgccagaagctagagtgggctacatggttcaacatcatcttaggggttgctcgcggccttctgtttctccatgacatggggatcattcatcgggacctcaagccacacaatatacttcttgaccgtaacttcaacccaaagatcgctgatttcgatctcatgaggatgtatgatcaacagaaaactcacgagagcactgagaaggtcgctggaacatttgggtacatggctccagagtgcacgtccggacgaaaattcctactttcgatcaagtctgacgtgtacagctacggggtgttagtgctggagatcatcaccggccacaagatctacactttcgaaggccaaaactctgaaggcctcgtcgaatacgtgtggcagcactggtccactggatagagaagagagcgagcgacgtcatggatgctgacttaggtgtggaagggcatgagcacgcgccacggcaagcgctgcggtgcgtgcacgtcgcgcttctctgcgtgcagtctgaccggtcgaggcggccaaccatggggcaggtcatcgccatgcttagcagtggcgacgacgggacagatgacctgccggagccatctctgcccgggtacgtcctccgtccaatggcggcgtcaggtgtccagctatgctttgggtgcaggtagcgccgcttgatgacgtacgacggtccatggccagtacaaacataggtaataatctctggtctctccatcaacaaaatggatgtaatcctagcaaggcttaaatttgatcaactataaactttagcggacccagtgtttgatcatagcctgagcaaatttcattgagctaatcaaatcgtgtattttggaacacgggctacaattgaaacacaaggacgcaacaacataatta

SEQ ID NO: 16999 - DNA, 3042 bp, Zea Mays
aaagattctcgctacagagacgaccatgtgaaagaatttaaatctagagtacaacgtgaaggaatggcgttgccgtcggccaccgtgctgtggacggccagcatcaccttccggcttgcacagaacatggtggtgttgttcttcctggcggcgctactggcggccccggcgcgttcgtcgtcgccgtcgtccaacaacggcgccggtcttcagcagcccaccctgaccctctgctccggtcactccactgtcgccaagagcggcgagttcgccagcttcctcgcagccgtgtgcgccggagcctacggcggcggcgtcgcccacatgtcccacagcatgtcctcgtacgtcgccgccgagaaccggaccatgtacggggtcgcgcagtgccgccccgacgtgtcggcctccgactgtactgcctgcctcgctgcagcctcgtccaagctcatcaccgggaccgcgtgcgcgacgtcggcggtctggcacgacgcctgcttcctccggtactcggaccgcgacaccggccggttccgcgaggacgaacacacggagaccgtgttcaacgcgagccgcgcgctgtcgtcgttgccgccccacgttggcgccaacaaagcggtggtggtgaggcgcctacttgccgccgtcgcggacagcacgaggagcggccacatgtgcagcgacatcggtgtcggcactggtgcggcaggcggcggccggatctacggactcacgcggtgcgccgccgagatctcgtgcgcagactgccgccgctgcctcggcggcgctctcgcggtggtagagcgcgagtacaacggcagcgcggggatgcaggtcctgcggctcagctgcatggccaggtacgagagctaccccttctacaacaccaagttcttgacccggcgattgctggcgtcggcgacgagcgggagcccccggccgactcatggaggaatcgtctttaactcttctatatcttttgggccttttgggctcgtgcactctggcggtcctaacccaccgccttcaccgccagtatcacctccaccaccagcattcacgaccatctccgtgcctgctagtgtgggcactgcacaacccaccccaccgccttcacggcctgcacaagcacagccatcaccacctccaccagcagcatccatgatcgtctccgggcctgcgactgcgactccgagggctgcacaagcacaacccaccccagcgcccccaggcggtcataacccaccgcctgcatcacctccaccagcatccatcatgaacatctccgggcctgcgactgcgactccgactccgagggctgcacaacccaccccagcgcctcctggcggtcctaccccacagcctgtagctgccgcaacgaatgatcgtctctattgcaactgggttggtggctgctttcatcatcctcgcactcaccgtatggtgccgtcggaaacagcaactgtctcagagagaacatgtcatagaaccccatgttttgaatcatcaagcagatggagtgccaggtgagactatgcatcacctagaaaagaaacatttgggctccgaagaagacgacgacggaggaagaacaagctgccaactctacagctacctggttcttgaggctgctacatgtcgcttctcaagtagaaacaagctagggagcggtggatttggaacggtatacaagggcacgcttgagaatgggaaggacgtagcagtgaaaaggctcagggactccaagagggcgatacaagaactagagagggagatctccatcgtggctagcttgcgccataagaacatcgtgaggtttttagggtactgcttccaagaggaagggaggttcttcatctacgagtatgtgcttaacaacagccttgataaattttggtacaaaggtaagttcattactcccactattaattatgtttaagcgggtgctcgttttaatctcaatccatatggattgaaggggattcgattagtttaaatctctagcaagtcaacatctatcctaatttctctcaattccctccaatccatatgagaggggaataagcaaacaaggtctaacagggtagagattaccaaggagaaaacaaacacccaaaaagttggcttgcaattgcagcatcttctcaatgccagaagctagagtgggctacatggttcaacatcatcttaggggttgctcgcggccttctgtttctccatgacatggggatcattcatcgggacctcaagccacacaatatacttcttgaccgtaacttcaacccaaagatcgctgatttcgatctcatgaggatgtatgatcaacagaaaactcacgagagcactgagaaggtcgctggaacatttgggtacatggctccagagtgcacgtccggacgaaaattcctactttcgatcaagtctgacgtgtacagctacggggtgttagtgctggagatcatcaccggccacaagatctacactttcgaaggccaaaactctgaaggcctcgtcgaatacgtgtggcagcactggtccactggatagagaagagagcgagcgacgtcatggatgctgacttaggtgtggaagggcatgagcacgcgccacggcaagcgctgcggtgcgtgcacgtcgcgcttctctgcgtgcagtctgaccggtcgaggcggccaaccatggggcaggtcatcgccatgcttagcagtggcgacgacgggacagatgacctgccggagccatctctgcccgggtacgtcctccgtccaatggcggcgtcaggtgtccagctatgctttgggtgcaggtagcgccgcttgatgacgtacgacggtccatggccagtacaaacataggtaataatctctggtctctccatcaacaaaatggatgtaatcctagcaaggcttaaatttgatcaactataaactttagcggacccagtgtttgatcatagcctgagcaaatttcattgagctaatcaaatcgtgtattttggaacacgggctacaattgaaacacaaggacgcaacaacataatta

SEQ ID NO: 17000 - DNA, 2287 bp, Zea Mays
acgtgaaggaatggcgttgccgtcggccaccgtgctgtggacggccagcatcaccttccggcttgcacagaacatggtggtgttgttcttcctggcggcgctactggcggccccggcgcgttcgtcgtcgccgtcgtccaacaacggcgccggtcttcagcagcccaccctgaccctctgctccggtcactccactgtcgccaagagcggcgagttcgccagcttcctcgcagccgtgtgcgccggagcctacggcggcggcgtcgcccacatgtcccacagcatgtcctcgtacgtcgccgccgagaaccggaccatgtacggggtcgcgcagtgccgccccgacgtgtcggcctccgactgtactgcctgcctcgctgcagcctcgtccaagctcatcaccgggaccgcgtgcgcgacgtcggcggtctggcacgacgcctgcttcctccggtactcggaccgcgacaccggccggttccgcgaggacgaacacacggagaccgtgttcaacgcgagccgcgcgctgtcgtcgttgccgccccacgttggcgccaacaaagcggtggtggtgaggcgcctacttgccgccgtcgcggacagcacgaggagcggccacatgtgcagcgacatcggtgtcggcactggtgcggcaggcggcggccggatctacggactcacgcggtgcgccgccgagatctcgtgcgcagactgccgccgctgcctcggcggcgctctcgcggtggtagagcgcgagtacaacggcagcgcggggatgcaggtcctgcggctcagctgcatggccaggtacgagagctaccccttctacaacaccaagttcttgacccggcgattgctggcgtcggcgacgagcgggagcccccggccgactcatggaggaatcgtctttaactcttctatatcttttgggccttttgggctcgtgcactctggcggtcctaacccaccgccttcaccgccagtatcacctccaccaccagcattcacgaccatctccgtgcctgctagtgtgggcactgcacaacccaccccaccgccttcacggcctgcacaagcacagccatcaccacctccaccagcagcatccatgatcgtctccgggcctgcgactgcgactccgagggctgcacaagcacaacccaccccagcgcccccaggcggtcataacccaccgcctgcatcacctccaccagcatccatcatgaacatctccgggcctgcgactgcgactccgactccgagggctgcacaacccaccccagcgcctcctggcggtcctaccccacagcctgtagctgccgcaacgaatgaaaacaaagggaagggaacattgaatacaccaaaatggcagatcgtctctattgcaactgggttggtggctgctttcatcatcctcgcactcaccgtatggtgccgtcggaaacagcaactgtctcagagagaacatgtcatagaaccccatgttttgaatcatcaagcagatggagtgccaggtgagactatgcatcacctagaaaagaaacatttgggctccgaagaagacgacgacggaggaagaacaagctgccaactctacagctacctggttcttgaggctgctacatgtcgcttctcaagtagaaacaagctagggagcggtggatttggaacggtatacaagggcacgcttgagaatgggaaggacgtagcagtgaaaaggctcagggactccaagagggcgatacaagaactagagagggagatctccatcgtggctagcttgcgccataagaacatcgtgaggtttttagggtactgcttccaagaggaagggaggttcttcatctacgagtatgtgcttaacaacagccttgataaattttggtacaaagcatcttctcaatgccagaagctagagtgggctacatggttcaacatcatcttaggggttgctcgcggccttctgtttctccatgacatggggatcattcatcgggacctcaagccacacaatatacttcttgaccgtaacttcaacccaaagatcgctgatttcgatctcatgaggatgtatgatcaacagaaaactcacgagagcactgagaaggtcgctggaacatttgggtacatggctccagagtgcacgtccggacgaaaattcctactttcgatcaagtctgacgtgtacagctacggggtgttagtgctggagatcatcaccggccacaagatctacactttcgaaggccaaaactctgaaggcctcgtcgaatacaccgtgggcatg

SEQ ID NO: 17001 - DNA, 2556 bp, Zea Mays
acgtgaaggaatggcgttgccgtcggccaccgtgctgtggacggccagcatcaccttccggcttgcacagaacatggtggtgttgttcttcctggcggcgctactggcggccccggcgcgttcgtcgtcgccgtcgtccaacaacggcgccggtcttcagcagcccaccctgaccctctgctccggtcactccactgtcgccaagagcggcgagttcgccagcttcctcgcagccgtgtgcgccggagcctacggcggcggcgtcgcccacatgtcccacagcatgtcctcgtacgtcgccgccgagaaccggaccatgtacggggtcgcgcagtgccgccccgacgtgtcggcctccgactgtactgcctgcctcgctgcagcctcgtccaagctcatcaccgggaccgcgtgcgcgacgtcggcggtctggcacgacgcctgcttcctccggtactcggaccgcgacaccggccggttccgcgaggacgaacacacggagaccgtgttcaacgcgagccgcgcgctgtcgtcgttgccgccccacgttggcgccaacaaagcggtggtggtgaggcgcctacttgccgccgtcgcggacagcacgaggagcggccacatgtgcagcgacatcggtgtcggcactggtgcggcaggcggcggccggatctacggactcacgcggtgcgccgccgagatctcgtgcgcagactgccgccgctgcctcggcggcgctctcgcggtggtagagcgcgagtacaacggcagcgcggggatgcaggtcctgcggctcagctgcatggccaggtacgagagctaccccttctacaacaccaagttcttgacccggcgattgctggcgtcggcgacgagcgggagcccccggccgactcatggaggaatcgtctttaactcttctatatcttttgggccttttgggctcgtgcactctggcggtcctaacccaccgccttcaccgccagtatcacctccaccaccagcattcacgaccatctccgtgcctgctagtgtgggcactgcacaacccaccccaccgccttcacggcctgcacaagcacagccatcaccacctccaccagcagcatccatgatcgtctccgggcctgcgactgcgactccgagggctgcacaagcacaacccaccccagcgcccccaggcggtcataacccaccgcctgcatcacctccaccagcatccatcatgaacatctccgggcctgcgactgcgactccgactccgagggctgcacaacccaccccagcgcctcctggcggtcctaccccacagcctgtagctgccgcaacgaatgaaaacaaagggaagggaacattgaatacaccaaaatggcagatcgtctctattgcaactgggttggtggctgctttcatcatcctcgcactcaccgtatggtgccgtcggaaacagcaactgtctcagagagaacatgtcatagaaccccatgttttgaatcatcaagcagatggagtgccaggtgagactatgcatcacctagaaaagaaacatttgggctccgaagaagacgacgacggaggaagaacaagctgccaactctacagctacctggttcttgaggctgctacatgtcgcttctcaagtagaaacaagctagggagcggtggatttggaacggtatacaagggcacgcttgagaatgggaaggacgtagcagtgaaaaggctcagggactccaagagggcgatacaagaactagagagggagatctccatcgtggctagcttgcgccataagaacatcgtgaggtttttagggtactgcttccaagaggaagggaggttcttcatctacgagtatgtgcttaacaacagccttgataaattttggtacaaaggtaagttcattactcccactattaattatgtttaagcgggtgctcgttttaatctcaatccatatggattgaaggggattcgattagtttaaatctctagcaagtcaacatctatcctaatttctctcaattccctccaatccatatgagaggggaataagcaaacaaggtctaacagggtagagattaccaaggagaaaacaaacacccaaaaagttggcttgcaattgcagcatcttctcaatgccagaagctagagtgggctacatggttcaacatcatcttaggggttgctcgcggccttctgtttctccatgacatggggatcattcatcgggacctcaagccacacaatatacttcttgaccgtaacttcaacccaaagatcgctgatttcgatctcatgaggatgtatgatcaacagaaaactcacgagagcactgagaaggtcgctggaacattgttcatatagaagttgatgaagagttttttttttggacctctctgttgtttgttgtgaagtgggtacatggctccagagtgcacgtccggacgaaaattcctactttcgatcaagtctgacgtgtacagctacggggtgttagtgctggagatcatcaccggccacaagatctacactttcgaaggccaaaactctgaaggc

SEQ ID NO: 17002 - DNA, 2420 bp, Zea Mays
gaccgttccccgactctctctccacatcagttttggtcccaaattcagcctgagagctgcagcagcgaagagccgaagaaagccagcctcgccttccccctctccccatactaatcatcatcaagggcctgcgattccaagttgcgtttcctgtctggggattcagggtggaaggagatgaaatcgccattgcgcaggttccggggcttcgcccttcatcaccaccaccaccacagggagaggaaggaccaccgcccgccgtccgccaagctcgacgagctcgtctacgccgcccaggaaatggaagatatgaggaactgttacgatagcttgctttcagctgcagccgcaacgacaaatagtgtatatgagtttgcggaagccatgggtgaaatgggaacttgcttgcttgaaaaagctgcattgaattatgatgatgatgaaagtgcgtacaaatattataaatacaatcacaaatccatcagagtcccttctgaaagagctacaagtcgtagaggaaatgaaagaccaatgtgatcaaaaaagagtggaatatgaagccatgcgagcagcctatggggagaaaggagggcgattgaggcacctaaaaaatgaatcattctcattgggacaactgcaaacttcatttcttgagtaccaagaggaggcggcattgtttatttttcgcttgaaatcactaaagcaaggtcaatttttaagtattttgacacaggctgctcgtcatcatgcttctcagttgagttttttcaggaaagggctgaagcatctagaggctttggagccttgtgtcaaagcagttgctgagaagcagcacattgactaccacttcagtggactggataataacagtgatattgatgattacagctcttaccaggataatcatagtgatggcagtgagttaagttttaactatgagataaatgacagggacaaggacctccccactttcagaagtccaatggatatggatcaagctcatccagtgagttccccaagacctctgaaggaacagcaggaaaatgctgaagaaataaaggcgactttaggagttcctcatatgaagcctgagattggtacccaatcagcaccaatttttgctgagaatgttcctgatccatctatgagattccggaaaatgaacttgttaaccagaactgttcactcctacaaactcccaacgccagctgatgacaagaaccctgcttcagtaattgccaacaaatcgcctcattcagatcaacccgagagtaaatctcacgtggcagtaaatttgtggcattcctctccactggctaaagattttatgccgaattccatgcacagtggacctgttaagatgccatcaagtaacgaaggggtatcactagcttattcctactccacgacagattttaagaaagtgaagagggaagctttttctggcccaatcccaagcaaggtaggattgagcacccccctgatttctgcgactgatcgcaaaccgtcagggaagcggccttcctatgtgttgccaacaaggcctcctggcccaggttggcagtcatctgtgcctccaaaagctacgcccagggtgacctcgctcccaacaacgactcccaggataagcgagctgcatgagctgccccggcctccagcaaatgctggtttggttggatattctggccctctggtttcaaggcggccgatgcctactgctgtatccaccacccgtgtctcacccccatcacatacggcgtcgccactcccacgaccacctgctgccatgactcgtagctactccataccttcaaacagtcaacggactcctattattaccgtgaacaaattgttggaggctaggcatagcagggagagtagcgaagtttcctcccccccagtaacacctatatcactggcagacgtttcccgcagaccaacaacagaagcagctgtttgacaagaaaaggataaaggaatccttgtgagcagttgcgcaactgaacatgttgataatcttaggaaattttgtatgtggttgactgtattctatgattccctccataatctctcgtgttccctgcgaaaggaaaaaaatgtaaataaggttccattatgttatcgccttgatatgcttgtccgaactacctcttggatatagtgtaatagtctacaagagagagtttagatatggacgctgttgattcagtggtcatctgagctaattttttggactctggtgtgtagctctacccataatactgcactgcccgaactgatatttgtattagcggatatctacaagtttaagttagaggtttgggtatgtgatatttctggcccaggtagattatgtgatattagtctaaggcagtggcaaacctagctgctatgtttagtgtgtgtcagaaaaaaaacaa

SEQ ID NO: 17003 - DNA, 1381 bp, Zea Mays
tttttccttagtctaattctcagttcaggccatcagctgccgtagtgttatgctgacgtctattcctcctttgctctgtagagcagttgcacctgaaaacgacattgcatttgatagtgtcagttgttcagttattattaatgtgagcatgccaatgccattcataactgggagctgtttgcactttcatctgtctctggaactgtgtcattgttaatcaaccttaagttttagagaataagcttcaggctaaccaaaagaattccccctatcactctgtttttttgttgggtgcaggaaattacatgtttaaccttatatctgatttttaacgtgatacttagctgactgtctagtctaaggcagcaaggtattaagttcctccctgataggctttaatcgtgaactctattggaagtatggaattgttaccatgacttcaaacaccatcccatttctatattttagagttttgctttgagatccttctttgactcaccagcatcatttcttcgaaaactggccattttaaatagttttaggaaaaatatgttgtaccacatgtgtgcgtaaaggttcacctcaagttaaattgaagactcctttatctgccaacaaccaaggtagccaggaatttggggaagactttgcgtgctttccaaccaaccattagagagatacaggatgtatcaagggagttcaggagcactcttgaacgagaaatcggaattgatgaggtttcccagtcgacgaattatacacccacgaccatgaataacaaccaacaacctgctgccgactcaaatatcaagcctgcacctgcaccttacaccagcgatgaacttgtgaaagtaactgaagaacaaattgctgcatcagctgctgcagcttggaacccgcaacaacctgcatcgtcgcaacagcaagtgtacactactccgagtgaggacgctcctacatcaggaggaagcgatggtcctgctgctccagctcttgctgcgagtgactcggatccaaagcaagtgaatctggacaaggcggaaacacagagatgactccgcttaacagcttgacactggatgggatgagcacactgaacacgtcaggacgagcagtcttattttaattttgtaggcgatggacttcagattaaagccagttatttggactgctgcagctataatctatagagacataacactgtaaaaatagtagaatccgttttagattaaagccaaacgagatgagagcgttttctgtgtttactaggcttgttctgtagcagcatgcatgggcaggttcatacaaaaaggctatgtgtatgcgtaacataaccacgagtttatatggattaaatatatttagccacgttgaaaaaccg

SEQ ID NO: 17004 - DNA, 1599 bp, Zea Mays
agcagcataatttttccttagtctaattctcagttcaggccatcagctgccgtagtgttatgctgacgtctattcctcctttgctctgtagagcagttgcacctgaaaacgacattgcatttgatagtgtcagttgttcagttattattaatgtgagcatgccaatgccattcataactgggagctgtttgcactttcatctgtctctggaactgtgtcattgttaatcaaccttaagttttagagaataagcttcaggctaaccaaaagaattccccctatcactctgtttttttgttgggtgcaggaaattacatgtttaaccttatatctgatttttaacgtgatacttagctgactgtctagtctaaggcagcaaggtattaagttcctccctgataggctttaatcgtgaactctattggaagtatggaattgttaccatgacttcaaacaccatcccatttctatattttagagttttgctttgagatccttctttgactcaccagcatcatttcttcgaaaactggccattttaaatagttttaggaaaaatatgttgtaccacatgtgtgcgtaaaggttcacctcaagttaaattgaagactcctttatctgccaacaaccaaggtaaaaaatgattctgttctctaactattttcagatttacttttaaacgtttttcttccctatgcgtctgtgcttgacaatcatttccatgtcagcatatgttctctacaaacctatgctattgggctagcgctattaaaaaagacatgttttagatgcactgcccacatatgggtcttggcctcatttgctatattgtttccaggtagccaggaatttggggaagactttgcgtgctttccaaccaaccattagagagatacaggatgtatcaagggagttcaggagcactcttgaacgagaaatcggaattgatgaggtttcccagtcgacgaattatacacccacgaccatgaataacaaccaacaacctgctgccgactcaaatatcaagcctgcacctgcaccttacaccagcgatgaacttgtgaaagtaactgaagaacaaattgctgcatcagctgctgcagcttggaacccgcaacaacctgcatcgtcgcaacagcaagaagtgtacactactccgagtgaggacgctcctacatcaggaggaagcgatggtcctgctgctccagctcttgctgcgagtgactcggatccaaagcaagtgaatctggacaaggcggaaacacagagatgactccgcttaacagcttgacactggatgggatgagcacactgaacacgtcaggacgagcagtcttattttaattttgtaggcgatggacttcagattaaagccagttatttggactgctgcagctataatctatagagacataacactgtaaaaatagtagaatccgttttagattaaagccaaacgagatgagagcgttttctgtgtttactaggcttgttctgtagcagcatgcatgggcaggttcatacaaaaaggctatgtgtatgcgtaacataaccacgagtttatatggattaaatatatttagccacgttgaaaaaccg

SEQ ID NO: 17005 - DNA, 1394 bp, Zea Mays
agcagcataatttttccttagtctaattctcagttcaggccatcagctgccgtagtgttatgctgacgtctattcctcctttgctctgtagagcagttgcacctgaaaacgacattgcatttgatagtgtcagttgttcagttattattaatgtgagcatgccaatgccattcataactgggagctgtttgcactttcatctgtctctggaactgtgtcattgttaatcaaccttaagttttagagaataagcttcaggctaaccaaaagaattccccctatcactctgtttttttgttgggtgcaggaaattacatgtttaaccttatatctgatttttaacgtgatacttagctgactgtctagtctaaggcagcaaggtattaagttcctccctgataggctttaatcgtgaactctattggaagtatggaattgttaccatgacttcaaacaccatcccatttctatattttagagttttgctttgagatccttctttgactcaccagcatcatttcttcgaaaactggccattttaaatagttttaggaaaaatatgttgtaccacatgtgtgcgtaaaggttcacctcaagttaaattgaagactcctttatctgccaacaaccaaggtagccaggaatttggggaagactttgcgtgctttccaaccaaccattagagagatacaggatgtatcaagggagttcaggagcactcttgaacgagaaatcggaattgatgaggtttcccagtcgacgaattatacacccacgaccatgaataacaaccaacaacctgctgccgactcaaatatcaagcctgcacctgcaccttacaccagcgatgaacttgtgaaagtaactgaagaacaaattgctgcatcagctgctgcagcttggaacccgcaacaacctgcatcgtcgcaacagcaagaagtgtacactactccgagtgaggacgctcctacatcaggaggaagcgatggtcctgctgctccagctcttgctgcgagtgactcggatccaaagcaagtgaatctggacaaggcggaaacacagagatgactccgcttaacagcttgacactggatgggatgagcacactgaacacgtcaggacgagcagtcttattttaattttgtaggcgatggacttcagattaaagccagttatttggactgctgcagctataatctatagagacataacactgtaaaaatagtagaatccgttttagattaaagccaaacgagatgagagcgttttctgtgtttactaggcttgttctgtagcagcatgcatgggcaggttcatacaaaaaggctatgtgtatgcgtaacataaccacgagtttatatggattaaatatatttagccacgttgaaaaaccg

SEQ ID NO: 17006 - DNA, 2941 bp, Zea Mays
gccacatcccgcttcccccgtacgccgtacccccgcagctcgctctcgccttctcctccggttcctgctgcaacctgcactccgtagtccgccctttctgcccgccgccggccacttcaagactactccccgccgcgttacctcctcctcgtcctcctggggttacccagctctgttcccctttcagggaacgccttgagaggcggggcgggtccttggtccggaggcgcggcgacggcgagtgatttttgttcgccagagggagagttttttttttcaccgggtttggtgggaagtaaggaggcggccgcgagtggcgagacgttcacgggttagatctggcggtacggcgtcgcggatctgagcgaggtttcggtggagcgatcaggaggtggtcactatcttcgcctcatttcgagtagtttgggcgcctgtagtttgcctgtttccttttcggtgtctgatcaagaagatgatgtgctcagagggcttctagttgttgctgatatcttgtcttgtgttgtatcacccggaagctggaaaggagcgcatcactcctgctctccccttttactccttggttacttggtatttcttggatatccaggctggaaggggttagatccagttcctgcggccctagtaataaggtgcacttggggaaggtgccatgacctacttccccggtgaggtggtggagcacattttcagcttcttgccgtcgcacagcgaccggaacacggtctcccttgtgtgcaagttgtggtacgatgtcgagaggctgagccgacgaggtgtgttcgtggggaactgctacgctgtgctccctgagcgtgtggtgctgcgattccccaatgtaaaggcgctgacggtgaaggggaagcctcactttgcggacttcaaccttgtgccgcctgattggggtggctacgcggggccatggattgaagcaacagccaggagctgcctgagtcttgaggagctgcgcatgaagcggatggttatctctgatgagaaccttgaactgctagctcggacattcccaaaattcaaagtcctcgtccttatcagctgcgaggggtttagcacggatggtctagctgccattgccaatcactgcaagctcctgagggagttagatttgcaggaaaatgacgtggaggaccgtgggcccagatggctttccttccctgattcctgcacctcattggtttccttgaatttcgcttgcatcaaaggggaagtgaattctggtgcattggagagacttgtcgctaagtctccaaacctacgcagtttgaggttgaatcgctctgtttcagttgacacactctcgaagatactagagcgaaccccaaatttggaagacttggggacaggtaatttgacagatgagttccaagctgagtcctttgtcagacttactagtgctctggagaaatgcaaaaggctgaggaatttgtctggattttgggatgcttctcctatctttgttccgtttatctatccactctgtcatcaactaactggcctaaacttgagctatactcccacactggattattctgatctgactaaaatgatcagccgctgtgtgaaactccagcgtctttgggtactggactgcatttcagacaagggtttgcaggtggtggcctctagttgcaaggatctacaagaactcagggtgtttccatcagaatttaatgttgctggtgcttttacggtgacagaggagggacttgttgcaatatcatcaggctgcccaaaactgagctctttgctgtatttttgtcaccagatgaccaatgaagcactaactactgtagccaagaattgcccaagtttcatcagatttagactctgtatccttgagccaaagaagccggatgccatgacaggccagccgttagatgaaggctttggtgcaattgtccgtgactgcaaaggtctaagacgactgtcaatgtcaggccttctcacagacagggttttcatgtatatcagaatgtatgcgaaataccttgagatgctttctatagcttttgctggagatggtgataaggggatgatggatgtgatgaacggatgcaagaatctgaggaagcttgagattagagacagtccatttggtgattttgcactcttgggaaatgttgccaaatatgacacaatgcgatccctttggatgtcatcatgcaatgtcacattaaaggggtgccaagtccttgcatcgaagatgccgatgctcaatgtggagatcatgaacgaactagatggaagtagtgaaatggagaaccatggtaacctctctaaagtggataagttatatgtttaccgtacaactgctggagtgagggatgatgcaccaaattttgttcaaatattatagagctagctgcaattaccttgaatcgggaaaagccacactggtttgtgcccttatcctggagcaacatggccgggattcatcatcatctctgtaccaactgctcccctcttccagtgtctggtcatatggccacccaggccctttatcgccttgtgcattctcactcgagaggaggacagaatcagatgactttttttttcttcttttcacgccatgtaatctgtagtgtacctgtcttcatttgcttttcactttggcacggtggattgtgctgtcgcggtactgttctagtgttttgattcgtaaacctgagaactgtcgggacattccggtgacgatgatttctttcttgctcctgtgaatgcagtgtgtgtgcaaattttaggtttatactacatctctccacgtaaatttgctagatgtagccgactacccacgtagcggttcattaatgatcttggtttaattaatggctgagtattttttttctaatttatgtactttctctattttgtttacatattttattatattaggtttattctgaga

SEQ ID NO: 17007 - DNA, 3062 bp, Zea Mays
cgtcgccacatcccgcttcccccgtacgccgtacccccgcagctcgctctcgccttctcctccggttcctgctgcaacctgcactccgtagtccgccctttctgcccgccgccggccacttcaagactactccccgccgcgttacctcctcctcgtcctcctggggttacccagctctgttcccctttcagggaacgccttgagaggcggggcgggtccttggtccggaggcgcggcgacggcgagtgatttttgttcgccagagggagagttttttttttcaccgggtttggtgggaagtaaggaggcggccgcgagtggcgagacgttcacgggttagatctggcggtacggcgtcgcggatctgagcgaggtaggctgtcgtttccccccctccggcgcctgttgcatttcccccctccggcgcgtgtctcgatatccttgcagttccctgtagttggcaagagctgaaggctacctaatctccatctgcaggtttcggtggagcgatcaggaggtggtcactatcttcgcctcatttcgagtagtttgggcgcctgtagtttgcctgtttccttttcggtgtctgatcaagaagatgatgtgctcagagggcttctagttgttgctgatatcttgtcttgtgttgtatcacccggaagctggaaaggagcgcatcactcctgctctccccttttactccttggttacttggtatttcttggatatccaggctggaaggggttagatccagttcctgcggccctagtaataaggtgcacttggggaaggtgccatgacctacttccccggtgaggtggtggagcacattttcagcttcttgccgtcgcacagcgaccggaacacggtctcccttgtgtgcaagttgtggtacgatgtcgagaggctgagccgacgaggtgtgttcgtggggaactgctacgctgtgctccctgagcgtgtggtgctgcgattccccaatgtaaaggcgctgacggtgaaggggaagcctcactttgcggacttcaaccttgtgccgcctgattggggtggctacgcggggccatggattgaagcaacagccaggagctgcctgagtcttgaggagctgcgcatgaagcggatggttatctctgatgagaaccttgaactgctagctcggacattcccaaaattcaaagtcctcgtccttatcagctgcgaggggtttagcacggatggtctagctgccattgccaatcactgcaagaaaatgacgtggaggaccgtgggcccagatggctttccttccctgattcctgcacctcattggtttccttgaatttcgcttgcatcaaaggggaagtgaattctggtgcattggagagacttgtcgctaagtctccaaacctacgcagtttgaggttgaatcgctctgtttcagttgacacactctcgaagatactagagcgaaccccaaatttggaagacttggggacaggtaatttgacagatgagttccaagctgagtcctttgtcagacttactagtgctctggagaaatgcaaaaggctgaggaatttgtctggattttgggatgcttctcctatctttgttccgtttatctatccactctgtcatcaactaactggcctaaacttgagctatactcccacactggattattctgatctgactaaaatgatcagccgctgtgtgaaactccagcgtctttgggtactggactgcatttcagacaagggtttgcaggtggtggcctctagttgcaaggatctacaagaactcagggtgtttccatcagaatttaatgttgctggtgcttttacggtgacagaggagggacttgttgcaatatcatcaggctgcccaaaactgagctctttgctgtatttttgtcaccagatgaccaatgaagcactaactactgtagccaagaattgcccaagtttcatcagatttagactctgtatccttgagccaaagaagccggatgccatgacaggccagccgttagatgaaggctttggtgcaattgtccgtgactgcaaaggtctaagacgactgtcaatgtcaggccttctcacagacagggttttcatgtatatcagaatgtatgcgaaataccttgagatgctttctatagcttttgctggagatggtgataaggggatgatggatgtgatgaacggatgcaagaatctgaggaagcttgagattagagacagtccatttggtgattttgcactcttgggaaatgttgccaaatatgacacaatgcgatccctttggatgtcatcatgcaatgtcacattaaaggggtgccaagtccttgcatcgaagatgccgatgctcaatgtggagatcatgaacgaactagatggaagtagtgaaatggagaaccatggtaacctctctaaagtggataagttatatgtttaccgtacaactgctggagtgagggatgatgcaccaaattttgttcaaatattatagagctagctgcaattaccttggtatcttcccttcctacgagaatcgggaaaagccacactggtttgtgcccttatcctggagcaacatggccgggattcatcatcatctctgtaccaactgctcccctcttccagtgtctggtcatatggccacccaggccctttatcgccttgtgcattctcactcgagaggaggacagaatcagatgactttttttttcttcttttcacgccatgtaatctgtagtgtacctgtcttcatttgcttttcactttggcacggtggattgtgctgtcgcggtactgttctagtgttttgattcgtaaacctgagaactgtcgggacattccggtgacgatgatttctttcttgctcctgtgaatgcagtgtgtgtgcaaattttaggtttatactacatctctccacgtaaatttgctagatgtagccgactacccacgtagcggttcattaatgatcttggtttaattaatggctgagtattttttttctaatttatgtactttctctattttgtttacatattttattatattaggtttattctgaga

SEQ ID NO: 17008 - DNA, 3070 bp, Zea Mays
gtcgtcgccacatcccgcttcccccgtacgccgtacccccgcagctcgctctcgccttctcctccggttcctgctgcaacctgcactccgtagtccgccctttctgcccgccgccggccacttcaagactactccccgccgcgttacctcctcctcgtcctcctggggttacccagctctgttcccctttcagggaacgccttgagaggcggggcgggtccttggtccggaggcgcggcgacggcgagtgatttttgttcgccagagggagagttttttttttcaccgggtttggtgggaagtaaggaggcggccgcgagtggcgagacgttcacgggttagatctggcggtacggcgtcgcggatctgagcgaggtaggctgtcgtttccccccctccggcgcctgttgcatttcccccctccggcgcgtgtctcgatatccttgcagttccctgtagttggcaagagctgaaggctacctaatctccatctgcaggtttcggtggagcgatcaggaggtggtcactatcttcgcctcatttcgagtagtttgggcgcctgtagtttgcctgtttccttttcggtgtctgatcaagaagatgatgtgctcagagggcttctagttgttgctgatatcttgtcttgtgttgtatcacccggaagctggaaaggagcgcatcactcctgctctccccttttactccttggttacttggtatttcttggatatccaggctggaaggggttagatccagttcctgcggccctagtaataaggtgcacttggggaaggtgccatgacctacttccccggtgaggtggtggagcacattttcagcttcttgccgtcgcacagcgaccggaacacggtctcccttgtgtgcaagttgtggtacgatgtcgagaggctgagccgacgaggtgtgttcgtggggaactgctacgctgtgctccctgagcgtgtggtgctgcgattccccaatgtaaaggcgctgacggtgaaggggaagcctcactttgcggacttcaaccttgtgccgcctgattggggtggctacgcggggccatggattgaagcaacagccaggagctgcctgagtcttgaggagctgcgcatgaagcggatggttatctctgatgagaaccttgaactgctagctcggacattcccaaaattcaaagtcctcgtccttatcagctgcgaggggtttagcacggatggtctagctgccattgccaatcactgcaagctcctgagggagttagatttgcaggaaaatgacgtggaggaccgtgggcccagatggctttccttccctgattcctgcacctcattggtttccttgaatttcgcttgcatcaaaggggaagtgaattctggtgcattggagagacttgtcgctaagtctccaaacctacgcagtttgaggttgaatcgctctgtttcagttgacacactctcgaagatactagagcgaaccccaaatttggaagacttggggacaggtaatttgacagatgagttccaagctgagtcctttgtcagacttactagtgctctggagaaatgcaaaaggctgaggaatttgtctggattttgggatgcttctcctatctttgttccgtttatctatccactctgtcatcaactaactggcctaaacttgagctatactcccacactggattattctgatctgactaaaatgatcagccgctgtgtgaaactccagcgtctttggacaagggtttgcaggtggtggcctctagttgcaaggatctacaagaactcagggtgtttccatcagaatttaatgttgctggtgcttttacggtgacagaggagggacttgttgcaatatcatcaggctgcccaaaactgagctctttgctgtatttttgtcaccagatgaccaatgaagcactaactactgtagccaagaattgcccaagtttcatcagatttagactctgtatccttgagccaaagaagccggatgccatgacaggccagccgttagatgaaggctttggtgcaattgtccgtgactgcaaaggtctaagacgactgtcaatgtcaggccttctcacagacagggttttcatgtatatcagaatgtatgcgaaataccttgagatgctttctatagcttttgctggagatggtgataaggggatgatggatgtgatgaacggatgcaagaatctgaggaagcttgagattagagacagtccatttggtgattttgcactcttgggaaatgttgccaaatatgacacaatgcgatccctttggatgtcatcatgcaatgtcacattaaaggggtgccaagtccttgcatcgaagatgccgatgctcaatgtggagatcatgaacgaactagatggaagtagtgaaatggagaaccatggtaacctctctaaagtggataagttatatgtttaccgtacaactgctggagtgagggatgatgcaccaaattttgttcaaatattatagagctagctgcaattaccttggtatcttcccttcctacgagaatcgggaaaagccacactggtttgtgcccttatcctggagcaacatggccgggattcatcatcatctctgtaccaactgctcccctcttccagtgtctggtcatatggccacccaggccctttatcgccttgtgcattctcactcgagaggaggacagaatcagatgactttttttttcttcttttcacgccatgtaatctgtagtgtacctgtcttcatttgcttttcactttggcacggtggattgtgctgtcgcggtactgttctagtgttttgattcgtaaacctgagaactgtcgggacattccggtgacgatgatttctttcttgctcctgtgaatgcagtgtgtgtgcaaattttaggtttatactacatctctccacgtaaatttgctagatgtagccgactacccacgtagcggttcattaatgatcttggtttaattaatggctgagtattttttttctaatttatgtactttctctattttgtttacatattttattatattaggtttattctgaga

SEQ ID NO: 17009 - DNA, 2844 bp, Zea Mays
ggagtagtcgtcgccacatcccgcttcccccgtacgccgtacccccgcagctcgctctcgccttctcctccggttcctgctgcaacctgcactccgtagtccgccctttctgcccgccgccggccacttcaagactactccccgccgcgttacctcctcctcgtcctcctggggttacccagctctgttcccctttcagggaacgccttgagaggcggggcgggtccttggtccggaggcgcggcgacggcgagtgatttttgttcgccagagggagagttttttttttcaccgggtttggtgggaagtaaggaggcggccgcgagtggcgagacgttcacgggttagatctggcggtacggcgtcgcggatctgagcgaggtttcggtggagcgatcaggaggtggtcactatcttcgcctcatttcgagtagtttgggcgcctgtagtttgcctgtttccttttcggtgtctgatcaagaagatgatgtgctcagagggcttctagttgttgctgatatcttgtcttgtgttgtatcacccggaagctggaaaggagcgcatcactcctgctctccccttttactccttggttacttggtatttcttggatatccaggctggaaggggttagatccagttcctgcggccctagtaataaggtgcacttggggaaggtgccatgacctacttccccggtgaggtggtggagcacattttcagcttcttgccgtcgcacagcgaccggaacacggtctcccttgtgtgcaagttgtggtacgatgtcgagaggctgagccgacgaggtgtgttcgtggggaactgctacgctgtgctccctgagcgtgtggtgctgcgattccccaatgtaaaggcgctgacggtgaaggggaagcctcactttgcggacttcaaccttgtgccgcctgattggggtggctacgcggggccatggattgaagcaacagccaggagctgcctgagtcttgaggagctgcgcatgaagcggatggttatctctgatgagaaccttgaactgctagctcggacattcccaaaattcaaagtcctcgtccttatcagctgcgaggggtttagcacggatggtctagctgccattgccaatcactgcaagctcctgagggagttagatttgcaggaaaatgacgtggaggaccgtgggcccagatggctttccttccctgattcctgcacctcattggtttccttgaatttcgcttgcatcaaaggggaagtgaattctggtgcattggagagacttgtcgctaagtctccaaacctacgcagtttgaggttgaatcgctctgtttcagttgacacactctcgaagatactagagcgaaccccaaatttggaagacttggggacaggtaatttgacagatgagttccaagctgagtcctttgtcagacttactagtgctctggagaaatgcaaaaggctgaggaatttgtctggattttgggatgcttctcctatctttgttccgtttatctatccactctgtcatcaactaactggcctaaacttgagctatactcccacactggattattctgatctgactaaaatgatcagccgctgtgtgaaactccagcgtctttgggtactggactgcatttcagacaagggtttgcaggtggtggcctctagttgcaaggatctacaagaactcagggtgtttccatcagaatttaatgttgctggtgcttttacggtgacagaggagggacttgttgcaatatcatcaggctgcccaaaactgagctctttgctgtatttttgtcaccagatgaccaatgaagcactaactactgtagccaagaattgcccaagtttcatcagatttagactctgtatccttgagccaaagaagccggatgccatgacaggccagccgttagatgaaggctttggtgcaattgtccgtgactgcaaaggtctaagacgactgtcaatgtcaggccttctcacagacagggttttcatgtatatcagaatgtatgcgaaataccttgagatgctttctatagcttttgctggagatggtgataaggggatgatggatgtgatgaacggatgcaagaatctgaggaagcttgagattagagacagtccatttggtgattttgcactcttgggaaatgttgccaaatatgacacaatgcgatccctttggatgtcatcatgcaatgtcacattaaaggggtgccaagtccttgcatcgaagatgccgatgctcaatgtggagatcatgaacgaactagatggaagtagtgaaatggagaaccatgaatcgggaaaagccacactggtttgtgcccttatcctggagcaacatggccgggattcatcatcatctctgtaccaactgctcccctcttccagtgtctggtcatatggccacccaggccctttatcgccttgtgcattctcactcgagaggaggacagaatcagatgactttttttttcttcttttcacgccatgtaatctgtagtgtacctgtcttcatttgcttttcactttggcacggtggattgtgctgtcgcggtactgttctagtgttttgattcgtaaacctgagaactgtcgggacattccggtgacgatgatttctttcttgctcctgtgaatgcagtgtgtgtgcaaattttaggtttatactacatctctccacgtaaatttgctagatgtagccgactacccacgtagcggttcattaatgatcttggtttaattaatggctgagtattttttttctaatttatgtactttctctattttgtttacatattttattatattaggtttattctgaga

SEQ ID NO: 17010 - DNA, 2497 bp, Zea Mays
ggtggagtagtcgtcgccacatcccgcttcccccgtacgccgtacccccgcagctcgctctcgccttctcctccggttcctgctgcaacctgcactccgtagtccgccctttctgcccgccgccggccacttcaagactactccccgccgcgttacctcctcctcgtcctcctggggttacccagctctgttcccctttcagggaacgccttgagaggcggggcgggtccttggtccggaggcgcggcgacggcgagtgatttttgttcgccagagggagagttttttttttcaccgggtttggtgggaagtaaggaggcggccgcgagtggcgagacgttcacgggttagatctggcggtacggcgtcgcggatctgagcgaggtttcggtggagcgatcaggaggtggtcactatcttcgcctcatttcgagtagtttgggcgcctgtagtttgcctgtttccttttcggtgtctgatcaagaagatgatgtgctcagagggcttctagttgttgctgatatcttgtcttgtgttgtatcacccggaagctggaaaggagcgcatcactcctgctctccccttttactccttggttacttggtatttcttggatatccaggctggaaggggttagatccagttcctgcggccctagtaataaggtgcacttggggaaggtgccatgacctacttccccggtgaggtggtggagcacattttcagcttcttgccgtcgcacagcgaccggaacacggtctcccttgtgtgcaagttgtggtacgatgtcgagaggctgagccgacgaggtgtgttcgtggggaactgctacgctgtgctccctgagcgtgtggtgctgcgattccccaatgtaaaggcgctgacggtgaaggggaagcctcactttgcggacttcaaccttgtgccgcctgattggggtggctacgcggggccatggattgaagcaacagccaggagctgcctgagtcttgaggagctgcgcatgaagcggatggttatctctgatgagaaccttgaactgctagctcggacattcccaaaattcaaagtcctcgtccttatcagctgcgaggggtttagcacggatggtctagctgccattgccaatcactgcaagctcctgagggagttagatttgcaggaaaatgacgtggaggaccgtgggcccagatggctttccttccctgattcctgcacctcattggtttccttgaatttcgcttgcatcaaaggggaagtgaattctggtgcattggagagacttgtcgctaagtctccaaacctacgcagtttgaggttgaatcgctctgtttcagttgacacactctcgaagatactagagcgaaccccaaatttggaagacttggggacaggtaatttgacagatgagttccaagctgagtcctttgtcagacttactagtgctctggagaaatgcaaaaggctgaggaatttgtctggattttgggatgcttctcctatctttgttccgtttatctatccactctgtcatcaactaactggcctaaacttgagctatactcccacactggattattctgatctgactaaaatgatcagccgctgtgtgaaactccagcgtctttgggtactggactgcatttcagacaagggtttgcaggtggtggcctctagttgcaaggatctacaagaactcagggtgtttccatcagaatttaatgttgctggtgcttttacggtgacagaggagggacttgttgcaatatcatcaggctgcccaaaactgagctctttgctgtatttttgtcaccagatgaccaatgaagcactaactactgtagccaagaattgcccaagtttcatcagatttagactctgtatccttgagccaaagaagccggatgccatgacaggccagccgttagatgaaggctttggtgcaattgtccgtgactgcaaaggtctaagacgactgtcaatgtcaggccttctcacagacagggttttcatgtatatcagaatgtatgcgaaataccttgagatgctttctatagcttttgctggagatggtgataaggggatgatggatgtgatgaacggatgcaagaatctgaggaagcttgagattagagacagtccatttggtgattttgcactcttgggaaatgttgccaaatatgacacaatgcgatccctttggatgtcatcatgcaatgtcacattaaaggggtgccaagtccttgcatcgaagatgccgatgctcaatgtggagatcatgaacgaactagatggaagtagtgaaatggagaaccatggtaacctctctaaagtggataagttatatgtttaccgtacaactgctggagtgagggatgatgcaccaaattttgttcaaatattatagagctagctgcaattaccttggtatcttcccttcctacgagcatgcctgggaccagggcaacagtggtaagttcttgaatcgtctcccttt

SEQ ID NO: 17011 - DNA, 2684 bp, Zea Mays
cgagggggatcgaaccctaacctagagggcataattatataggatctgaacacttactccttgggctacttcgtgagggtgaaggtgttgctgctcgtgtgcttgaaagccttggtgctgatccaaacaacatccgtacccaggtcataagaatggttggggaaagcacagaagctgttggggctggagttggtggaggaagcagtggccagaagatgcccacacttgaagaatacggtactaatttgacgaaattagcggaagagggcaaattggacccagttgttggtagacaggatcagattgagcgcgttacccagattttaggcaggaggacaaagaacaacccctgcttaattggagagcctggtgttggaaagactgctattgctgaggggcttgctcaacgtatttccaatggtgatgttcccgaaacaattgaaggaaagaaggttattactcttgacatgggcctccttgttgctggaaccaaataccgtggagagtttgaagagagattaaagaaacttatggaggaaattaagcaaaatgaagatattattctctttattgatgaagtgcacacactgattggagcaggtgcagcagaaggtgcgattgatgctgctaatattttgaagccagctcttgcaagaggtgaactgcagtgcattggtgccacaacactggatgagtataggaagcatatagagaaagatcctgccttggaaagaaggtttcaaccagttaaggttcctgagcctactgttgatgaaacaatacagatcttaagagggctccgtgagagatatgaactccatcacaaactgcgatacacagatgatgctttaattgctgctgcacagctgtcttatcagtatatcagtgatcgtttcctgcctgacaaggccattgacttgattgatgaagctggatcccgtgttaggctgaggcatgcccagctccctgatgaagccaaagagctggacaaagagctgcgacagataaccaagcagaaaaacgaggctgtacgcggccaggattttgagaaggctggtgaattaagggaccgagaaatggaactgaaggctcaaattacggccattattgacaagagcaaggaaatgattaaagcagagactgaatctggtgatgtcggtcctcttgttactgaggcagatattcaacatattgtctcctcttggactggaattcctgtggagaaagtgtcgtctgatgagtctgaccgtctcctaaagatggaagagacactgcatacacgtatcattggccaggacgaggctgtcaaagctattagccgtgctatccgccgtgctcgtgttggcctgaagaatccaaataggccaattgccagcttcatattctctggaccaactggagttggcaaatcagagctagcaaaggctctggcagcctactactttggctcagaggaggctatgattaggcttgacatgagtgagttcatggagagacatactgtctccaagcttattggatcacctccaggttatgttgggtacactgagggaggccaactaactgaagcagtccgtcgccgcccatacacagttgttctctttgatgagattgagaaggcacatcctgatgttttcaacatgatgcttcagatattagaagatgggcgattaactgatagcaaggggcgcacagttgacttcaaaaacacactattgatcatgacatctaatgtgggaagcagtgtcattgagaaaggaggccgcaagatcgggtttgaccttgactatgatgagaaagacaccagctataacaggatcaagagcctggtgaccgaggagttgaagcagtatttccggccagagttcttgaacagattggatgagatgattgtattccggcagctgactaaattggaggtgaaggagattgctgacattatgctgaaagaagtgtttgacaggctgaaggccaaggagattaatctccaggtcacggagaagttccgagatagagttgttgacgaaggttataacccgagctatggtgccagacctttgcggcgtgctatcatgaggcttctggaggatagtctggcagagaagatgctggctggtgaggtgaaagaaggtgactctgccatcgttgatgtggattcagatggcaaggtgatagtcctgaatggtggtagcggtgttgctgagccactggaacctgctctcagtacctaaccgaggtcaaaatcatcattggtccgaaatatggccttctttacaagtcagctgggtttctcgtgatggtaaaaactagactgacattacttggccgcccattagttgctttatctttcgtttattttcttttttgttggaagtgaggcagtagggttgctatggaaatgaatagatggagaagcatttagcagacatataatatatgctagacttttgagttgccttgttttgggaagaaacttggaattttcagtttgatgcacttgtattattattaggccttggtagcaacaagatacggatgtcgtctctacgtttgctgttgtacttcagtgtaacttgcctcccgaatgtatgagtattatttatcaagtcccaaataacagtgacggattgctacattctgttttttttgtttgtggatctgaaaattggaattcttagcttatc

SEQ ID NO: 17012 - DNA, 3309 bp, Zea Mays
atcgattcgaggaaatataatatattcgagacctgcaatcgtttcaggcttggtagatacaggtctgggattgccttttcctagttcaacatggagggcgctcttgttcagtctgctattgttccagccgtttacagaagcagctcaggtcggttccgtgtgcgtgcaagggccagaacaaatgctacaatggtgcggaatacgccaacaaggactcttactcttggtggcttccaagggctgcgtcagacaaactttttggatacgaggtctgtaattaagcgtgactttggatcaatcgtggcaagccagattgcaaggccacgcgggtcagcctcaagaggggtggtccgtgccatgtttgagcgcttcactgagaaagcaatcaaggtgattatgcttgcacaggaagaggcaaggcgcctgggacacaacttcgttgggacagaacagattttgctggggcttattggtgagggcacaggaattgcagcgaaggttatgaagtctatgggaatcaatcttaaggatgcccgagtggaagtcgaaaagataattggacgtggcagtgggtttgtggctgttgaaatcccattcacacctcgagcaaaacgtgtattggaattgtcccttgaagaagctcgtcagcttgggcataattatataggatctgaacacttactccttgggctacttcgtgagggtgaaggtgttgctgctcgtgtgcttgaaagccttggtgctgatccaaacaacatccgtacccaggtcataagaatggttggggaaagcacagaagctgttggggctggagttggtggaggaagcagtggccagaagatgcccacacttgaagaatacggtactaatttgacgaaattagcggaagagggcaaattggacccagttgttggtagacaggatcagattgagcgcgttacccagattttaggcaggaggacaaagaacaacccctgcttaattggagagcctggtgttggaaagactgctattgctgaggggcttgctcaacgtatttccaatggtgatgttcccgaaacaattgaaggaaagaaggttattactcttgacatgggcctccttgttgctggaaccaaataccgtggagagtttgaagagagattaaagaaacttatggaggaaattaagcaaaatgaagatattattctctttattgatgaagtgcacacactgattggagcaggtgcagcagaaggtgcgattgatgctgctaatattttgaagccagctcttgcaagaggtgaactgcagtgcattggtgccacaacactggatgagtataggaagcatatagagaaagatcctgccttggaaagaaggtttcaaccagttaaggttcctgagcctactgttgatgaaacaatacagatcttaagagggctccgtgagagatatgaactccatcacaaactgcgatacacagatgatgctttaattgctgctgcacagctgtcttatcagtatatcagtgatcgtttcctgcctgacaaggccattgacttgattgatgaagctggatcccgtgttaggctgaggcatgcccagctccctgatgaagccaaagagctggacaaagagctgcgacagataaccaagcagaaaaacgaggctgtacgcggccaggattttgagaaggctggtgaattaagggaccgagaaatggaactgaaggctcaaattacggccattattgacaagagcaaggaaatgattaaagcagagactgaatctggtgatgtcggtcctcttgttactgaggcagatattcaacatattgtctcctcttggactggaattcctgtggagaaagtgtcgtctgatgagtctgaccgtctcctaaagatggaagagacactgcatacacgtatcattggccaggacgaggctgtcaaagctattagccgtgctatccgccgtgctcgtgttggcctgaagaatccaaataggccaattgccagcttcatattctctggaccaactggagttggcaaatcagagctagcaaaggctctggcagcctactactttggctcagaggaggctatgattaggcttgacatgagtgagttcatggagagacatactgtctccaagcttattggatcacctccaggttatgttgggtacactgagggaggccaactaactgaagcagtccgtcgccgcccatacacagttgttctctttgatgagattgagaaggcacatcctgatgttttcaacatgatgcttcagatattagaagatgggcgattaactgatagcaaggggcgcacagttgacttcaaaaacacactattgatcatgacatctaatgtgggaagcagtgtcattgagaaaggaggccgcaagatcgggtttgaccttgactatgatgagaaagacaccagctataacaggatcaagagcctggtgaccgaggagttgaagcagtatttccggccagagttcttgaacagattggatgagatgattgtattccggcagctgactaaattggaggtgaaggagattgctgacattatgctgaaagaagtgtttgacaggctgaaggccaaggagattaatctccaggtcacggagaagttccgagatagagttgttgacgaaggttataacccgagctatggtgccagacctttgcggcgtgctatcatgaggcttctggaggatagtctggcagagaagatgctggctggtgaggtgaaagaaggtgactctgccatcgttgatgtggattcagatggcaaggtgatagtcctgaatggtggtagcggtgttgctgagccactggaacctgctctcagtacctaaccgaggtcaaaatcatcattggtccgaaatatggccttctttacaagtcagctgggtttctcgtgatggtaaaaactagactgacattacttggccgcccattagttgctttatctttcgtttattttcttttttgttggaagtgaggcagtagggttgctatggaaatgaatagatggagaagcatttagcagacatataatatatgctagacttttgagttgccttgttttgggaagaaacttggaattttcagtttgatgcacttgtattattattaggccttggtagcaacaagatacggatgtcgtctctacgtttgctgttgtacttcagtgtaacttgcctcccgaatgtatgagtattatttatcaagtcccaaataacagtgacggattgctacattctgttttttttgtttgtggatctgaaaattggaattcttagcttatc

SEQ ID NO: 17013 - DNA, 3303 bp, Zea Mays
attcccactaccgcggcaggcagctaccccctccctctcgtctcctccgccacctcttctcgcgtctagggtgcgcccgcctcgctggcgtagggtcgggacggttctgccggtgcgagctccacgacccctctgcgggagacgaaacaaaggcgtgggcttggtagatacaggtctgggattgccttttcctagttcaacatggagggcgctcttgttcagtctgctattgttccagccgtttacagaagcagctcaggtcggttccgtgtgcgtgcaagggccagaacaaatgctacaatggtgcggaatacgccaacaaggactcttactcttggtggcttccaagggctgcgtcagacaaactttttggatacgaggtctgtaattaagcgtgactttggatcaatcgtggcaagccagattgcaaggccacgcgggtcagcctcaagaggggtggtccgtgccatgtttgagcgcttcactgagaaagcaatcaaggtgattatgcttgcacaggaagaggcaaggcgcctgggacacaacttcgttgggacagaacagattttgctggggcttattggtgagggcacaggaattgcagcgaaggttatgaagtctatgggaatcaatcttaaggatgcccgagtggaagtcgaaaagataattggacgtggcagtgggtttgtggctgttgaaatcccattcacacctcgagcaaaacgtgtattggaattgtcccttgaagaagctcgtcagcttgggcataattatataggatctgaacacttactccttgggctacttcgtgagggtgaaggtgttgctgctcgtgtgcttgaaagccttggtgctgatccaaacaacatccgtacccaggtcataagaatggttggggaaagcacagaagctgttggggctggagttggtggaggaagcagtggccagaagatgcccacacttgaagaatacggtactaatttgacgaaattagcggaagagggcaaattggacccagttgttggtagacaggatcagattgagcgcgttacccagattttaggcaggaggacaaagaacaacccctgcttaattggagagcctggtgttggaaagactgctattgctgaggggcttgctcaacgtatttccaatggtgatgttcccgaaacaattgaaggaaagaaggttattactcttgacatgggcctccttgttgctggaaccaaataccgtggagagtttgaagagagattaaagaaacttatggaggaaattaagcaaaatgaagatattattctctttattgatgaagtgcacacactgattggagcaggtgcagcagaaggtgcgattgatgctgctaatattttgaagccagctcttgcaagaggtgaactgcagatcttaagagggctccgtgagagatatgaactccatcacaaactgcgatacacagatgatgctttaattgctgctgcacagctgtcttatcagtatatcagtgatcgtttcctgcctgacaaggccattgacttgattgatgaagctggatcccgtgttaggctgaggcatgcccagctccctgatgaagccaaagagctggacaaagagctgcgacagataaccaagcagaaaaacgaggctgtacgcggccaggattttgagaaggctggtgaattaagggaccgagaaatggaactgaaggctcaaattacggccattattgacaagagcaaggaaatgattaaagcagagactgaatctggtgatgtcggtcctcttgttactgaggcagatattcaacatattgtctcctcttggactggaattcctgtggagaaagtgtcgtctgatgagtctgaccgtctcctaaagatggaagagacactgcatacacgtatcattggccaggacgaggctgtcaaagctattagccgtgctatccgccgtgctcgtgttggcctgaagaatccaaataggccaattgccagcttcatattctctggaccaactggagttggcaaatcagagctagcaaaggctctggcagcctactactttggctcagaggaggctatgattaggcttgacatgagtgagttcatggagagacatactgtctccaagcttattggatcacctccaggttatgttgggtacactgagggaggccaactaactgaagcagtccgtcgccgcccatacacagttgttctctttgatgagattgagaaggcacatcctgatgttttcaacatgatgcttcagatattagaagatgggcgattaactgatagcaaggggcgcacagttgacttcaaaaacacactattgatcatgacatctaatgtgggaagcagtgtcattgagaaaggaggccgcaagatcgggtttgaccttgactatgatgagaaagacaccagctataacaggatcaagagcctggtgaccgaggagttgaagcagtatttccggccagagttcttgaacagattggatgagatgattgtattccggcagctgactaaattggaggtgaaggagattgctgacattatgctgaaagaagtgtttgacaggctgaaggccaaggagattaatctccaggtcacggagaagttccgagatagagttgttgacgaaggttataacccgagctatggtgccagacctttgcggcgtgctatcatgaggcttctggaggatagtctggcagagaagatgctggctggtgaggtgaaagaaggtgactctgccatcgttgatgtggattcagatggcaaggtgatagtcctgaatggtggtagcggtgttgctgagccactggaacctgctctcagtacctaaccgaggtcaaaatcatcattggtccgaaatatggccttctttacaagtcagctgggtttctcgtgatggtaaaaactagactgacattacttggccgcccattagttgctttatctttcgtttattttcttttttgttggaagtgaggcagtagggttgctatggaaatgaatagatggagaagcatttagcagacatataatatatgctagacttttgagttgccttgttttgggaagaaacttggaattttcagtttgatgcacttgtattattattaggccttggtagcaacaagatacggatgtcgtctctacgtttgctgttgtacttcagtgtaacttgcctcccgaatgtatgagtattatttatcaagtcccaaataacagtgacggattgctacattctgttttttttgtttgtggatctgaaaattggaattcttagcttatc

SEQ ID NO: 17014 - DNA, 3310 bp, Zea Mays
tttccttatcttctgacttctccattcccaattcccactaccgcggcaggcagctaccccctccctctcgtctcctccgccacctcttctcgcgtctagggtgcgcccgcctcgctggcgtagggtcgggacggttctgccggtgcgagctccacgacccctctgcgggagacgaaacaaaggcgtgggcttggtagatacaggtctgggattgccttttcctagttcaacatggagggcgctcttgttcagtctgctattgttccagccgtttacagaagcagctcaggtcggttccgtgtgcgtgcaagggccagaacaaatgctacaatggtgcggaatacgccaacaaggactcttactcttggtggcttccaagggctgcgtcagacaaactttttggatacgaggtctgtaattaagcgtgactttggatcaatcgtggcaagccagattgcaaggccacgcgggtcagcctcaagaggggtggtccgtgccatgtttgagcgcttcactgagaaagcaatcaaggtgattatgcttgcacaggaagaggcaaggcgcctgggacacaacttcgttgggacagaacagattttgctggggcttattggtgagggcacaggaattgcagcgaaggttatgaagtctatgggaatcaatcttaaggatgcccgagtggaagtcgaaaagataattggacgtggcagtgggtttgtggctgttgaaatcccattcacacctcgagcaaaacgtgtattggaattgtcccttgaagaagctcgtcagcttgggcataattatataggatctgaacacttactccttgggctacttcgtgagggtgaaggtgttgctgctcgtgtgcttgaaagccttggtgctgatccaaacaacatccgtacccaggtcataagaatggttggggaaagcacagaagctgttggggctggagttggtggaggaagcagtggccagaagatgcccacacttgaagaatacggtactaatttgacgaaattagcggaagagggcaaattggacccagttgttggtagacaggatcagattgagcgcgttacccagattttaggcaggaggacaaagaacaacccctgcttaattggagagcctggtgttggaaagactgctattgctgaggggcttgctcaacgtatttccaatggtgatgttcccgaaacaattgaaggaaagaaggttattactcttgacatgggcctccttgttgctggaaccaaataccgtggagagtttgaagagagattaaagaaacttatggaggaaattaagcaaaatgaagatattattctctttattgatgaagtgcacacactgattggagcaggtgcagcagaaggtgcgattgatgctgctaatattttgaagccagctcttgcaagaggtgaactgcagtgcattggtgccacaacactggatgagtataggaagcatatagagaaagatcctgccttggaaagaaggtttcaaccatgatcgtttcctgcctgacaaggccattgacttgattgatgaagctggatcccgtgttaggctgaggcatgcccagctccctgatgaagccaaagagctggacaaagagctgcgacagataaccaagcagaaaaacgaggctgtacgcggccaggattttgagaaggctggtgaattaagggaccgagaaatggaactgaaggctcaaattacggccattattgacaagagcaaggaaatgattaaagcagagactgaatctggtgatgtcggtcctcttgttactgaggcagatattcaacatattgtctcctcttggactggaattcctgtggagaaagtgtcgtctgatgagtctgaccgtctcctaaagatggaagagacactgcatacacgtatcattggccaggacgaggctgtcaaagctattagccgtgctatccgccgtgctcgtgttggcctgaagaatccaaataggccaattgccagcttcatattctctggaccaactggagttggcaaatcagagctagcaaaggctctggcagcctactactttggctcagaggaggctatgattaggcttgacatgagtgagttcatggagagacatactgtctccaagcttattggatcacctccaggttatgttgggtacactgagggaggccaactaactgaagcagtccgtcgccgcccatacacagttgttctctttgatgagattgagaaggcacatcctgatgttttcaacatgatgcttcagatattagaagatgggcgattaactgatagcaaggggcgcacagttgacttcaaaaacacactattgatcatgacatctaatgtgggaagcagtgtcattgagaaaggaggccgcaagatcgggtttgaccttgactatgatgagaaagacaccagctataacaggatcaagagcctggtgaccgaggagttgaagcagtatttccggccagagttcttgaacagattggatgagatgattgtattccggcagctgactaaattggaggtgaaggagattgctgacattatgctgaaagaagtgtttgacaggctgaaggccaaggagattaatctccaggtcacggagaagttccgagatagagttgttgacgaaggttataacccgagctatggtgccagacctttgcggcgtgctatcatgaggcttctggaggatagtctggcagagaagatgctggctggtgaggtgaaagaaggtgactctgccatcgttgatgtggattcagatggcaaggtgatagtcctgaatggtggtagcggtgttgctgagccactggaacctgctctcagtacctaaccgaggtcaaaatcatcattggtccgaaatatggccttctttacaagtcagctgggtttctcgtgatggtaaaaactagactgacattacttggccgcccattagttgctttatctttcgtttattttcttttttgttggaagtgaggcagtagggttgctatggaaatgaatagatggagaagcatttagcagacatataatatatgctagacttttgagttgccttgttttgggaagaaacttggaattttcagtttgatgcacttgtattattattaggccttggtagcaacaagatacggatgtcgtctctacgtttgctgttgtacttcagtgtaacttgcctcccgaatgtatgagtattatttatcaagtcccaaataacagtgacggattgctacattctgttttttttgtttgtggatctgaaaattggaattcttagcttatc

SEQ ID NO: 17015 - DNA, 1488 bp, Zea Mays
atgacgttggcgcagatgtccgggcactttgctcagctgttgggactctcgctcggcaagctttggcgtgagaagacaagaagacaacaaagcaggacggcatggatcggttggtcatacctgagccgtgaacgaggtgatggttcgagtggagcccaggaggcaggcgaggggggagctgatgctgaggaatgtgatgcacaccatgtcggtggcattcaggctgtagccattgcccagtggaagcaggtgttcgtggacaggagaatcagggcgagcttcgtgggaacatccatggccgcgtggcttgttgaggtcggcacggtcgaggcgctcaatgagcccgagtggcatgctgtggacgccacgaacgagtctggccacacactgttcgacctagccgccagtctgggccgtgccgacatcgttcaggtgctacttgagtacggtgtcgatgctaacaaaccgagtcatagtcggacacccctcgagaccgccaccgcctctggcgagtgcctcatcgttcagctcctcgccaacggcgcgatgcccgtcggctccaacgccatccacgtggccactgccgccagccacaatgacatcatgaagctacttcttggcaagcccgcctctgcttctcccgcctcgtccacatctgcgtcctttttgtcttctttaacatgtatcgacgtggcaaggagggacgacaagactcctctacgggtagaggcggaggcggggcagcaagacacagtcaaggcgcttctaacggggggtgcgagggccaacgcaaggtgcggcacgacggtgccaccgcactccacgtcgtggcgtggcacgacaacgaggcggtcgcgggtctcgtatcgcacggtgtggccagcacggccatggtgcgcgacatggctaggaagactgagaccgcattcgagatcaccgccgaggagggccatggcgatcgtatccttgaaagggaaatgtgcccttgggccatttctagttgttttggtgattaaatgctcaacacaccaccttgagctaactccatttatatgagcatgagcacaggtttagaaaaggcaaattgaagacaccaattccaaatgagttgaattggagggccaaaagtgcaactttgagcaaaccaacataaacatgaggtttaagtgtttggataagttacacataccctactatatatttctagcactttgttttggctactaactcagttttgcaagaaaagtgctttttaggcttggttgaggtatattacaaatcctagaggaaatgagtgaaaaaggtatggtcccaacacttagtcaattgttttatgtgctaactatgtttgtctaagtgctagggaacctctcaagaagagtcaaaagaagttggaggccagtctgggacccaccggactgtccagtgccgcgtacggacgaactcgctggtctcgggaattttaattataaaattcaccggacagtg

SEQ ID NO: 17016 - DNA, 1151 bp, Zea Mays
cttctccatatatttgctgattctttcatttgattcaatgtgttaaggattcagataatttagtggatgtggcactgactataatcagaaatgaaatatcttcagttcctatctttaagtgcatggcagattcatcaggggtgcctttccttaatcttgcaaccttacaggggatcttgaaatttctttgctcgaagctacaagaagaggctgagggctgttcccttctgcacaatcagcttctcagtattcctattggtacatggtctccacatacggggaggtcaagtagcaggcaactcagaactttgctactgagttctcctctaaatacctgcctggatattctgcttcaagatagagtaagctcaattcctatagttgatgacaatggatccctccgtgatgtctactcactcagtgatatcatggctctggcgaagaatgatgtttatgctcgcatcgaacttgaacaagtgaccgtacaaaatgctttggatgtgcaataccaggtgcatggccgaagacagtgtcatacttgtttacagacgagtaccttgctggaagttttggagggattgtccattccaggagtgcgacggcttgttgttattgaacaaagtaccagatttgtggaaggaatcatctcattgagagacgtatttacatttctccttggatagcatgtgtagccattccatacatgaaaaagcttgctgtacttggttcaaacgaaataaaaagcttacaaatgtgatagtcatcttcttgtttccatcttgttttggttgatattatgcctcagacactgcatatttaaactgtgccgaaaaaaaaagaacagtggcaggtgctgcagcccttctaagcagaagtatgcagaagtgttcaggtgattgtttcttgcactcgtccagctaacatttcacgatttgcaggtttgaagaactgctacttgcaagttaggaatgcttcacgaatcacgatatttttaagaggccgagatttctgtttttttaaaacatcgatacaggctacagaatcagtttcgtaccgtctttgaaactagggaattttgaaggaactgaatcttgtggcttttttattttttttggaatgaggtgaaatgacctcttcaaattcgaacatct

SEQ ID NO: 17017 - DNA, 1374 bp, Zea Mays
gttttggacactcagcttcctgttaaacaagcatttaaaataatgcatgatgagggtcttgctctggttcctctttgggatgaccgtcagggaaccataacaggcatgctcactgcatcagattttgttttaatcttgagaaagttgcagagaaacattcaagttattggcaacgaagagcccatttctgcttggaaagaagcaaagctacagttctatggtgggcctgatggtgctgccatgcagagaaggccattaatccatgttaaggattcagataatttagtggatgtggcactgactataatcagaaatgaaatatcttcagttcctatctttaagtgcatggcagattcatcaggggtgcctttccttaatcttgcaaccttacaggggatcttgaaatttctttgctcgaagctacaagaagaggctgagggctgttcccttctgcacaatcagcttctcagtattcctattggtacatggtctccacatacggggaggtcaagtagcaggcaactcagaactttgctactgagttctcctctaaatacctgcctggatattctgcttcaagatagagtaagctcaattcctatagttgatgacaatggatccctccgtgatgtctactcactcagtgatatcatggctctggcgaagaatgatgtttatgctcgcatcgaacttgaacaagtgaccgtacaaaatgctttggatgtgcaataccaggtgcatggccgaagacagtgtcatacttgtttacagacgagtaccttgctggaagttttggagggattgtccattccaggagtgcgacggcttgttgttattgaacaaagtaccagatttgtggaaggaatcatctcattgagagacgtatttacatttctccttggatagcatgtgtagccattccatacatgaaaaagcttgctgtacttggttcaaacgaaataaaaagcttacaaatgtgatagtcatcttcttgtttccatcttgttttggttgatattatgcctcagacactgcatatttaaactgtgccgaaaaaaaaagaacagtggcaggtgctgcagcccttctaagcagaagtatgcagaagtgttcaggtgattgtttcttgcactcgtccagctaacatttcacgatttgcaggtttgaagaactgctacttgcaagttaggaatgcttcacgaatcacgatatttttaagaggccgagatttctgtttttttaaaacatcgatacaggctacagaatcagtttcgtaccgtctttgaaactagggaattttgaaggaactgaatcttgtggcttttttattttttttggaatgaggtgaaatgacctcttcaaattcgaacatct

SEQ ID NO: 17018 - DNA, 1687 bp, Zea Mays
tttttcatctatcaatgtaattcttggacataacattgcgcacaggtgtgatgagacaaaaccctttgtacgtgatgaatatggactgatcagcaatgaagtgcttgtggaaaacaatgtacaacctgttgtgcagccagagccttctatcagaggaactaatatggataagggtaccattttgaaaacaatgcccccggagccatcatctcagaacccaagcatgcaaatagcagttatccgccatgtggtctctggaatattattacacaataccatatatgacgttgttcccctttctagcaagttaacagttttggacactcagcttcctgttaaacaagcatttaaaataatgcatgatgagggtcttgctctggttcctctttgggatgaccgtcagggaaccataacaggcatgctcactgcatcagattttgttttaatcttgagaaagttgcagagaaacattcaagttattggcaacgaagagcccatttctgcttggaaagaagcaaagctacagttctatggtgggcctgatggtgctgccatgcagagaaggccattaatccatgttaaggattcagataatttagtggatgtggcactgactataatcagaaatgaaatatcttcagttcctatctttaagtgcatggcagattcatcaggggtgcctttccttaatcttgcaaccttacaggggatcttgaaatttctttgctcgaagctacaagaagaggctgagggctgttcccttctgcacaatcagcttctcagtattcctattggtacatggtctccacatacggggaggtcaagtagcaggcaactcagaactttgctactgagttctcctctaaatacctgcctggatattctgcttcaagatagagtaagctcaattcctatagttgatgacaatggatccctccgtgatgtctactcactcagtgatatcatggctctggcgaagaatgatgtttatgctcgcatcgaacttgaacaagtgaccgtacaaaatgctttggatgtgcaataccaggtgcatggccgaagacagtgtcatacttgtttacagacgagtaccttgctggaagttttggagggattgtccattccaggagtgcgacggcttgttgttattgaacaaagtaccagatttgtggaaggaatcatctcattgagagacgtatttacatttctccttggatagcatgtgtagccattccatacatgaaaaagcttgctgtacttggttcaaacgaaataaaaagcttacaaatgtgatagtcatcttcttgtttccatcttgttttggttgatattatgcctcagacactgcatatttaaactgtgccgaaaaaaaaagaacagtggcaggtgctgcagcccttctaagcagaagtatgcagaagtgttcaggtgattgtttcttgcactcgtccagctaacatttcacgatttgcaggtttgaagaactgctacttgcaagttaggaatgcttcacgaatcacgatatttttaagaggccgagatttctgtttttttaaaacatcgatacaggctacagaatcagtttcgtaccgtctttgaaactagggaattttgaaggaactgaatcttgtggcttttttattttttttggaatgaggtgaaatgacctcttcaaattcgaacatct

SEQ ID NO: 17019 - DNA, 1770 bp, Zea Mays
gaaacatgatatatttgacatattcacgatggatttgtgtatttgatgtgtcgctttttcatctatcaatgtaattcttggacataacattgcgcacagtaccggtttttggttgatggtgtctggaggtgtgatgagacaaaaccctttgtacgtgatgaatatggactgatcagcaatgaagtgcttgtggaaaacaatgtacaacctgttgtgcagccagagccttctatcagaggaactaatatggataagggtaccattttgaaaacaatgcccccggagccatcatctcagaacccaagcatgcaaatagcagttatccgccatgtggtctctggaatattattacacaataccatatatgacgttgttcccctttctagcaagttaacagttttggacactcagcttcctgttaaacaagcatttaaaataatgcatgatgagggtcttgctctggttcctctttgggatgaccgtcagggaaccataacaggcatgctcactgcatcagattttgttttaatcttgagaaagttgcagagaaacattcaagttattggcaacgaagagcccatttctgcttggaaagaagcaaagctacagttctatggtgggcctgatggtgctgccatgcagagaaggccattaatccatgttaaggattcagataatttagtggatgtggcactgactataatcagaaatgaaatatcttcagttcctatctttaagtgcatggcagattcatcaggggtgcctttccttaatcttgcaaccttacaggggatcttgaaatttctttgctcgaagctacaagaagaggctgagggctgttcccttctgcacaatcagcttctcagtattcctattggtacatggtctccacatacggggaggtcaagtagcaggcaactcagaactttgctactgagttctcctctaaatacctgcctggatattctgcttcaagatagagtaagctcaattcctatagttgatgacaatggatccctccgtgatgtctactcactcagtgatatcatggctctggcgaagaatgatgtttatgctcgcatcgaacttgaacaagtgaccgtacaaaatgctttggatgtgcaataccaggtgcatggccgaagacagtgtcatacttgtttacagacgagtaccttgctggaagttttggagggattgtccattccaggagtgcgacggcttgttgttattgaacaaagtaccagatttgtggaaggaatcatctcattgagagacgtatttacatttctccttggatagcatgtgtagccattccatacatgaaaaagcttgctgtacttggttcaaacgaaataaaaagcttacaaatgtgatagtcatcttcttgtttccatcttgttttggttgatattatgcctcagacactgcatatttaaactgtgccgaaaaaaaaagaacagtggcaggtgctgcagcccttctaagcagaagtatgcagaagtgttcaggtgattgtttcttgcactcgtccagctaacatttcacgatttgcaggtttgaagaactgctacttgcaagttaggaatgcttcacgaatcacgatatttttaagaggccgagatttctgtttttttaaaacatcgatacaggctacagaatcagtttcgtaccgtctttgaaactagggaattttgaaggaactgaatcttgtggcttttttattttttttggaatgaggtgaaatgacctcttcaaattcgaacatct

SEQ ID NO: 17020 - DNA, 2133 bp, Zea Mays
gtttgtatcctataatggcagacctagcataggtgttggaggacagcccacatcccactgtctctttcgtttccgacaagatgttttggccgttacataatgcctgtaaggtagaatgccattgcagttgttgcatcagaaagcagccatttaacgccattgtaaagtgagtgatgattaaatacagccacacttctgtctctcaggtttctgtacatggagtttttattgcacctcttcttccccagcaattagtacttgcagttagattaaatgaatcctgaatgccccttaactgttggctttacatggaactacttttgcatataccagacaactattttgaacttcaatatgtttttcaattccagcaattgatcgaaacatgatatatttgacatattcacgatggatttgtgtatttgatgtgtcgctttttcatctatcaatgtaattcttggacataacattgcgcacagtaccggtttttggttgatggtgtctggaggtgtgatgagacaaaaccctttgtacgtgatgaatatggactgatcagcaatgaagtgcttgtggaaaacaatgtacaacctgttgtgcagccagagccttctatcagaggaactaatatggataaggatgcccccggagccatcatctcagaacccaagcatgcaaatagcagttatccgccatgtggtctctggaatattattacacaataccatatatgacgttgttcccctttctagcaagttaacagttttggacactcagcttcctgttaaacaagcatttaaaataatgcatgatgagggtcttgctctggttcctctttgggatgaccgtcagggaaccataacaggcatgctcactgcatcagattttgttttaatcttgagaaagttgcagagaaacattcaagttattggcaacgaagagcccatttctgcttggaaagaagcaaagctacagttctatggtgggcctgatggtgctgccatgcagagaaggccattaatccatgttaaggattcagataatttagtggatgtggcactgactataatcagaaatgaaatatcttcagttcctatctttaagtgcatggcagattcatcaggggtgcctttccttaatcttgcaaccttacaggggatcttgaaatttctttgctcgaagctacaagaagaggctgagggctgttcccttctgcacaatcagcttctcagtattcctattggtacatggtctccacatacggggaggtcaagtagcaggcaactcagaactttgctactgagttctcctctaaatacctgcctggatattctgcttcaagatagagtaagctcaattcctatagttgatgacaatggatccctccgtgatgtctactcactcagtgatatcatggctctggcgaagaatgatgtttatgctcgcatcgaacttgaacaagtgaccgtacaaaatgctttggatgtgcaataccaggtgcatggccgaagacagtgtcatacttgtttacagacgagtaccttgctggaagttttggagggattgtccattccaggagtgcgacggcttgttgttattgaacaaagtaccagatttgtggaaggaatcatctcattgagagacgtatttacatttctccttggatagcatgtgtagccattccatacatgaaaaagcttgctgtacttggttcaaacgaaataaaaagcttacaaatgtgatagtcatcttcttgtttccatcttgttttggttgatattatgcctcagacactgcatatttaaactgtgccgaaaaaaaaagaacagtggcaggtgctgcagcccttctaagcagaagtatgcagaagtgttcaggtgattgtttcttgcactcgtccagctaacatttcacgatttgcaggtttgaagaactgctacttgcaagttaggaatgcttcacgaatcacgatatttttaagaggccgagatttctgtttttttaaaacatcgatacaggctacagaatcagtttcgtaccgtctttgaaactagggaattttgaaggaactgaatcttgtggcttttttattttttttggaatgaggtgaaatgacctcttcaaattcgaacatct

SEQ ID NO: 17021 - DNA, 2450 bp, Zea Mays
agtttgtatcctataatggcagacctagcataggtgttggaggacagcccacatcccactgtctctttcgtttccgacaagatgttttggccgttacataatgcctgtaaggtagaatgccattgcagttgttgcatcagaaagcagccatttaacgccattgtaaagtgagtgatgattaaatacagccacacttctgtctctcaggtttctgtacatggagtttttattgcacctcttcttccccagcaattagtacttgcagttagattaaatgaatcctgaatgccccttaactgttggctttacatggaactacttttgcatataccagacaactattttgaacttcaatatgtttttcaattccagcaattgatcgaaacatgatatatttgacatattcacgatggatttgtgtatttgatgtgtcgctttttcatctatcaatgtaattcttggacataacattgcgcacagtaccggtttttggttgatggtgtctggaggtgtgatgagacaaaaccctttgtacgtgatgaatatggactgatcagcaatgaagtgcttgtggaaaacaatgtacaacctgttgtgcagccagagccttctatcagaggaactaatatggataagggtaccattttgaaaacaatgcccccggagccatcatctcagaacccaagcatgcaaatagcagttatccgccatgtggtctctggaatattattacacaataccatatatgacgttgttcccctttctagcaagttaacagttttggacactcagcttcctgttaaacaagcatttaaaataatgcatgatgaggtatgtatgttactgtgcttgctagagttgcttcaaatagttcactttccctctatggtgcttgtttgctctcatttcaactttgctctgtttttaatttcattttgaagaatttttaaaggtgtgctagcaattatttgcctttttaagtagcagtttaatttgttttcctattatgttttgcagtttaaaaacacaacaaaatcgctcctagaagcaggcacttctttcatctgcactgcatacgtggcatcagtttaataatttaagaatagcttcaaaccttttgtgtctcatagggtcttgctctggttcctctttgggatgaccgtcagggaaccataacaggcatgctcactgcatcagattttgttttaatcttgagaaagttgcagagaaacattcaagttattggcaacgaagagcccatttctgcttggaaagaagcaaagctacagttctatggtgggcctgatggtgctgccatgcagagaaggccattaatccatgttaaggattcagataatttagtggatgtggcactgactataatcagaaatgaaatatcttcagttcctatctttaagtgcatggcagattcatcaggggtgcctttccttaatcttgcaaccttacaggggatcttgaaatttctttgctcgaagctacaagaagaggctgagggctgttcccttctgcacaatcagcttctcagtattcctattggtacatggtctccacatacggggaggtcaagtagcaggcaactcagaactttgctactgagttctcctctaaatacctgcctggatattctgcttcaagatagagtaagctcaattcctatagttgatgacaatggatccctccgtgatgtctactcactcagtgatatcatggctctggcgaagaatgatgtttatgctcgcatcgaacttgaacaagtgaccgtacaaaatgctttggatgtgcaataccaggtgcatggccgaagacagtgtcatacttgtttacagacgagtaccttgctggaagttttggagggattgtccattccaggagtgcgacggcttgttgttattgaacaaagtaccagatttgtggaaggaatcatctcattgagagacgtatttacatttctccttggatagcatgtgtagccattccatacatgaaaaagcttgctgtacttggttcaaacgaaataaaaagcttacaaatgtgatagtcatcttcttgtttccatcttgttttggttgatattatgcctcagacactgcatatttaaactgtgccgaaaaaaaaagaacagtggcaggtgctgcagcccttctaagcagaagtatgcagaagtgttcaggtgattgtttcttgcactcgtccagctaacatttcacgatttgcaggtttgaagaactgctacttgcaagttaggaatgcttcacgaatcacgatatttttaagaggccgagatttctgtttttttaaaacatcgatacaggctacagaatcagtttcgtaccgtctttgaaactagggaattttgaaggaactgaatcttgtggcttttttattttttttggaatgaggtgaaatgacctcttcaaattcgaacatct

SEQ ID NO: 17022 - DNA, 2216 bp, Zea Mays
ccaggtttctctctcctcactcctccttcgcttgtcgctccgcttcaccccagcagggcagagccccgctctcccttcacaccaaagatttcctcttccgcgtgcgcttccctttgccccgctctcccccagcctcgctcgccatataatacgggccggccggccggccagctgggtccccgcggatgggctcggtctcgcgaggctagggtttggtcggtcgtctcgccggcgtcgaggccgccagcgctgctagctagctctctcgcgttagggttccccgtagccatggtgctgcagcgcttctcgtggccgtacggcggccggagcgccaccttctgcggtagcttcaccgggtggagagagtgtcccatggggctggtcggggccgtgttccaggtcgtcttcgatctgccccccggagtttaccagtaccggtttttggttgatggtgtctggaggtgtgatgagacaaaaccctttgtacgtgatgaatatggactgatcagcaatgaagtgcttgtggaaaacaatgtacaacctgttgtgcagccagagccttctatcagaggaactaatatggataagggtaccattttgaaaacaatgcccccggagccatcatctcagaacccaagcatgcaaatagcagttatccgccatgtggtctctggaatattattacacaataccatatatgacgttgttcccctttctagcaagttaacagttttggacactcagcttcctgttaaacaagcatttaaaataatgcatgatgagtttaaaaacacaacaaaatcgctcctagaagcaggcacttctttcatctgcactgcatacgtggcatcagtttaataatttaagaatagcttcaaaccttttgtgtctcatagggtcttgctctggttcctctttgggatgaccgtcagggaaccataacaggcatgctcactgcatcagattttgttttaatcttgagaaagttgcagagaaacattcaagttattggcaacgaagagcccatttctgcttggaaagaagcaaagctacagttctatggtgggcctgatggtgctgccatgcagagaaggccattaatccatgttaaggattcagataatttagtggatgtggcactgactataatcagaaatgaaatatcttcagttcctatctttaagtgcatggcagattcatcaggggtgcctttccttaatcttgcaaccttacaggggatcttgaaatttctttgctcgaagctacaagaagaggctgagggctgttcccttctgcacaatcagcttctcagtattcctattggtacatggtctccacatacggggaggtcaagtagcaggcaactcagaactttgctactgagttctcctctaaatacctgcctggatattctgcttcaagatagagtaagctcaattcctatagttgatgacaatggatccctccgtgatgtctactcactcagtgatatcatggctctggcgaagaatgatgtttatgctcgcatcgaacttgaacaagtgaccgtacaaaatgctttggatgtgcaataccaggtgcatggccgaagacagtgtcatacttgtttacagacgagtaccttgctggaagttttggagggattgtccattccaggagtgcgacggcttgttgttattgaacaaagtaccagatttgtggaaggaatcatctcattgagagacgtatttacatttctccttggatagcatgtgtagccattccatacatgaaaaagcttgctgtacttggttcaaacgaaataaaaagcttacaaatgtgatagtcatcttcttgtttccatcttgttttggttgatattatgcctcagacactgcatatttaaactgtgccgaaaaaaaaagaacagtggcaggtgctgcagcccttctaagcagaagtatgcagaagtgttcaggtgattgtttcttgcactcgtccagctaacatttcacgatttgcaggtttgaagaactgctacttgcaagttaggaatgcttcacgaatcacgatatttttaagaggccgagatttctgtttttttaaaacatcgatacaggctacagaatcagtttcgtaccgtctttgaaactagggaattttgaaggaactgaatcttgtggcttttttattttttttggaatgaggtgaaatgacctcttcaaattcgaacatct

SEQ ID NO: 17023 - DNA, 2076 bp, Zea Mays
aagcaggcgcacacgcgctccaacacccaggtggagagagtgtcccatggggctggtcggggccgtgttccaggtcgtcttcgatctgccccccggagtttaccagtaccggtttttggttgatggtgtctggaggtgtgatgagacaaaaccctttgtacgtgatgaatatggactgatcagcaatgaagtgcttgtggaaaacaatgtacaacctgttgtgcagccagagccttctatcagaggaactaatatggataagggtaccattttgaaaacaatgcccccggagccatcatctcagaacccaagcatgcaaatagcagttatccgccatgtggtctctggaatattattacacaataccatatatgacgttgttcccctttctagcaagttaacagttttggacactcagcttcctgttaaacaagcatttaaaataatgcatgatgaggtatgtatgttactgtgcttgctagagttgcttcaaatagttcactttccctctatggtgcttgtttgctctcatttcaactttgctctgtttttaatttcattttgaagaatttttaaaggtgtgctagcaattatttgcctttttaagtagcagtttaatttgttttcctattatgttttgcagtttaaaaacacaacaaaatcgctcctagaagcaggcacttctttcatctgcactgcatacgtggcatcagtttaataatttaagaatagcttcaaaccttttgtgtctcatagggtcttgctctggttcctctttgggatgaccgtcagggaaccataacaggcatgctcactgcatcagattttgttttaatcttgagaaagttgcagagaaacattcaagttattggcaacgaagagcccatttctgcttggaaagaagcaaagctacagttctatggtgggcctgatggtgctgccatgcagagaaggccattaatccatgttaaggattcagataatttagtggatgtggcactgactataatcagaaatgaaatatcttcagttcctatctttaagtgcatggcagattcatcaggggtgcctttccttaatcttgcaaccttacaggggatcttgaaatttctttgctcgaagctacaagaagaggctgagggctgttcccttctgcacaatcagcttctcagtattcctattggtacatggtctccacatacggggaggtcaagtagcaggcaactcagaactttgctactgagttctcctctaaatacctgcctggatattctgcttcaagatagagtaagctcaattcctatagttgatgacaatggatccctccgtgatgtctactcactcagtgatatcatggctctggcgaagaatgatgtttatgctcgcatcgaacttgaacaagtgaccgtacaaaatgctttggatgtgcaataccaggtgcatggccgaagacagtgtcatacttgtttacagacgagtaccttgctggaagttttggagggattgtccattccaggagtgcgacggcttgttgttattgaacaaagtaccagatttgtggaaggaatcatctcattgagagacgtatttacatttctccttggatagcatgtgtagccattccatacatgaaaaagcttgctgtacttggttcaaacgaaataaaaagcttacaaatgtgatagtcatcttcttgtttccatcttgttttggttgatattatgcctcagacactgcatatttaaactgtgccgaaaaaaaaagaacagtggcaggtgctgcagcccttctaagcagaagtatgcagaagtgttcaggtgattgtttcttgcactcgtccagctaacatttcacgatttgcaggtttgaagaactgctacttgcaagttaggaatgcttcacgaatcacgatatttttaagaggccgagatttctgtttttttaaaacatcgatacaggctacagaatcagtttcgtaccgtctttgaaactagggaattttgaaggaactgaatcttgtggcttttttattttttttggaatgaggtgaaatgacctcttcaaattcgaacatct

SEQ ID NO: 17024 - DNA, 1806 bp, Zea Mays
aaaccaacaaaacaaggcggggacggcgtaagcaggcgcacacgcgctccaacacccaggtggagagagtgtcccatggggctggtcggggccgtgttccaggtcgtcttcgatctgccccccggagtttaccagtaccggtttttggttgatggtgtctggaggtgtgatgagacaaaaccctttgtacgtgatgaatatggactgatcagcaatgaagtgcttgtggaaaacaatgtacaacctgttgtgcagccagagccttctatcagaggaactaatatggataagggtaccattttgaaaacaatgcccccggagccatcatctcagaacccaagcatgcaaatagcagttatccgccatgtggtctctggaatattattacacaataccatatatgacgttgttcccctttctagcaagttaacagttttggacactcagcttcctgttaaacaagcatttaaaataatgcatgatgagggtcttgctctggttcctctttgggatgaccgtcagggaaccataacaggcatgctcactgcatcagattttgttttaatcttgagaaagttgcagagaaacattcaagttattggcaacgaagagcccatttctgcttggaaagaagcaaagctacagttctatggtgggcctgatggtgctgccatgcagagaaggccattaatccatgttaaggattcagataatttagtggatgtggcactgactataatcagaaatgaaatatcttcagttcctatctttaagtgcatggcagattcatcaggggtgcctttccttaatcttgcaaccttacaggggatcttgaaatttctttgctcgaagctacaagaagaggctgagggctgttcccttctgcacaatcagcttctcagtattcctattggtacatggtctccacatacggggaggtcaagtagcaggcaactcagaactttgctactgagttctcctctaaatacctgcctggatattctgcttcaagatagagtaagctcaattcctatagttgatgacaatggatccctccgtgatgtctactcactcagtgatatcatggctctggcgaagaatgatgtttatgctcgcatcgaacttgaacaagtgaccgtacaaaatgctttggatgtgcaataccaggtgcatggccgaagacagtgtcatacttgtttacagacgagtaccttgctggaagttttggagggattgtccattccaggagtgcgacggcttgttgttattgaacaaagtaccagatttgtggaaggaatcatctcattgagagacgtatttacatttctccttggatagcatgtgtagccattccatacatgaaaaagcttgctgtacttggttcaaacgaaataaaaagcttacaaatgtgatagtcatcttcttgtttccatcttgttttggttgatattatgcctcagacactgcatatttaaactgtgccgaaaaaaaaagaacagtggcaggtgctgcagcccttctaagcagaagtatgcagaagtgttcaggtgattgtttcttgcactcgtccagctaacatttcacgatttgcaggtttgaagaactgctacttgcaagttaggaatgcttcacgaatcacgatatttttaagaggccgagatttctgtttttttaaaacatcgatacaggctacagaatcagtttcgtaccgtctttgaaactagggaattttgaaggaactgaatcttgtggcttttttattttttttggaatgaggtgaaatgacctcttcaaattcgaacatct

SEQ ID NO: 17025 - DNA, 947 bp, Zea Mays
atgtaattcttggacataacattgcgcacagtaccggtttttggttgatggtgtctggaggtgtgatgagacaaaaccctttgtacgtgatgaatatggactgatcagcaatgaagtgcttgtggaaaacaatgtacaacctgttgtgcagccagagccttctatcagaggaactaatatggataaggggtcttgctctggttcctctttgggatgaccgtcagggaaccataacaggcatgctcactgcatcagattttgttttaatcttgagaaaggtgggtggaataaattactttgtttcttcttggaaggattttatgttcttactaattatcatttgctatgcagttgcagagaaacattcaagttattggcaacgaagagcccatttctgcttggaaagaagcaaagctacagttctatggtgggcctgatggtgctgccatgcagagaaggccattaatccatgttaaggattcagataatttagtggatgtggcactgactataatcagaaatgaaatatcttcagttcctatctttaagtgcatggcagattcatcaggggtgcctttccttaatcttgcaaccttacaggggatcttgaaatttctttgctcgaagctacaagaagaggctgagggctgttcccttctgcacaatcagcttctcagtattcctattggtacatggtctccacatacggggaggtcaagtagcaggcaactcagaactttgctactgagttctcctctaaatacctgcctggatattctgcttcaagatagagtaagctcaattcctatagttgatgacaatggatccctccgtgatgtctactcactcagtgatatcatggctctggcgaagaatgatgtttatgctcgcatcgaacttgaacaagtgaccgtacaaaatcaattcctctgcttttgattttgatg

SEQ ID NO: 17026 - DNA, 3166 bp, Zea Mays
acggcccatctggccatccggttagcaagaccaacaaatgcacactgatacgttcccttcgaacccacctcccatggccaccgtcgactgccccctgccctctcccgcggacctcgacgacaacggattcccggctctaccctcctcccccgctgcctgtagcagcggcttcgcggaggacttctaccgcagcggcaccgactggtcctccttacgcgcccctccgccgctggggccgcccagaagggcacccggtgtgaaggagagaggaggcggctcggccgtgcagagcagcctcttccaggcgtgggggatcgagaagccgcggcgggacgggcgtggggctggggattcatcgcttgtgcagaggagcctcttccaggcatgggggatcgagagaccgcagagggagggtctcggggctggagattcctccccctcctcctccctttccggttctttgttggcaaggaagcggaggcgaggaagcaccgaggaggagcgggtggcggccaagaagcccctcgcgtgccccttctacaagaagattcctggcacaccattcacggtggatgcatttcggtatggacaagttgaggggtgctcggcctatttccttagccactttcatcatgaccattacggtggattaaccaagaaatggtgccatggccccatctattgttctgcactcactgcacgcctagtgaagatgtgcttgtcagtaaattccgactatatctgtcctttggagcttgataccgagtatgtcatagagggagtgacagttaccttgctggaggccaaccattgccctggtgcagctctaatccacttccgactaagtgatggaaagacctgtctccacactggggattttagagcatcaaaaactatgcaatcgcatccacttctccagagaggccgagtaaatttggtttacctggacacaacatattgcaatcccaagtacaagttcccaccccaggaggatgttattgattttgttgtgagaaccactcgaagatatctaaagaaacaaccaaaaaccctcattgttgttggggcatatagcattgggaaagagaatgtgtatctagcaatttcccaagctttagaggcccatatatacactgatgcatcgagaaggcggattctctactcatttggctggccagatttgtccaaaaggctatgttcatgcaatcaaagttcatcacttcatgttctgccccttggatctataaatcatgagaacttgaagaagtacttggagactcttaatggaagattcctagctgtgctggcttttcggcctacaggttggactttctctgaggcaactggaaagcatcttgacctaataaaaccaagctctaatgccaatgtaacaatctatggtgtgccttatagcgagcattcaagtttcactgagcttagggattttgtgatgtttctgaaacctcaaaagataattcctactgttaatgttggcaatgccacaagccgagataaaatgcaagcacatttccgggaatggctgaagagcccgtgataaatatatcctgatcatgtttttttttctatatcggcgtcaactcgactccactcaatgagtgacacagtcatggtacggaaaagaagtggatatatttttaaaggttggtttgcttggtactaaaaatgctatgtttagagtaccacttttcccaacattattccgagattcgttttgtggaacttatctcatttgagaggtaaatgtgttgtttctcgcttgtctggcatttctttgcaagggaactgtaagatgaagaaatattgatttgaattactgtttatcaaaacccattatcagcaacacatttgttgtctccccatgttcaatcgaaatacaagatttcactggctagagcagtgggatttcctagttgcgattgggagtcggtatgctgccttcagaaatatgtggaagaaagtggtacacgacccagcttctgaattctaattagacgataaggtctatagcctaacacctgctgggctgctagtgtcacagcttctattggcaacataagcacaaatttcggctactgtaacgattaaactatttgctcttattcatcccaaatgatttttctacaaggtggtagagtcatgaaatgacgaatggtaaatagtgcatatgttgggtgagatttccgctgctcacaagaataagcttaatgctattgcattaccatcatagttatgggcaatcatctaaatattaccatcattatctaaaaaaatctaaatattaccatagcctgctaagcctagaaaatatttggttagtcccacatctaagtatcctcaaaatgccttgctgttgctgatcaacaggaaccatgttaaaccttccatacctcggtactgtactaggtctcatgcagtagcccatggtggatttgtatgcacgtgtctgatcattggcgttatttggcagtctccatgccagtactaccttcgtgatgttagctcacatacatgtatgggatggatagcttgatctgctcccattgtagggggcgatgctaaaggtaaaacacaatcgatagcttgatctactcgctgatgaaattcacgtgggctaggtggatcaaacacaatcggctgattaagggaggacgacgatagaagaatttagtggatgcgcgatgacgatgatgcaaacgttcagacaggggatcgggaattttctgttgtagcattcgtgcaaaccgtcgtgaatccagtcaatacagcacgtgtacaaatatcaaagctgcaggtttcactgtgcagtgcgcaccgctgtgacagacttctaatattgtaactcaaatattaaaacttgaactcatgatgtaccaccaataagggagttgccccccagcaaatgcgacaactgaataggatctattggcttaacaaggacatagcccctgctgagatcgatttcatagataccatgtggaaggaataaaattgaataatttacattgaatcttgaatctctcgatatacataaactttatatgacttcaggccaagttgatacataggattgtaacttgaggcccagcataatccctatatctcgtatgttatccctactttgagtagttggtctttcggaatggag

SEQ ID NO: 17027 - DNA, 2521 bp, Zea Mays
acggcccatctggccatccggttagcaagaccaacaaatgcacactgatacgttcccttcgaacccacctcccatggccaccgtcgactgccccctgccctctcccgcggacctcgacgacaacggattcccggctctaccctcctcccccgctgcctgtagcagcggcttcgcggaggacttctaccgcagcggcaccgactggtcctccttacgcgcccctccgccgctggggccgcccagaagggcacccggtgtgaaggagagaggaggcggctcggccgtgcagagcagcctcttccaggcgtgggggatcgagaagccgcggcgggacgggcgtggggctggggattcatcgcttgtgcagaggagcctcttccaggcatgggggatcgagagaccgcagagggagggtctcggggctggagattcctccccctcctcctccctttccggttctttgttggcaaggaagcggaggcgaggaagcaccgaggaggagcgggtggcggccaagaagcccctcgcgtgccccttctacaagaagattcctggcacaccattcacggtggatgcatttcggtatggacaagttgaggggtgctcggcctatttccttagccactttcatcatgaccattacggtggattaaccaagaaatggtgccatggccccatctattgttctgcactcactgcacgcctagtgaagatgtgcttgtcagtaaattccgaagggagtgacagttaccttgctggaggccaaccattgccctggtgcagctctaatccacttccgactaagtgatggaaagacctgtctccacactggggattttagagcatcaaaaactatgcaatcgcatccacttctccagagaggccgagtaaatttggtttacctggacacaacatattgcaatcccaagtacaagttcccaccccaggaggatgttattgattttgttgtgagaaccactcgaagatatctaaagaaacaaccaaaaaccctcattgttgttggggcatatagcattgggaaagagaatgtgtatctagcaatttcccaagctttagaggcccatatatacactgatgcatcgagaaggcggattctctactcatttggctggccagatttgtccaaaaggctatgttcatgcaatcaaagttcatcacttcatgttctgccccttggatctataaatcatgagaacttgaagaagtacttggagactcttaatggaagattcctagctgtgctggcttttcggcctacaggtgtgccttatagcgagcattcaagtttcactgagcttagggattttgtgatgtttctgaaacctcaaaagataattcctactgttaatgttggcaatgccacaagccgagataaaatgcaagcacatttccgggaatggctgaagagcccgtgataaatatatcctgatcatgtttttttttctatatcggcgtcaactcgactccactcaatgaggtaccgctgtataccatccttacactcacagttcactataacgcctcttttcttcactttatttgttggagttcaacgaatgttgattcttttatgccagtgacacagtcatggtacggaaaagaagtggatatatttttaaaggttggtttgcttggtactaaaaatgctatgtttagagtaccacttttcccaacattattccgagattcgttttgtggaacttatctcatttgagagaggaaccatgttaaaccttccatacctcggtactgtactaggtctcatgcagtagcccatggtggatttgtatgcacgtgtctgatcattggcgttatttggcagtctccatgccagtactaccttcgtgatgttagctcacatacatgtatgggatggatagcttgatctgctcccattgtagggggcgatgctaaaggtaaaacacaatcgatagcttgatctactcgctgatgaaattcacgtgggctaggtggatcaaacacaatcggctgattaagggaggacgacgatagaagaatttagtggatgcgcgatgacgatgatgcaaacgttcagacaggggatcgggaattttctgttgtagcattcgtgcaaaccgtcgtgaatccagtcaatacagcacgtgtacaaatatcaaagctgcaggtttcactgtgcagtgcgcaccgctgtgacagacttctaatattgtaactcaaatattaaaacttgaactcatgatgtaccaccaataagggagttgccccccagcaaatgcgacaactgaataggatctattggcttaacaaggacatagcccctgctgagatcgatttcatagataccatgtggaaggaataaaattgaataatttacattgaatcttgaatctctcgatatacataaactttatatgacttcaggccaagttgatacataggattgtaacttgaggcccagcataatccctatatctcgtatgttatccctactttgagtagttggtctttcggaatggag

SEQ ID NO: 17028 - DNA, 3125 bp, Zea Mays
acggcccatctggccatccggttagcaagaccaacaaatgcacactgatacgttcccttcgaacccacctcccatggccaccgtcgactgccccctgccctctcccgcggacctcgacgacaacggattcccggctctaccctcctcccccgctgcctgtagcagcggcttcgcggaggacttctaccgcagcggcaccgactggtcctccttacgcgcccctccgccgctggggccgcccagaagggcacccggtgtgaaggagagaggaggcggctcggccgtgcagagcagcctcttccaggcgtgggggatcgagaagccgcggcgggacgggcgtggggctggggattcatcgcttgtgcagaggagcctcttccaggcatgggggatcgagagaccgcagagggagggtctcggggctggagattcctccccctcctcctccctttccggttctttgttggcaaggaagcggaggcgaggaagcaccgaggaggagcgggtggcggccaagaagcccctcgcgtgccccttctacaagaagattcctggcacaccattcacggtggatgcatttcggtatggacaagttgaggggtgctcggcctatttccttagccactttcatcatgaccattacggtggattaaccaagaaatggtgccatggccccatctattgttctgcactcactgcacgcctagtgaagatgtgcttgtcagtaaattccgaagggagtgacagttaccttgctggaggccaaccattgccctggtgcagctctaatccacttccgactaagtgatggaaagacctgtctccacactggggattttagagcatcaaaaactatgcaatcgcatccacttctccagagaggccgagtaaatttggtttacctggacacaacatattgcaatcccaagtacaagttcccaccccaggaggatgttattgattttgttgtgagaaccactcgaagatatctaaagaaacaaccaaaaaccctcattgttgttggggcatatagcattgggaaagagaatgtgtatctagcaatttcccaagctttagaggcccatatatacactgatgcatcgagaaggcggattctctactcatttggctggccagatttgtccaaaaggctatgttcatgcaatcaaagttcatcacttcatgttctgccccttggatctataaatcatgagaacttgaagaagtacttggagactcttaatggaagattcctagctgtgctggcttttcggcctacaggttggactttctctgaggcaactggaaagcatcttgacctaataaaaccaagctctaatgccaatgtaacaatctatggtgtgccttatagcgagcattcaagtttcactgagcttagggattttgtgatgtttctgaaacctcaaaagataattcctactgttaatgttggcaatgccacaagccgagataaaatgcaagcacatttccgggaatggctgaagagcccgtgataaatatatcctgatcatgtttttttttctatatcggcgtcaactcgactccactcaatgagtgacacagtcatggtacggaaaagaagtggatatatttttaaaggttggtttgcttggtactaaaaatgctatgtttagagtaccacttttcccaacattattccgagattcgttttgtggaacttatctcatttgagaggtaaatgtgttgtttctcgcttgtctggcatttctttgcaagggaactgtaagatgaagaaatattgatttgaattactgtttatcaaaacccattatcagcaacacatttgttgtctccccatgttcaatcgaaatacaagatttcactggctagagcagtgggatttcctagttgcgattgggagtcggtatgctgccttcagaaatatgtggaagaaagtggtacacgacccagcttctgaattctaattagacgataaggtctatagcctaacacctgctgggctgctagtgtcacagcttctattggcaacataagcacaaatttcggctactgtaacgattaaactatttgctcttattcatcccaaatgatttttctacaaggtggtagagtcatgaaatgacgaatggtaaatagtgcatatgttgggtgagatttccgctgctcacaagaataagcttaatgctattgcattaccatcatagttatgggcaatcatctaaatattaccatcattatctaaaaaaatctaaatattaccatagcctgctaagcctagaaaatatttggttagtcccacatctaagtatcctcaaaatgccttgctgttgctgatcaacaggaaccatgttaaaccttccatacctcggtactgtactaggtctcatgcagtagcccatggtggatttgtatgcacgtgtctgatcattggcgttatttggcagtctccatgccagtactaccttcgtgatgttagctcacatacatgtatgggatggatagcttgatctgctcccattgtagggggcgatgctaaaggtaaaacacaatcgatagcttgatctactcgctgatgaaattcacgtgggctaggtggatcaaacacaatcggctgattaagggaggacgacgatagaagaatttagtggatgcgcgatgacgatgatgcaaacgttcagacaggggatcgggaattttctgttgtagcattcgtgcaaaccgtcgtgaatccagtcaatacagcacgtgtacaaatatcaaagctgcaggtttcactgtgcagtgcgcaccgctgtgacagacttctaatattgtaactcaaatattaaaacttgaactcatgatgtaccaccaataagggagttgccccccagcaaatgcgacaactgaataggatctattggcttaacaaggacatagcccctgctgagatcgatttcatagataccatgtggaaggaataaaattgaataatttacattgaatcttgaatctctcgatatacataaactttatatgacttcaggccaagttgatacataggattgtaacttgaggcccagcataatccctatatctcgtatgttatccctactttgagtagttggtctttcggaatggag

SEQ ID NO: 17029 - DNA, 2253 bp, Zea Mays
acggcccatctggccatccggttagcaagaccaacaaatgcacactgatacgttcccttcgaacccacctcccatggccaccgtcgactgccccctgccctctcccgcggacctcgacgacaacggattcccggctctaccctcctcccccgctgcctgtagcagcggcttcgcggaggacttctaccgcagcggcaccgactggtcctccttacgcgcccctccgccgctggggccgcccagaagggcacccggtgtgaaggagagaggaggcggctcggccgtgcagagcagcctcttccaggcgtgggggatcgagaagccgcggcgggacgggcgtggggctggggattcatcgcttgtgcagaggagcctcttccaggcatgggggatcgagagaccgcagagggagggtctcggggctggagattcctccccctcctcctccctttccggttctttgttggcaaggaagcggaggcgaggaagcaccgaggaggagcgggtggcggccaagaagcccctcgcgtgccccttctacaagaagattcctggcacaccattcacggtggatgcatttcggtatggacaagttgaggggtgctcggcctatttccttagccactttcatcatgaccattacggtggattaaccaagaaatggtgccatggccccatctattgttctgcactcactgcacgcctagtgaagatgtgcttgtcagtaaattccgagcccatatatacactgatgcatcgagaaggcggattctctactcatttggctggccagatttgtccaaaaggctatgttcatgcaatcaaagttcatcacttcatgttctgccccttggatctataaatcatgagaacttgaagaagtacttggagactcttaatggaagattcctagctgtgctggcttttcggcctacaggttggactttctctgaggcaactggaaagcatcttgacctaataaaaccaagctctaatgccaatgtaacaatctatggtgtgccttatagcgagcattcaagtttcactgagcttagggattttgtgatgtttctgaaacctcaaaagataattcctactgttaatgttggcaatgccacaagccgagataaaatgcaagcacatttccgggaatggctgaagagcccgtgataaatatatcctgatcatgtttttttttctatatcggcgtcaactcgactccactcaatgaggtaccgctgtataccatccttacactcacagttcactataacgcctcttttcttcactttatttgttggagttcaacgaatgttgattcttttatgccagtgacacagtcatggtacggaaaagaagtggatatatttttaaaggttggtttgcttggtactaaaaatgctatgtttagagtaccacttttcccaacattattccgagattcgttttgtggaacttatctcatttgagaggaaccatgttaaaccttccatacctcggtactgtactaggtctcatgcagtagcccatggtggatttgtatgcacgtgtctgatcattggcgttatttggcagtctccatgccagtactaccttcgtgatgttagctcacatacatgtatgggatggatagcttgatctgctcccattgtagggggcgatgctaaaggtaaaacacaatcgatagcttgatctactcgctgatgaaattcacgtgggctaggtggatcaaacacaatcggctgattaagggaggacgacgatagaagaatttagtggatgcgcgatgacgatgatgcaaacgttcagacaggggatcgggaattttctgttgtagcattcgtgcaaaccgtcgtgaatccagtcaatacagcacgtgtacaaatatcaaagctgcaggtttcactgtgcagtgcgcaccgctgtgacagacttctaatattgtaactcaaatattaaaacttgaactcatgatgtaccaccaataagggagttgccccccagcaaatgcgacaactgaataggatctattggcttaacaaggacatagcccctgctgagatcgatttcatagataccatgtggaaggaataaaattgaataatttacattgaatcttgaatctctcgatatacataaactttatatgacttcaggccaagttgatacataggattgtaacttgaggcccagcataatccctatatctcgtatgttatccctactttgagtagttggtctttcggaatggag

SEQ ID NO: 17030 - DNA, 2638 bp, Zea Mays
acggcccatctggccatccggttagcaagaccaacaaatgcacactgatacgttcccttcgaacccacctcccatggccaccgtcgactgccccctgccctctcccgcggacctcgacgacaacggattcccggctctaccctcctcccccgctgcctgtagcagcggcttcgcggaggacttctaccgcagcggcaccgactggtcctccttacgcgcccctccgccgctggggccgcccagaagggcacccggtgtgaaggagagaggaggcggctcggccgtgcagagcagcctcttccaggcgtgggggatcgagaagccgcggcgggacgggcgtggggctggggattcatcgcttgtgcagaggagcctcttccaggcatgggggatcgagagaccgcagagggagggtctcggggctggagattcctccccctcctcctccctttccggttctttgttggcaaggaagcggaggcgaggaagcaccgaggaggagcgggtggcggccaagaagcccctcgcgtgccccttctacaagaagattcctggcacaccattcacggtggatgcatttcggtatggacaagttgaggggtgctcggcctatttccttagccactttcatcatgaccattacggtggattaaccaagaaatggtgccatggccccatctattgttctgcactcactgcacgcctagtgaagatgtgcttgtcagtaaattccgactatatctgtcctttggagcttgataccgagtatgtcatagagggagtgacagttaccttgctggaggccaaccattgccctggtgcagctctaatccacttccgactaagtgatggaaagacctgtctccacactggggattttagagcatcaaaaactatgcaatcgcatccacttctccagagaggccgagtaaatttggtttacctggacacaacatattgcaatcccaagtacaagttcccaccccaggaggatgttattgattttgttgtgagaaccactcgaagatatctaaagaaacaaccaaaaaccctcattgttgttggggcatatagcattgggaaagagaatgtgtatctagcaatttcccaagctttagaggcccatatatacactgatgcatcgagaaggcggattctctactcatttggctggccagatttgtccaaaaggctatgttcatgcaatcaaagttcatcacttcatgttctgccccttggatctataaatcatgagaacttgaagaagtacttggagactcttaatggaagattcctagctgtgctggcttttcggcctacaggttggactttctctgaggcaactggaaagcatcttgacctaataaaaccaagctctaatgccaatgtaacaatctatggtgtgccttatagcgagcattcaagtttcactgagcttagggattttgtgatgtttctgaaacctcaaaagataattcctactgttaatgttggcaatgccacaagccgagataaaatgcaagcacatttccgggaatggctgaagagcccgtgataaatatatcctgatcatgtttttttttctatatcggcgtcaactcgactccactcaatgaggtaccgctgtataccatccttacactcacagttcactataacgcctcttttcttcactttatttgttggagttcaacgaatgttgattcttttatgccagtgacacagtcatggtacggaaaagaagtggatatatttttaaaggttggtttgcttggtactaaaaatgctatgtttagagtaccacttttcccaacattattccgagattcgttttgtggaacttatctcatttgagaggaaccatgttaaaccttccatacctcggtactgtactaggtctcatgcagtagcccatggtggatttgtatgcacgtgtctgatcattggcgttatttggcagtctccatgccagtactaccttcgtgatgttagctcacatacatgtatgggatggatagcttgatctgctcccattgtagggggcgatgctaaaggtaaaacacaatcgatagcttgatctactcgctgatgaaattcacgtgggctaggtggatcaaacacaatcggctgattaagggaggacgacgatagaagaatttagtggatgcgcgatgacgatgatgcaaacgttcagacaggggatcgggaattttctgttgtagcattcgtgcaaaccgtcgtgaatccagtcaatacagcacgtgtacaaatatcaaagctgcaggtttcactgtgcagtgcgcaccgctgtgacagacttctaatattgtaactcaaatattaaaacttgaactcatgatgtaccaccaataagggagttgccccccagcaaatgcgacaactgaataggatctattggcttaacaaggacatagcccctgctgagatcgatttcatagataccatgtggaaggaataaaattgaataatttacattgaatcttgaatctctcgatatacataaactttatatgacttcaggccaagttgatacataggattgtaacttgaggcccagcataatccctatatctcgtatgttatccctactttgagtagttggtctttcggaatggag

SEQ ID NO: 17031 - DNA, 2543 bp, Zea Mays
acggcccatctggccatccggttagcaagaccaacaaatgcacactgatacgttcccttcgaacccacctcccatggccaccgtcgactgccccctgccctctcccgcggacctcgacgacaacggattcccggctctaccctcctcccccgctgcctgtagcagcggcttcgcggaggacttctaccgcagcggcaccgactggtcctccttacgcgcccctccgccgctggggccgcccagaagggcacccggtgtgaaggagagaggaggcggctcggccgtgcagagcagcctcttccaggcgtgggggatcgagaagccgcggcgggacgggcgtggggctggggattcatcgcttgtgcagaggagcctcttccaggcatgggggatcgagagaccgcagagggagggtctcggggctggagattcctccccctcctcctccctttccggttctttgttggcaaggaagcggaggcgaggaagcaccgaggaggagcgggtggcggccaagaagcccctcgcgtgccccttctacaagaagattcctggtaaaggctactgcgtttcatgctttgatagtttgttataataatttagggggtctttgaatgcactagaccctcttagatatatggctggtggagctactgcctactgagccactgaggaatgagtttgttatacgttgaattgctgttgccatcaattttctaatttgccaatttcgctcatgctgtcatgcacctgcaaacctaggcacaccattcacggtggatgcatttcggtatggacaagttgaggggtgctcggcctatttccttagccactttcatcatgaccattacggtggattaaccaagaaatggtgccatggccccatctattgttctgcactcactgcacgcctagtgaagatgtgcttgtcagtaaattccgactatatctgtcctttggagcttgataccgagtatgtcatagagggagtgacagttaccttgctggaggccaaccattgccctggtgcagctctaatccacttccgactaagtgatggaaagacctgtctccacactggggattttagagcatcaaaaactatgcaatcgcatccacttctccagagaggccgagtaaatttggtttacctggacacaacatattgcaatcccaagtacaagttcccaccccaggaggatgttattgattttgttgtgagaaccactcgaagatatctaaagaaacaaccaaaaaccctcattgttgttggggcatatagcattgggaaagagaatgtgtatctagcaatttcccaagctttagaggcccatatatacactgatgcatcgagaaggcggattctctactcatttggctggccagatttgtccaaaaggctatgttcatgcaatcaaagttcatcacttcatgttctgccccttggatctataaatcatgagaacttgaagaagtacttggagactcttaatggaagattcctagctgtgctggcttttcggcctacaggttggactttctctgaggcaactggaaagcatcttgacctaataaaaccaagctctaatgccaatgtaacaatctatggtgtgccttatagcgagcattcaagtttcactgagcttagggattttgtgatgtttctgaaacctcaaaagataattcctactgttaatgttggcaatgccacaagccgagataaaatgcaagcacatttccgggaatggctgaagagcccgtgataaatatatcctgatcatgtttttttttctatatcggcgtcaactcgactccactcaatgagtgacacagtcatggtacggaaaagaagtggatatatttttaaaggttggtttgcttggtactaaaaatgctatgtttagagtaccacttttcccaacattattccgagattcgttttgtggaacttatctcatttgagaggtaaatgtgttgtttctcgcttgtctggcatttctttgcaagggaactgtaagatgaagaaatattgatttgaattactgtttatcaaaacccattatcagcaacacatttgttgtctccccatgttcaatcgaaatacaagatttcactggctagagcagtgggatttcctagttgcgattgggagtcggtatgctgccttcagaaatatgtggaagaaagtggtacacgacccagcttctgaattctaattagacgataaggtctatagcctaacacctgctgggctgctagtgtcacagcttctattggcaacataagcacaaatttcggctactgtaacgattaaactatttgctcttattcatcccaaatgatttttctacaaggtggtagagtcatgaaatgacgaatggtaaatagtgcatatgttgggtgagatttccgctgctcacaagaataagcttaatgctattgcattaccatcatagttatgggcaatcatctaaatattaccatcattatctaaaaaaatctaaatattaccatagcctgctaagcctagaaaatatttggtt

SEQ ID NO: 17032 - DNA, 1769 bp, Zea Mays
acggcccatctggccatccggttagcaagaccaacaaatgcacactgatacgttcccttcgaacccacctcccatggccaccgtcgactgccccctgccctctcccgcggacctcgacgacaacggattcccggctctaccctcctcccccgctgcctgtagcagcggcttcgcggaggacttctaccgcagcggcaccgactggtcctccttacgcgcccctccgccgctggggccgcccagaagggcacccggtgtgaaggagagaggaggcggctcggccgtgcagagcagcctcttccaggcgtgggggatcgagaagccgcggcgggacgggcgtggggctggggattcatcgcttgtgcagaggagcctcttccaggcatgggggatcgagagaccgcagagggagggtctcggggctggagattcctccccctcctcctccctttccggttctttgttggcaaggaagcggaggcgaggaagcaccgaggaggagcgggtggcggccaagaagcccctcgcgtgccccttctacaagaagattcctggcccatatatacactgatgcatcgagaaggcggattctctactcatttggctggccagatttgtccaaaaggctatgttcatgcaatcaaagttcatcacttcatgttctgccccttggatctataaatcatgagaacttgaagaagtacttggagactcttaatggaagattcctagctgtgctggcttttcggcctacaggttggactttctctgaggcaactggaaagcatcttgacctaataaaaccaagctctaatgccaatgtaacaatctatggtgtgccttatagcgagcattcaagtttcactgagcttagggattttgtgatgtttctgaaacctcaaaagataattcctactgttaatgttggcaatgccacaagccgagataaaatgcaagcacatttccgggaatggctgaagagcccgtgataaatatatcctgatcatgtttttttttctatatcggcgtcaactcgactccactcaatgagtgacacagtcatggtacggaaaagaagtggatatatttttaaaggttggtttgcttggtactaaaaatgctatgtttagagtaccacttttcccaacattattccgagattcgttttgtggaacttatctcatttgagaggtaaatgtgttgtttctcgcttgtctggcatttctttgcaagggaactgtaagatgaagaaatattgatttgaattactgtttatcaaaacccattatcagcaacacatttgttgtctccccatgttcaatcgaaatacaagatttcactggctagagcagtgggatttcctagttgcgattgggagtcggtatgctgccttcagaaatatgtggaagaaagtggtacacgacccagcttctgaattctaattagacgataaggtctatagcctaacacctgctgggctgctagtgtcacagcttctattggcaacataagcacaaatttcggctactgtaacgattaaactatttgctcttattcatcccaaatgatttttctacaaggtggtagagtcatgaaatgacgaatggtaaatagtgcatatgttgggtgagatttccgctgctcacaagaataagcttaatgctattgcattaccatcatagttatgggcaatcatctaaatattaccatcattatctaaaaaaatctaaatattaccatagcctgctaagcctagaaaatatttggtt

SEQ ID NO: 17033 - DNA, 2281 bp, Zea Mays
acggcccatctggccatccggttagcaagaccaacaaatgcacactgatacgttcccttcgaacccacctcccatggccaccgtcgactgccccctgccctctcccgcggacctcgacgacaacggattcccggctctaccctcctcccccgctgcctgtagcagcggcttcgcggaggacttctaccgcagcggcaccgactggtcctccttacgcgcccctccgccgctggggccgcccagaagggcacccggtgtgaaggagagaggaggcggctcggccgtgcagagcagcctcttccaggcgtgggggatcgagaagccgcggcgggacgggcgtggggctggggattcatcgcttgtgcagaggagcctcttccaggcatgggggatcgagagaccgcagagggagggtctcggggctggagattcctccccctcctcctccctttccggttctttgttggcaaggaagcggaggcgaggaagcaccgaggaggagcgggtggcggccaagaagcccctcgcgtgccccttctacaagaagattcctggcacaccattcacggtggatgcatttcggtatggacaagttgaggggtgctcggcctatttccttagccactttcatcatgaccattacggtggattaaccaagaaatggtgccatggccccatctattgttctgcactcactgcacgcctagtgaagatgtgcttgtcagtaaattccgaagggagtgacagttaccttgctggaggccaaccattgccctggtgcagctctaatccacttccgactaagtgatggaaagacctgtctccacactggggattttagagcatcaaaaactatgcaatcgcatccacttctccagagaggccgagtaaatttggtttacctggacacaacatattgcaatcccaagtacaagttcccaccccaggaggatgttattgattttgttgtgagaaccactcgaagatatctaaagaaacaaccaaaaaccctcattgttgttggggcatatagcattgggaaagagaatgtgtatctagcaatttcccaagctttagaggcccatatatacactgatgcatcgagaaggcggattctctactcatttggctggccagatttgtccaaaaggctatgttcatgcaatcaaagttcatcacttcatgttctgccccttggatctataaatcatgagaacttgaagaagtacttggagactcttaatggaagattcctagctgtgctggcttttcggcctacaggttggactttctctgaggcaactggaaagcatcttgacctaataaaaccaagctctaatgccaatgtgtgccttatagcgagcattcaagtttcactgagcttagggattttgtgatgtttctgaaacctcaaaagataattcctactgttaatgttggcaatgccacaagccgagataaaatgcaagcacatttccgggaatggctgaagagcccgtgataaatatatcctgatcatgtttttttttctatatcggcgtcaactcgactccactcaatgagtgacacagtcatggtacggaaaagaagtggatatatttttaaaggttggtttgcttggtactaaaaatgctatgtttagagtaccacttttcccaacattattccgagattcgttttgtggaacttatctcatttgagaggtaaatgtgttgtttctcgcttgtctggcatttctttgcaagggaactgtaagatgaagaaatattgatttgaattactgtttatcaaaacccattatcagcaacacatttgttgtctccccatgttcaatcgaaatacaagatttcactggctagagcagtgggatttcctagttgcgattgggagtcggtatgctgccttcagaaatatgtggaagaaagtggtacacgacccagcttctgaattctaattagacgataaggtctatagcctaacacctgctgggctgctagtgtcacagcttctattggcaacataagcacaaatttcggctactgtaacgattaaactatttgctcttattcatcccaaatgatttttctacaaggtggtagagtcatgaaatgacgaatggtaaatagtgcatatgttgggtgagatttccgctgctcacaagaataagcttaatgctattgcattaccatcatagttatgggcaatcatctaaatattaccatcattatctaaaaaaatctaaatattaccatagcctgctaagcctagaaaatatttggtt

SEQ ID NO: 17034 - DNA, 2055 bp, Zea Mays
ggtgcctgttagttttttctcatttgctatttatctgtgaacactgttgtcaagttcaatatgaatctatagttctatacagcctttgtacactaaacacggccattgtttgactatttgttagtcaaattttgcaaagttacattttctgaaacagcatgttctatacctttgtgtatggagggagtagtatcttggtactgtaatgccacttcaaacagtatttctatatgcaatcgttattttaaactagttacctgccactgtttgaatgttgttgttactagtcctttctgtttcatttttctttgtctatttcatagcttaatgcctacatactctggtttgtaggtgtatggaagcatgccaagagtgatgggcatgaggactatggtctccttgttagtgacaaagcaaggaaatacgccataatcaaggagcttgatgagccagttaccttaaatgatgggacagtggtcctgcagtttgaagtgagacttcagaatggccttgaatgtggaggtgcctacattaagtacatccgccctcaggatgctggatgggatgccaaggagtttgataatgagactccatacactattatgtttggtccagataaatgtgggtcaaccaacaaggttcatttcatccttaagcacaagaatcctaagactggaaagtatgttgagcatcacctcaaattcccaccttctgtcccatacgacaagctctctcatgtctacacagctatcttgaagccagacaatgaggtcagaattttgatcgatggggaagaaaagaagaaggcaaacttcctttctgctgatgactttgagccagcacttatcccatccaagaccattcctgaccctgatgacaagaagccggaggactgggatgagagagctaaaatccctgatccagatgcagtgaagcctgatgattgggatgaggatgcccccatggaaattgtggatgaggaagccaccaagcctgagggatggttggatgatgaacccgaggagattgatgatcctgaggcagccaagcccgaggactgggacgatgaagaggatggtgaatgggaggcaccaaagattgacaaccccaagtgtgaagaggcacctggatgtggcgagtggaagaggccgatgaagcagaatcctgcttacaaaggcctgattttgatccaattgctgctattgggattgagatctggacaatgcaggatggcatcctgttcgacaatatcttgattgctgatgatgagaaagttgccacctccattctggagaagacatggaagcccaagtatgatgttgagaaggaaaaggagaaggctgaggaggctgctgctggtgcagatggtctttctgacttccagaagaagatttttgacgtcctgtacaagattgctgatattccgttcttggcaccctacaagaccaagattattgatgttatcgagaagggagagaagcagcccaacatcactattggcattttggtctccgttgtcatcgtgttcgttaccgttctcttcaagatcctttttggtggcaagaagccggtggcacctgtgaaacctgcagctgaggcgaagaagcccaaggccgcggagacggacggtgctggaagcagtggtgacaaggatgagaaagaggatgaaaaggacgagacaggcccacgtcggaggacccgaagggagacatagacctgtttttgacgtgttttagctcttctggcgtctgcttattttgagaactcttaatatttgtgagtgtataataggagcttatgtcacctctgcggcttcccccgctgctgatttgtttttaatggttagaccaggacccttcacgagcgtagaatttagttcttgttggtcatttatgtgctgtgcctgacggtgttcaatcagatagaggtgatggtttttttggtagatcaaatcaaggaatatttcatatgcctttttggcaactgtttcagttgggtgaatgcctggttaagctttcgcttgtgtttcggaatgttgctggctcaccatttggt

SEQ ID NO: 17035 - DNA, 1304 bp, Zea Mays
cttttccttttcttccccgcacagaaggctatgtgttttgggcacacactgtcttcctttctggtacagataaactgattaatggaagttaatatcactggcttcttatctgatattcatttttatctgtatatgtgtagcatgttccccgtattaacacatacttcccaacatatagtgatgccactatggaccattatcgcctccttgataggctaaatgcatacggcttgtttgaggtgagagtatctggtgatggaaattgtcagtttcgtgcactctcagaccaactatatagatcacctgattatcacaagcatgttcgaaaggagattgtaaagcagctcaagaaatgtaacaccttatatgaaggttatgttccaatgaaatataaaaaatattgcaagaaaatgaagaagtctggtgaatggggtgaccatgtcacgctacaagcagctgctgacaaggttacccctcttttttgcgctatgtttctaacatcatttgctctactaaattttcatgcaacttagggcatcactgcgatacatttagccattgcgctactatgcaaatggttgctattatttccgtatcttactgaaatacatttagcagtgcatttaaattcatcatatattaatttgtatttgcattatggttcactaaaatcgccatacttccgagtcaaacacatagttttctaatctataacagcagtccgtgttcacatttattgttgaacatgggttgcctggagacaggagaaaggagacgtctaatgttttcatgtacttttggcagtttgctgcaaagatatgtctcctaacatcattcagagatacatgttttgttgaaattgttccgcaatatcaagctccacagagagagatttggctgagtttctggtccgaagttcactataactcactgtacgatgctcgagatctcccaagcaaatacaagcctaggaagaagcactggttgttgttttaatatccatgcggggagtttgcttcatactggtggattcatattgtttgaccctttctaccaccgtccgccaaatgatgcaccgtacagctacagcatgatccaggcatacagcagtaggtgtagagttacaatgctgaacctgagcaatgtgaatagatattcttaatacaggttgactgtaatgccctgtcttatttgttcactgtgtatattctttatttatactgctacatgttagctctattcatcagttcattgttcccttcgtttttggaagaatccatcattgccttctggcccaaatgtcc

SEQ ID NO: 17036 - DNA, 394 bp, Zea Mays
ccaaaaacgatattccctccgtcccctatcttaaggtcacgaagccgcatgtgatgtgctctggccgcggaatgctttgggcttttgccgctggctccgattccgagcagctagctagcgatgcgccggcgggccccgcacaccgacggaggaccagtctgattgatggatggggatggtagtggtgtacgtgcgcacggacgaatctcgcgctgctttcagctttccaattgccttgtcacctttccagcaggcagcgaccccacggaccatgatgatgatatatggcgatggcgatggcaagacggtgcgagaaaatgtggggtgatgggggcgcagctatatgcatgtccgttgaaaaactgagacaaccgttgacgttaatctaatggac

SEQ ID NO: 17037 - DNA, 2653 bp, Zea Mays
atggccctaaaatttttgagtgagtcggcgatgaatctcacgatactgaagatgaattctgctcccgatgcaaaactcatggttgtcatcaactctctattgcgcaagagcagccgtctggggacaaacgcagttcctgcgcgcatgcaggccactacactagtttgtttaccccggggcccgggcgcagaaaagggtgaagaagaaacagccgtgacattatcgaggtggcatgcccacaccttccgccacatttccgtcccccatcccctccgcaccgcagctgtctcttcctctcctggtcttcgtcctgccactcctccacctcaacttgctctgctcttctcggattacggctcggggttggtcattggcggacagggcgtttcaagaaagggcggcggcgcttttcctgacgcaagttgccccggtgtcctggcttgctgcgcgcttgggggttgggctcaggaatggggggagagcaggcgctgcgtcgactggtcctgttcccatctctctgaaacttagatggatgcatctgtgaacgccaagaagaaggttagtttctgtgggaacaccggccacagccgctgcggtgaagttcatttagctgcggtgtgctccggtcgtatgcgaagcaaccccttctcacttcaggtttggtttgcatttccgttcaagtataaaggaagcagtatttggcatggcatttgaatagcgtcggaacctagaaaacagtgttccagcagtattacgtcacactggtgttatactattatagaaaaacatggtggacgtagaactgtttgttaaggagactagtgatcacagcatcagctctgaggaagaagatatccttgtcaggagctgtagcaatctcaatgtgagctttggataccattgtgattctcatcagagtttttctcctgaaaatgatcatggcaatggcatttctcctaagaacacgtttgggactaataccatgatggggtcacgaaatggctcattcacttgtttatctggtgctgctattagtgcaaatttcacactggcaaatacaaacatttgcaatggtcttattggcgaagaaattttaccagaactagattctccaaactcctttagaaaaattgtttcttctccatcaatgtcaagattggactcgttctccacctcacaaggaagtcctgtgtcaactgagagctctatatttgagatcagtaaaaacctttggaggtccagtgcaccaacaactgtatcatccaattttctgactaatacagaggtgaaaatggctgggggagctgctggagaggatagagtccaagctgtgtgctcagagaaaaatggatggctgatttgtgggatatatgatgggtttaatgggagggatgcagctgattttcttgcagtaactctatatgataacatagtatattacttgtacctgctggagaatcggataaagcaacaaaatggtctgtacaattcatcagaaagctctctcgatggtcttaaaagtgagttaacactagccatgagaaactcagagaatgaagacataaaattttctgaaacatttcgatctggcgtgctgaattgcctttctactgctgttgagcaagccgagaatgactttttatgcatggttgaacaagagatggatgatagaccagatttagtttcagtagggtcttgtgttctggttcttcttcttcatggaacagatctgtgcatcttaaatatgggggacagtagagctgtgcttgcttccatgccatatgtagaaaatggtgctttgaaggctgctcaactgacagagacccactcacttgaaaatccttcggaataccaaagacttttagctgctcatcccaatgattcttcagttgtcaggggtaacaaaataaaaggaaagctgaaggttactcgtgcttttggagttggctatctgaagcagaggaagttcaatgatgcactcatgggcattctacgagtccgcgatttgagcagccctccatatgtttacacaaatccacacacattgagtcacaaagttacagatgatgatttgttcgttgtgcttggtagtgatggcctatttgatttcttcagtaatgatgaagttgttctgttggtttatcaatttatgcacgataatccaatgggggatcctgcaaaatatcttatcgagcaacttatactcaaagcagccaaggaagcagctttaacagccgaagaattgatgaggatacctgttgggagtaggagaaagtaccacgatgatgtgactgtcgttgttatcacccttggaaatgcacagagaacgatgactgcgtcaacatccatgtgaaagaatggagagctagagagacgggctatatcagctggtaatttttgtgggtttttgcatacgtgtcctccaaattacaagcccttttttttgttgagattggcgtgtggtagtcagtaaacccgaataaaaatgtatatattgttttggaatttgggaagtgaacaaaaaccttttgttcaatcgcaaggtgggcatggattgtttggcctacttttgtacatacatgaattaaaacatggaggttcgtacttgagccaatgaatccatgagcagagcggtggatcgttccagttttcg

SEQ ID NO: 17038 - DNA, 1080 bp, Zea Mays
ttttttttcttctcagttccacttgcttgccactgtgctcggttgcttagacagccagcattgccgggaaagcaacggaggccacggcgacctgcatcagccaggcagcttgtgcgtgctataaatggcgtgaggcgaggaagagaaggaagagagaatagctaggccgcgccgacgccgaaccgcagcagacacgcgcgcggacagcgtacgagggagcgaagctgcctgaggtagaggaggaggagaacatgcagggcggcggcggcgtggaccagccgccgatgcagatggtgctgcgggtgaggcacccgtcgtcgctgggcggcagcggggcggacgaggacgacggcgaggggtcctctaggtcggcgctctcggtgttcaaggccaaggaggagcagatcgagcggcgcaagatggaggtccgggagaaggtgttcgcccacctcggacgcgtcgaggaggagtccaagcgactcgccttcatcaggcaggagcttgaagggatggccgaccctacaaggaaggaggtggagtcgataaggaagcggatcgacacggtgaaccgtcagctcaagcctctcagcaagagctgcgtcaagaaggagtacaaggaggtcctggaggcgtacaacgagaagagcaaagagaaggctctgctagtgaacaggctaatcgagcttgtgagcgaaagcgagaggatgcggatgaagaagctcgaggagctcaacaagacggtcgactcgctctactagacgccagtcggtgctccgtgctctgctcacccacctctccatccactcatccatccagagcttgcacgctcgccctctgtaatctgatccccgtgtgccgtggattcgtgacctgttcaaggtggtgcttgtagtaactgatgtttttcgttgggtgatccttttctcttctttttttcttcttctctctttggtctcttttatttcaccagttcgtacgagtctcgttgcactgtcattgtcgagtaaaactgacgtactgtatttataagcaacaaacaggtaccagctgctgtctaaccacgttttgatggttcattca

SEQ ID NO: 17039 - DNA, 1082 bp, Zea Mays
ttttttttcttctcagttccacttgcttgccactgtgctcggttgcttagacagccagcattgccgggaaagcaacggaggccacggcgacctgcatcagccaggcagcttgtgcgtgctataaatggcgtgaggcgaggaagagaaggaagagagaatagctaggccgcgccgacgccgaaccgcagcagacacgcgcgcggacagcgtacgagggagcgaagctgcctgaggtagaggaggaggagaacatgcagggcggcggcggcgtggaccagccgccgatgcagatggtgctgcgggtgaggcacccgtcgtcgctgggcggcagcggggcggacgaggacgacggcgaggggtcctctaggtcggcgctctcggtgttcaaggccaaggaggagcagatcgagcggcgcaagatggaggtccgggagaaggtgttcgcccacctcggacgcgtcgaggaggagtccaagcgactcgccttcatcaggagcttgaagggatggccgaccctacaaggaaggaggtggagtcgataaggaagcggatcgacacggtgaaccgtcagctcaagcctctcagcaagagctgcgtcaagaaggagaaggagtacaaggaggtcctggaggcgtacaacgagaagagcaaagagaaggctctgctagtgaacaggctaatcgagcttgtgagcgaaagcgagaggatgcggatgaagaagctcgaggagctcaacaagacggtcgactcgctctactagacgccagtcggtgctccgtgctctgctcacccacctctccatccactcatccatccagagcttgcacgctcgccctctgtaatctgatccccgtgtgccgtggattcgtgacctgttcaaggtggtgcttgtagtaactgatgtttttcgttgggtgatccttttctcttctttttttcttcttctctctttggtctcttttatttcaccagttcgtacgagtctcgttgcactgtcattgtcgagtaaaactgacgtactgtatttataagcaacaaacaggtaccagctgctgtctaaccacgttttgatggttcattca

SEQ ID NO: 17040 - DNA, 646 bp, Zea Mays
ggcccataaagccacaacccggaaacgcgcaaagcgaagagggaaggggggatatcggggaaaaaaacgcaaggtaccaccgtaccagcagcgcaaaggcggccgccatggcggatcagttcgcggattcggcgaacaacgtgatcatcgaggaggtgaacaagggactgaacccaggaatggtggttctgctcgtggttgccagcttcctgctgctcttctttgccgggaactacgcgctgtatgtgtacgcgcagaagacgctcccgccgaagaagaagaagccggtctccaagaagaagctgaagagggaaaagctgaagcagggtgtctccgcgccaggggagtgaacagacagggatgccgccgatcggcccgtcctgagcccgccccctatttacatgattgtcgaagaaaaaagatacacctgctggagccgcggtgttcgtagtaattttgttctgtagatgctttttgttgtcttcgatggtagtgcatttgtattggacaccttgtttcagcaactgatgaatctttagcctaaaccgagttactcttttgttcctgtaaactacaagtacttcaaatgacgctggtgatggtgaacctgagtaaaattggcgagtcccagctcccgcctactctt

SEQ ID NO: 17041 - DNA, 656 bp, Zea Mays
cgaacggcccataaagccacaacccggaaacgcgcaaagcgaagagggaaggggggatatcggggaaaaaaacgcaaggtaccaccgtaccagcagcgcaaagatcaggcggccgccatggcggatcagttcgcggattcggcgaacaacgtgatcatcgaggaggtgaacaagggactgaacccaggaatggtggttctgctcgtggttgccagcttcctgctgctcttctttgccgggaactacgcgctgtatgtgtacgcgcagaagacgctcccgccgaagaagaagaagccggtctccaagaagaagctgaagagggaaaagctgaagcagggtgtctccgcgccaggggagtgaacagacagggatgccgccgatcggcccgtcctgagcccgccccctatttacatgattgtcgaagaaaaaagatacacctgctggagccgcggtgttcgtagtaattttgttctgtagatgctttttgttgtcttcgatggtagtgcatttgtattggacaccttgtttcagcaactgatgaatctttagcctaaaccgagttactcttttgttcctgtaaactacaagtacttcaaatgacgctggtgatggtgaacctgagtaaaattggcgagtcccagctcccgcctactctt

SEQ ID NO: 17042 - DNA, 1133 bp, Zea Mays
atggagctaggcatcatcccgaaaggtcctacttccatatcaatcctccagcgtcgtgaccgaaagtaccaaactgttgcagaagcggtggcagaagaggtggcaacggtggtgcgaatggaccttgcgcttggttcatatgtgctgcttcttgtgtgggcactgctccaacgtgctgctgcagccgtggtgcttgcacagaaaatggaggacgacgccggtcgcctggggttccacctgggcaaggagctgccgcgcgctgcgtccgccttcatgcacaacctctgctctagaggggctcatctcttcggtaacacctccgccagcagcgtatggtgctaaactatattaggaaaatattaggagctattgaagtattacccttttcgggatttaatatttttagggctagtttgacaacatataaataaaaactcagagaaataatacactaaggggttgttaaatgacacttcaattctctggaaggattttcccactcgagtgtatttgcatgctactgtttggtaacaaagggactaaaaacctctactgagacaaaatacttcaaaaatcagaaaaataaaagaaaaatagaaaatatttagaaaaaacaaaaacacaatgaaacatccctaaaatctaaaaaatacaccagacatgatcatctaatataaaacaaagtttaacttaaataacatctaataccaacaaagttaatctatccatcatcacatcacataatatcatctccatccacacgtgcaaatagacaatataacataaaaacaaagtacaagtctcttcattagaaactttggcagtagaagaaattatgagttgaactccttttcacaaaccttatatcgactgtcatccttctccatgttagcttcatgtgttgtttccacttaacattctacaagtaacatcaattgacacatggtttagtagcatagctggaacctcagtttagtaatggcaacaacaaaaggaggaagtatcattacacaaagctccagcaaaccacaaagcagaacgtacacgtaaatctcagatggcctcctcacctctaatcctgacactggtcactgcctgctgctatctgttgcctcaagtccccaaccacagac

SEQ ID NO: 17043 - DNA, 611 bp, Zea Mays
atggagctaggcatcatcccgaaaggtcctacttccatatcaatcctccagcgtcgtgaccgaaagtaccaaactgttgcagaagcggtggcagaagaggtggcaacggtggtgcgaatggaccttgcgcttggttcatatgtgctgcttcttgtgtgggcactgctccaacgtgctgctgcagccgtggtgcttgcacagaaaatggaggacgacgccggtcgcctggggttccacctgggcaaggagctgccgcgcgctgcgtccgccttcatgcacaacctctgctctagaggggctcatctcttcggtaacacctccgccagcagcgtatggtgcttatatcgactgtcatccttctccatgttagcttcatgtgttgtttccacttaacattctacaagtaacatcaattgacacatggtttagtagcatagctggaacctcagtttagtaatggcaacaacaaaaggaggaagtatcattacacaaagctccagcaaaccacaaagcagaacgtacacgtaaatctcagatggcctcctcacctctaatcctgacactggtcactgcctgctgctatctgttgcctcaagtccccaaccacagac

SEQ ID NO: 17044 - DNA, 785 bp, Zea Mays
acttaacacagaaaaacttgtcaagctattcactgataaagcaagatcttgcaaaggctgtgccagaggagcacaagaggtttctgcatgatttggtttggatacatgaagaggaaaatgtgccagttgatatggatggaggacaaatcatctgcaatctgattgctgtccatgctggcctagagaggaccatagatttgaatgagcaacttagagttttaagaactagagacacaagggtgccaaaggttcaaatgcttagtgggaggcaagatgtttgggacacacccaagggtctggccggcaagcagactattattgtaagtggccaccacgggaagctccacatcgacggcctccgatttataatcgacgaaggtggtggttatgaagacaaacctattgctgcgatagtttttccttcaaagacattgatcagaagtaccgaggaagcgggaaccacatcagagaggtgatctagagttctagacatcgtcaggagcagtgaacacggaggcacagttttttctctcttgaagttactgcttgtagtcatgtactcatgtcaaacgacaataggaataacgtccaaaggcaataagttggtgaaccggacctgcgttttctcaatttagtcactgatgactatatgtctatatatattgtaccttgatgctgtcaatttagacgagaccgtacatcctctttttttagggcaataaactttactccctgtcctcaaatatttgtacacaaagagtggtggtgagcaattacgatattac

SEQ ID NO: 17045 - DNA, 805 bp, Zea Mays
gctggatgaggagtcctctcttggcaagctgatcagcagcagctgtgcaaagcaagccagataatatcttgcaaaggctgtgccagaggagcacaagaggtttctgcatgatttggtttggatacatgaagaggaaaatgtgccagttgatatggatggaggacaaatcatctgcaatctgattgctgtccatgctggcctagagaggaccatagatttgaatgagcaacttagagttttaagaactagagacacaagggtgccaaaggttcaaatgcttagtgggaggcaagatgtttgggacacacccaagggtctggccggcaagcagactattattgtaagtggccaccacgggaagctccacatcgacggcctccgatttataatcgacgaaggtggtggttatgaagacaaacctattgctgcgatagtttttccttcaaagacattgatcagaagtaccgaggaagcgggaaccacatcagagaggtgatctagagttctagacatcgtcaggagcagtgaacacggaggcacagttttttctctcttgaagttactgcttgtagtcatgtactcatgtcaaacgacaataggaataacgtccaaaggcaataagttggtgaaccggacctgcgttttctcaatttagtcactgatgactatatgtctatatatattgtaccttgatgctgtcaatttagacgagaccgtacatcctctttttttagggcaataaactttactccctgtcctcaaatatttgtacacaaagagtggtggtgagcaattacgatattac

SEQ ID NO: 17046 - DNA, 761 bp, Zea Mays
gtcatcctcgccaccgtcaggatcttgcaaaggctgtgccagaggagcacaagaggtttctgcatgatttggtttggatacatgaagaggaaaatgtgccagttgatatggatggaggacaaatcatctgcaatctgattgctgtccatgctggcctagagaggaccatagatttgaatgagcaacttagagttttaagaactagagacacaagggtgccaaaggttcaaatgcttagtgggaggcaagatgtttgggacacacccaagggtctggccggcaagcagactattattgtaagtggccaccacgggaagctccacatcgacggcctccgatttataatcgacgaaggtggtggttatgaagacaaacctattgctgcgatagtttttccttcaaagacattgatcagaagtaccgaggaagcgggaaccacatcagagaggtgatctagagttctagacatcgtcaggagcagtgaacacggaggcacagttttttctctcttgaagttactgcttgtagtcatgtactcatgtcaaacgacaataggaataacgtccaaaggcaataagttggtgaaccggacctgcgttttctcaatttagtcactgatgactatatgtctatatatattgtaccttgatgctgtcaatttagacgagaccgtacatcctctttttttagggcaataaactttactccctgtcctcaaatatttgtacacaaagagtggtggtgagcaattacgatattac

SEQ ID NO: 17047 - DNA, 1195 bp, Zea Mays
gttagagttgtggtgagcttccaaaatgcgggcatgtcgtgttcatatataatcaatctctcacgagactgcatgaaccttaagaaatgctgaaatcgagcaggcaaggaacctatgatttctgatttgcatgtttactaaatgaacgcacaattttacaaaaatatgagaaattattttttattacgggaaatttcattgaggaagaagacaggcattggagaaacccaaaaggcacacacccaagatacaactctcacgggtaacaactaacagcatcagcaagcttgatgcagcaagcaaccagacgacagaaaagctagtctaatgtaatggctaatgccctgggggtgtctttgctccagcaagcagcagcacaccaaaggatggaatatagatgccccggcaagtaactcctggagtcattttggtccagctgggagcagcacaccagaatcttgcaaaggctgtgccagaggagcacaagaggtttctgcatgatttggtttggatacatgaagaggaaaatgtgccagttgatatggatggaggacaaatcatctgcaatctgattgctgtccatgctggcctagagaggaccatagatttgaatgagcaacttagagttttaagaactagagacacaagggtgccaaaggttcaaatgcttagtgggaggcaagatgtttgggacacacccaagggtctggccggcaagcagactattattgtaagtggccaccacgggaagctccacatcgacggcctccgatttataatcgacgaaggtggtggttatgaagacaaacctattgctgcgatagtttttccttcaaagacattgatcagaagtaccgaggaagcgggaaccacatcagagaggtgatctagagttctagacatcgtcaggagcagtgaacacggaggcacagttttttctctcttgaagttactgcttgtagtcatgtactcatgtcaaacgacaataggaataacgtccaaaggcaataagttggtgaaccggacctgcgttttctcaatttagtcactgatgactatatgtctatatatattgtaccttgatgctgtcaatttagacgagaccgtacatcctctttttttagggcaataaactttactccctgtcctcaaatatttgtacacaaagagtggtggtgagcaattacgatattac

SEQ ID NO: 17048 - DNA, 2097 bp, Zea Mays
acactgcttcttccacctccgccgcacacgttgctgccccccattccttccctcccagccagccctgctcgctcccgcgcgcgggctaatacacaatatctggcgccgctcctcctcggcttcggctgcccctcgcgcactcgcttcccgtgggccgcgcgggtgaaggagcgtacgtgcgggtggttgatttgtggctagctggtgcgcgcgggatggcgtcgctcgccgtgtccggcgcgaggctcggggtggtcgtgcgggccggcggctcggcgggatcgggcggggagcgcaggagtggggtggccttgccgtcggtgctcttcaggaggaaggacgccttctctcgtgtcgttctgggctgtgatggtgctcctggaaaagagctgctgatggccggatgtggcagtgatcacttgctttcatccacagagcctgtcgtggatgctctgcagcggtctgaaggattacaggtagcgagggcaacgacgtaagcaagcaaagacgatggctagtgcagacaaggctaccgggtgtcagcgcaacggagctgtcaggtcatcgattgagcagcgaaaatcgaagtcgtccggggtaacggagaccggaccagacccagcgcggcggcggcggcggacggaggtgtggcgtggcggtcgagcacggcgcaaggatggggagaggcgccgtccaaagtccaggcgagatggaagcggaagggccgaaggggtggggactggggactactctctgcatcgagttggacggcgtggatcaagccactctagaatcgaacgcctccggcgaacagccgtagcggaaacgccgcccgagatgtctgctccctccgccccaccccgcacggtgatctgtgtgggcgacgtccacggctacatcacgaagctggagagcctctggtccaacctccaggccgcactccccgccgacgccttcgccaccgcgctggtcatcttcctcggcgactacaacgaccgcggcccgcacacccgcagggtcctcgacttcctcctcgcgctcccgacgcgctaccccgcgcagcgccacgtcttcctctgcggcaaccacgacctcgccttcgcggcgttcgtcggggcgctgccgccgccgcccgacggctccccgttctcggccacctgggacgagtacatccacaacgaggagcacgaggggtggttccgcgggccgggattcgagggcatgcacgtgcaggggaggcggtggggcggggtcatcaaggagaggtggaaccccaagaagggcctcccgtacaagggctccatctacgacgcgcagcccaccttcgaatcctatggcgtcgcccatggttcctctgatcttgcaaaggctgtgccagaggagcacaagaggtttctgcatgatttggtttggatacatgaagaggaaaatgtgccagttgatatggatggaggacaaatcatctgcaatctgattgctgtccatgctggcctagagaggaccatagatttgaatgagcaacttagagttttaagaactagagacacaagggtgccaaaggttcaaatgcttagtgggaggcaagatgtttgggacacacccaagggtctggccggcaagcagactattattgtaagtggccaccacgggaagctccacatcgacggcctccgatttataatcgacgaaggtggtggttatgaagacaaacctattgctgcgatagtttttccttcaaagacattgatcagaagtaccgaggaagcgggaaccacatcagagaggtgatctagagttctagacatcgtcaggagcagtgaacacggaggcacagttttttctctcttgaagttactgcttgtagtcatgtactcatgtcaaacgacaataggaataacgtccaaaggcaataagttggtgaaccggacctgcgttttctcaatttagtcactgatgactatatgtctatatatattgtaccttgatgctgtcaatttagacgagaccgtacatcctctttttttagggcaataaactttactccctgtcctcaaatatttgtacacaaagagtggtggtgagcaattacgatattac

SEQ ID NO: 17049 - DNA, 2875 bp, Zea Mays
cacactgcttcttccacctccgccgcacacgttgctgccccccattccttccctcccagccagccctgctcgctcccgcgcgcgggctaatacacaatatctggcgccgctcctcctcggcttcggctgcccctcgcgcactcgcttcccgtgggccgcgcgggtgaaggagcgtacgtgcgggtggttgatttgtggctagctggtgcgcgcgggatggcgtcgctcgccgtgtccggcgcgaggctcggggtggtcgtgcgggccggcggctcggcgggatcgggcggggagcgcaggagtggggtggccttgccgtcggtgctcttcaggaggaaggacgccttctctcgtgtcgttctgggctgtgatggtgctcctggaaaagagctgctgatggccggatgtggcagtgatcacttgctttcatccacagagcctgtcgtggatgctctgcagcggtctgaaggattacagcctgctgcagcctgtgcactggagcagcaggggcgagagtggaggcgagagctgacgtggcaggggcgaaagggaggctgtgcactggactcagccttacaagtttgagttaagattatgagattctaatgcaaaatttagaagttgcgtggctaataataagattcttaaaacgagatatgaaccaaccatgcccatgccatagatcacaggaggaaacctgggaggggggcaaacatttggtccttgtagctacatctaatttttgatctcatatctatttttggaatacgtaatacatctatttttttggaatacataaaatctcatatatatttgttcgtcgctagttatttacatagtgcgcgccatcgagaaaaggtatgtttcattcataacaggtctattttggtttgtttggatgaaactgagacccaaacatcgattgattctgtaagagatacttcctttgtcctacaatacaattcgttttagcacttaggttttatgtctatattcaaatagatgacgataaatttaaacacatatataaaacaaatatattaattattgtataaatataataaaatattaaatcgaattttaaattggaatgagagtatactttaaaagtttatagattgattgacatatttaaacaagtttaactatcgaaaatacactttactaaaaaatactacgcttccaaatgagactctgtcttcacaaccgatgcagcagctgctgctgaaggaacagcaagcggccgaacggtgcgtcacctcgctgctgcagacggtgtgcggtgaaagtaccatcatagtaggatgtccggtcttttccagcatcatctcactcgtggcggccgctgcagcagcgaaaatcgaagtcgtccggggtaacggagaccggaccagacccagcgcggcggcggcggcggacggaggtgtggcgtggcggtcgagcacggcgcaaggatggggagaggcgccgtccaaagtccaggcgagatggaagcggaagggccgaaggggtggggactggggactactctctgcatcgagttggacggcgtggatcaagccactctagaatcgaacgcctccggcgaacagccgtagcggaaacgccgcccgagatgtctgctccctccgccccaccccgcacggtgatctgtgtgggcgacgtccacggctacatcacgaagctggagagcctctggtccaacctccaggccgcactccccgccgacgccttcgccaccgcgctggtcatcttcctcggcgactacaacgaccgcggcccgcacacccgcagggtcctcgacttcctcctcgcgctcccgacgcgctaccccgcgcagcgccacgtcttcctctgcggcaaccacgacctcgccttcgcggcgttcgtcggggcgctgccgccgccgcccgacggctccccgttctcggccacctgggacgagtacatccacaacgaggagcacgaggggtggttccgcgggccgggattcgagggcatgcacgtgcaggggaggcggtggggcggggtcatcaaggagaggtggaaccccaagaagggcctcccgtacaagggctccatctacgacgcgcagcccaccttcgaatcctatggcgtcgcccatggttcctctgatcttgcaaaggctgtgccagaggagcacaagaggtttctgcatgatttggtttggatacatgaagaggaaaatgtgccagttgatatggatggaggacaaatcatctgcaatctgattgctgtccatgctggcctagagaggaccatagatttgaatgagcaacttagagttttaagaactagagacacaagggtgccaaaggttcaaatgcttagtgggaggcaagatgtttgggacacacccaagggtctggccggcaagcagactattattgtaagtggccaccacgggaagctccacatcgacggcctccgatttataatcgacgaaggtggtggttatgaagacaaacctattgctgcgatagtttttccttcaaagacattgatcagaagtaccgaggaagcgggaaccacatcagagaggtgatctagagttctagacatcgtcaggagcagtgaacacggaggcacagttttttctctcttgaagttactgcttgtagtcatgtactcatgtcaaacgacaataggaataacgtccaaaggcaataagttggtgaaccggacctgcgttttctcaatttagtcactgatgactatatgtctatatatattgtaccttgatgctgtcaatttagacgagaccgtacatcctctttttttagggcaataaactttactccctgtcctcaaatatttgtacacaaagagtggtggtgagcaattacgatattac

SEQ ID NO: 17050 - DNA, 1217 bp, Zea Mays
cacactgcttcttccacctccgccgcacacgttgctgccccccattccttccctcccagccagccctgctcgctcccgcgcgcgggctaatacacaatatctggcgccgctcctcctcggcttcggctgcccctcgcgcactcgcttcccgtgggccgcgcgggtgaaggagcgtacgtgcgggtggttgatttgtggctagctggtgcgcgcgggatggcgtcgctcgccgtgtccggcgcgaggctcggggtggtcgtgcgggccggcggctcggcgggatcgggcggggagcgcaggagtggggtggccttgccgtcggtgctcttcaggaggaaggacgccttctctcgtgtcgttctgggctgtgatggtgctcctggaaaagagctgctgatggccggatgtggcagtgatcacttgctttcatccacagagcctgtcgtggatgctctgcagcggtctgaaggattacagatcttgcaaaggctgtgccagaggagcacaagaggtttctgcatgatttggtttggatacatgaagaggaaaatgtgccagttgatatggatggaggacaaatcatctgcaatctgattgctgtccatgctggcctagagaggaccatagatttgaatgagcaacttagagttttaagaactagagacacaagggtgccaaaggttcaaatgcttagtgggaggcaagatgtttgggacacacccaagggtctggccggcaagcagactattattgtaagtggccaccacgggaagctccacatcgacggcctccgatttataatcgacgaaggtggtggttatgaagacaaacctattgctgcgatagtttttccttcaaagacattgatcagaagtaccgaggaagcgggaaccacatcagagaggtgatctagagttctagacatcgtcaggagcagtgaacacggaggcacagttttttctctcttgaagttactgcttgtagtcatgtactcatgtcaaacgacaataggaataacgtccaaaggcaataagttggtgaaccggacctgcgttttctcaatttagtcactgatgactatatgtctatatatattgtaccttgatgctgtcaatttagacgagaccgtacatcctctttttttagggcaataaactttactccctgtcctcaaatatttgtacacaaagagtggtggtgagcaattacgatattac

SEQ ID NO: 17051 - DNA, 406 bp, Zea Mays
tggcgccgctcctcctcggcttcggctgcccctcgcgcactcgcttcccgtgggccgcgcgggtgaaggagcgtacgtgcgggtggttgatttgtggctagctggtgcgcgcgggatggcgtcgctcgccgtgtccggcgcgaggctcggggtggtcgtgcgggccggcggctcggcgggatcgggcggggagcgcaggagtggggtggccttgccgtcggtgctcttcaggaggaaggacgccttctctcgtgtcgttctgggctgtgatggtgctcctggaaaagagctgctgatggccggatgtggcagtgatcacttgctttcatccacagagcctgtcgtggatgctctgcagcggtctgaaggattacagcgaaaatcgaagtcgtccggggtaacggag

SEQ ID NO: 17052 - DNA, 3923 bp, Zea Mays
cataccaaaagccatatagtcactggtttgacactgtcccatatccacaaggggcaaggataccagaattttctaagttttctggtgagaatgggagaagcacatacgaacacataggccagttcctatcacacctaggcgaattggctgatggagaagcatttcgtgttcggttattttctttatcgcttactggtaccgcttttgcatggtacgccacactgcctcctaattccattaattcctggaatgagttagaaaataaatttcatgaacatttctttgccggggaatatgaattaggattagctgacttagcttcagtccgacaaggacgcgaagaatcggttaatgattatatccggaggttccgggacactagaaaccgatgctttcggatccatgttgcagacaaagagctagcagggctagcttttaatgggttgctatcctacttaagagacaaattagatggaacccagttcttttcgatagcccagctacatgagcgggctttagcctgtgaaagccgatttaaagagacatcaaaatcggtcacccgtactatacatctaatagagcgtgatagttcagatgatgaatcagcagatgtatataccgctgagtttatttggccaacaaaggccaaatcttcagcacgttcttccttacagccggttcaaaagaatcggcaagaagagattaaatttacctttaatgttgccaaatgcgataagatatttgatgagctacttaaaaatggcaacattaaattaactcataatatccctcctatagatgaattaaagaggcgtgcttattgtaagtggcataattctttcaatcatgccatcaacgactgtaatgtttttcgtcgacaggtacaatcggccataaatgagggccgattggcttttcaggaaatgcaagtggacacacaaccatttcctgttaatacaatagatgtcgcatgcgaaaagatcttagttcggcccgaaatggccgataaaagcaaaagcaaagacatcatcattgacgatcctcgcacgtcaaatatatcgcaaaaggagattgctcgaaaggctccggacgataaggctaaaaagtccggaggcaccggggggcaggcacaattaatgagccaagcacgacagcctggcctgagcatcacagacggtatgacacctacgtgcggacggtccggtgctcagacagacggttcggctaactctgccggacaatccgcctatggccaaaggcgtcatcctccacacaaagccttaaaagggaaagagacgcaacgacaaagcacatatggtcggttgatcaaaactgactctacttttgatcagttgctctccaagaatactagcaagaagaccgttctacgtgatcggtcaacaaagaaacctcggtcacctgctaaaacaaaacgggtaaacaaaacggctcgaaaggcgacacaacaagcatcgcctattcatcctatgagaccaaggtactttccacccgtttactcatcgtcggtatattatcctgttcacacatggaatggtacgatgatgaatccatggtatatgtatagtccctttgtctatccaggctgggggccacctccattctattccttttgatccattgatcaaacggtcatggccgagaaagataaaatccgaaacggcctttatattggtgctttattgaatgatctccatattgaaaagccggtgacttacatcaggtttagttcatatgcttttggttcgtcaaccttcaccaaaaggcagggaggcatatgttggagaccaaaaagagcagcgcggacagtccggccctgaggccggacggtccgcgatccggacagtccgcggtgatggcgcggacggtccacgcgtgcgcagagtcagttagggttcctagtttctcgcgggatttgttacctaaaaccgcgggattaactcggaaatcagttggaagcggatctagacctccccctttatatagatgaagggctacgaccgattgaacccccaacaatcgaaccaataccacttctatttcacatttatttccagcacaattaggagtagttctagtctagttctagtttagcctctcaatctccaaattctccacctctcttcgactctacgtcgattagaggagtctaggtcggtctacccgagcctagacaacacctaggatctctcctccccgacggggtccctcccgggagcgagatccaggcgccgccggcgaccttcgccgccccctgcgcacgcgcggaccgtccggcctgtaggcgcggaccatccggtcgttaggcagggaacctttgcccctgctctaggtcgcggaccgtccggccctgtgccgcggaccgtccgcgcctgaccagagaacaccgccgccggttcttgttgagtgattggcgctccgaaaaggcgtcaacaacatcaaaacatggtataagcgatttcattttcacaagagaaattagtttattttctattgaaaaaaataagaaacctttgagaaaatgatgttactaaactagccctaaacgtaaattcggtttcccaaacgagattaccttcagacgattttaatcctattaaaaattatccgagtaactatttctatatgaataaaaaccaccggtattataataaccggcaacataattaattattataaatacctctagctttttatgacaaacattatatataataattattcggataattattcaataaaggtactcgtattttcacccgactttattagagtcaaataaggaattagtgtatttattggtttgacgtactgttataatgcagaaatttcttcgtgtcccaacccttcttgctttctgcggtctagctcggcaacgggtacaaaacccccgggtattagtttcataaacatatacctgctaggaaatagcaaacccgtacccctgctcgcaacccgtgtccggtactgtataacatccgcacccgccacctgtgggttttataaacccgcgggcgcaacagactcacgggcacacccacgggtgcaatagacccgcgagcaaacccgtgtgctcgccaggcatctactagcaaacaatccatccagttccatacaacaagcaatgattccaaacacatgcaatttccaaatagttccatacaacaagcatacaacaacttcagttccaaacaggaatccttacaaacaaccatactgtttcctaacacatactgtttgcttagaaacaagcatacaagtttgcttagaaacaagcatagtatgcacaggaactggattggggatttgctgagaccgagcttatatatatatcgggttcgcgggtatacgggcacgggttcaaacattttatacccgcgaagataaacccattgggtacaaatttaaacccgtacccttacccgtgggtataaacccaaacccaaacccgaactctatagggtttgtgcccgcgagcacacgtgtaatctgtacctattctatccctagctcgacccgactagcctgtgacaacacatatagtgtttgaactatagttgttggtttcaagcacacatttacgcccatctagccaataaacacacacatacttttatggtttatactctatactcaaatacaatatagatatttttataaaaaaaatagagaaaaaaagccatatcatgttaaatctagctcgtcgtgccagacctaaggtctaggcaccgtacaatgatttagtcgggtcagcatgagttcgatggacaatggattgagcctggtcacgagttatccaggaacctttgaccatttggacatgtatacgcgcctgtgtaagcaggtagcgagggcaacgacgtaagcaagcaaagacgatggctagtgcagacaaggctaccggg

SEQ ID NO: 17053 - DNA, 2933 bp, Zea Mays
ctttgctttacttcagcacaccgacaagggagggagtgcggccgttgcgggacacgaggaaaaagggggcgaagcacggccacggtagccagcacgctgcgcgcctctactagtactacaggctacagggctccgtgatgccggcggctctcgacccaggacagcggcttctctgttggcccaagtgcacgcgactgactgccggtgctggtgccttgaaatgcggcagccgttctacggccggcctcccgtccagatgaaggtgcagctggtggaacaggaaggctccaaggggatgggttcttccgggtgcgcggagatagtcgagctggcggacgacccgaaagctgctcgtcctgctgcgcatctgagagtgagggtcaagcccgtggggcaggaggatggggcgcggtcgtgctcgctggaggatgaccttgaccagctcatcaggtcggtcaacgtgcgcacgtcggcgagggcttctgggcagaggagcaccgatagatggcttattgggctcgggaagtcgccggtgtcgggctcagagattgtggagtccgtgagcctgaagcaggcccttaggaagatgtgcatctcccaggcgtcggaaatggcagccatgaagaggctgtcaaaaccgacaggggcgtccaccccttctgattctggggcgaccaagaagctatatggctctgttgcagttcaagccaacggggagcaagatgacaagagtaaggtgggcaacgtttatatgctgcctgagaaactggcaggaagttcgattggtaaggcaaatgaaatcagcaaggggcagagtaagagctcagccaagaagaatttgagatcagcatctcctaccgcagtcaaggttcgcaaaaccagaatccaagatgtgatcagtaacaagtcatcagaggcggttgaagatgtttctgtaggagcaacactgccaaggcaaaggaaggggaaatctgtgaaaacgtctagcccccgggctgttccggtcggtggctcacggctggtgaggccaatgtttcggaacaaaacctcgaccaaaaagaaggtcaaacctgaacctgctatagtgcccgcatcgcacaagcattgtgagacgaaaggtcctaagtctcacgctagtaaacagaaggagtcccttcaggatgaacccagaaccccagcaccagctaacaagaaggctgctgtcagctccactgttgatggatctgattttggcaccaaagggtgtggcactggtgtgatccatggcccgaaggttggtgagctgtcaagatcaaaggagaagggtgaatgctcccaaagctctaagagtagcattggtgattatagcaccagcaccagcatcagtgaggacagttatggcagcttcagtgctaacggaagcaggcctcacatgtcaaaggatgtgagatggggagccatcaggtgcatggctatccaacaagggagcttgggattgaagaacttcaagcttctcaaacaacttggttgtggggatattggcactgtttatttggctgagttagtgggatcagactgcatgttcgctttgaaggttatggacattgagtacctcataagcagaaagaaaatgctcagagcacaaactgagagggagatactgcaaatgctcgaccacccgttccttccaactctgtattctcatttcacgacggacaacctttcttgtctggtaatggagttttgccctggtggtgacctgcatgttcttaggcagaaacaacctaccaaaaccttttcggaagcagctgcaaggttttatgtcgctgaagtcctcttagccttggagtatctccatatgttgggggtcatttaccgtgatctgaagccagagaacatacttgttcgagaagatgggcacatcatgctctcagactttgatctgtctctgaggtgctcagtgagcccaatgcttgtgagaatatcatccgtaggcagagatgagcccagcaggccttctggtccttgtgcacaaagctgcattgatccgctgtgtatccagccatcctggagcaattcctcttgcttcacgcctcgtctggtttcgtcacgaaggcctagagccgagcttctgaagaaaccatcacttccacagctcgttgttgaacctacggaagcaagatcaaattcgtttgttgggacccatgaatatcttgccccagagattattcgaggagatggccatggtagttcagttgattggtggactcttggaatcttcctttacgaattactctatggcaagacaccattcaagggacctggcaatgaggaaacactctcaaatgtgatctcacagggcttgaagttccctgataatccagctgtaagcttccacgctcgagatctgatcagagggctgcttgtgaaagagccagagtaccggcttggctcgtcgagaggagccactgagattaagcggcatcccttctttgaaggcctgaactgggccttgatccggtggaccgcaccaccagagaccctgaagaacattgacactgcaccaacacctgtaacgacacgcaagaaaaaggaaggcaaatgtctggaattccggctgaatggtgacgacatcgagttcgagctcttttagttgtagctgtagtggcatcgctgttgtagtgtcaaggatatatcaaatatcatgataagctagcaagagtagtcttagtccctcttccctgcagttttctgttgaaagttagtcatcgttgggaagtaaggtaagattggctgttaagcctgtaactttatgccttgttaataccatcaaatattagaagacacggttgggaaattcctgggcatgtgcgagatgctgagatgcagctggcagaaagtgtacattgtgttgctggatggaacaatttgtgcctcgcttacttgatgataca

SEQ ID NO: 17054 - DNA, 1353 bp, Zea Mays
caggactgttacctcctatatattatcgatcagaagctagcgctcttcagtacttcaggcttagccggccatgtctagggcgttggagcctctagtcgtcggcaaggtgatcggcgaagtcatcgacaacttcaaccccacggtgaagatgacggtcacctacggctccgacaagcaggtgttcaacggccatgagttctttccgtcggcggttctgtccaagccgcgagtgcaggttcagggcgacgacatgaggtccttcttcacactggtcatgacggacccagatgtgccagggcctagtgatccatacctgagagagcacctccattggatggtcactgacattcctggaacaactgatgcttcttttggaagggagcaggtgatgtacgagagccccaaaccctacatcggcttccacaggttcgtcttcgtgctgttcaagcagagcagccgccagtcggtgtgcccgccctcgtccagggactacttcaacacccgccgctttgccgccgacaacaatcttggcctcccagtcgccgccgtctacttcaacgcgcagcgggagaccgccgcgcgccgccgctgagcgatcacctgcagcgaccacatgaattcccaaccctacgtactactcccatctcatcatcgcatgcatggcgcagcatgcaagatagacctatcaatctggctacgtactatgcggcctttgctgtttcctaacaggccatggtcaaataagagcttatgactcgtctttggggctgatttggtaacaacatatttggaggggattccgggagaaacaacctttatattcatttgaatagaaagaagttttctctcctatggatctcctccaaatctctggtcaccaaaccagtctcttagggagagctagctttccttatctatgctagtccgttcttcagtttttgagttattagtagcctctctgtgtgcatgagcactcatggatgtaataagatgtaactcgtgggtacgtgtgccactagtgtgatcgtgttcaactcgatcagctattcaactcctacacatgcaggtgaaggatgcgtgaatcgtgctggaaacacgcttgctttgactagctaggagccgtcagctgtgcttgtgagagtcacgaaggctgcggacgtgtcgagtaacggtgaagggaggaggtaaaaggctgtggccatggcccatggctccagctagctagtgctctcccctcatattacctacaatgctgttatgcttgtgtgcctgcttgcaggcagtgtacttgttcctgaccctcttggattgtcttacttgtgtatgttatgatcactataatatatagccgag

SEQ ID NO: 17055 - DNA, 1535 bp, Zea Mays
gttttagtctatcgactgttgatctcagtagacctgccaacgccattgcattgtcagtaaggtgacaggataatgacttggtgagagtgcgtgatgaatgaaagaaaaagattgttctcacagtttcgtggaggaggaaaagggatttcgctactagctgtaggtgagtaatacaccagaaggtctttgtatgcatcaagaatatatattggcctctcactggtgaacacagtccggcttagtgattgatgtacttctgcttctacatcgggggaggagtatgaaatcaacgtaggccaaatagcctgccgaagcgaagctggctccagtgcactgcccatagaatagatgtaaacactaaacagtattgatctaatgtcgattgaaatcaagtttaggcgttttcagactaacgatcacaacttacaacaacaacaaagcctttttgtcccaagcacgttggggtaggctagagatgaaactccatatgaaaacctcagagctcaaccccaaagaaaagaaaagggagacaggcaaaggagaaccgaaaaacgacgaaacgaggaaacacataaaaagagataaaactcacaagaaccagcaagatctaaaggggcacaagaaaaggtcaaacgatcacacattgaactaccaaaagtaagatgagatggaaaaaatatcagaaagaatacttcgatttgaattaactataggagatcagtaactatgatccacataatgtttaatgtatttccacagctaccacccacggcataatacaagcttcatgtctgtggttgcatcatatacaagcttacatgcatcacccatagaaagtgcctccacataagggctgtttggatgtctatgtatccccccccccccccctcaatccatgtgtgttagagtggtttagtgtgaaattatatctcagttttagaaaatgtagaccacaggtgggatcagatctgggttcaaaagccttatttttcttacgaaacagttacaaagctctcatctttgagctcaacaaacttcataaattcataatttactctagctagtgctaaagttatataacgagctaagagtatgaagatgtcatatgccagttgctattattttacatgaacagtacttcagtactttagcatgagactcgagaggttaggacagataagttacgatatctagtgtttgttacgctatggccagcagatcgtgtatatagccgtgcaaaacattgttttgtactataaaatgcattgtttacagagtgaagtttgaaatgagagatgatgatgagtaagctgctgaagatagccttaggctctcatctagcgcttgttagtcaagttgtcttgtcagtcatgaccccttaccaaccatttggggtcaataaagtgataatcaatttaagcttttccagtttatatcccaatccctcccctatctgactctgcctagctatcctcacggcagtgtttacacctaatgaactaggattcattacagaacaagagtagaagacacat

SEQ ID NO: 17056 - DNA, 1659 bp, Zea Mays
cagacagtcagactgctagacaccacagcgtgctcagacagtcagaacggatcgagcgttcatggagattggtggtcagacggagagcggtgccaatggaggcggcggcggcgggttccgggcggcgaggtgctgggagctgctccgctgggcggcgggcgtgctccggggcaaggccgtcgggctcgccggcaggctgggcaggatcgcgagggacgagccccggcgggtggcgcactcggtcaaggtcggcctggcgctcacgctggtgtccgtgctctactacgtcaggcctctgttcaacagctggggggcctccaccatgtgggccgtgctcaccgtcgtcgtcgtcatggagtacaccgtcggtggcacgctgtgcaaaggcctgaacagagcgtcggggacgctggtcgccggcttcatcgccgtcggggctcacaaggtggcctacatgtgtggggacaaggcagagcccgtactgctcgccatcttcgtcttcttactgtcgtcggcggcgacgttctcgcggttcatcccggaggtgaaggcgcggtacgactacggcgtgaccatcttcatcctcaccttcagcctggtggccgtgtcgagctaccgcgtcgacgagctcatccgcctcgcgcaccgccgcttctccaccatcgccgtcggcgtcgccacctgcctctgcaccaccatcttcgtcttcccggtctgggccggtgagggcctccacaagctcgccatcgcaaacctcaacaagctggcggagttcttggaaggaatcgaatctgaatgcttcagagagaacgctacattcgagaatttggaagctaaaccctttctccaagtgtaccagagcgtcctcaactccaaggccactgaagactctttgtgcaacttcgccaagtgggagccatgccatggcaaattcaaattgcgacatccatggagccaataccagaagctcggcgctctttgtcgcgagtgcgcttcttcaatggaggctctctcctcctacgtcgtcaccctagcaagaaccgaggttcgaacagcatgccgccagatgagcttgcactcggccaaggcgctccgagagctcacagcagcgatgcggacgatgacgactgtaccgtccccagccagcgtccacgtgtctgcagcgatcaaagcggcgaaaggcctcagagacgggttatcagagggtgcggatctggcgcgagcgatgcatgttgctgttatcgcatctcttctctctgagttggttaccaagaccaagcagatcactgagtccgttgatgtcctcgcgcgacttgcccgcttcagaaaccctgaaaccactcagactcacaagggtgtggctatcgatgtagtgagctgagagtgagaagcagacgatcttcggtgggacttcactagtgatactctgtatttgtatcagaagccttttgctgaatgggataaaacagcgagctagtatgaagtacaatactaactgtgcatacagcaagtgactgatcctttgatttgtggaatcaattatgatgctggattgcgacggtaaatgtcactgtcttccacagttgcacagcaattagcttttctcagaagtaaaaataaaaacaatattcttctcaatattagggaagaaaaaaaaat

SEQ ID NO: 17057 - DNA, 1770 bp, Zea Mays
cagacagtcagactgctagacaccacagcgtgctcagacagtcagaacggatcgagcgttcatggagattggtggtcagacggagagcggtgccaatggaggcggcggcggcgggttccgggcggcgaggtgctgggagctgctccgctgggcggcgggcgtgctccggggcaaggccgtcgggctcgccggcaggctgggcaggatcgcgagggacgagccccggcgggtggcgcactcggtcaaggtcggcctggcgctcacgctggtgtccgtgctctactacgtcaggcctctgttcaacagctggggggcctccaccatgtgggccgtgctcaccgtcgtcgtcgtcatggagtacaccgtcggtggcacgctgtgcaaaggcctgaacagagcgtcggggacgctggtcgccggcttcatcgccgtcggggctcacaaggtggcctacatgtgtggggacaaggcagagcccgtactgctcgccatcttcgtcttcttactgtcgtcggcggcgacgttctcgcggttcatcccggaggtgaaggcgcggtacgactacggcgtgaccatcttcatcctcaccttcagcctggtggccgtgtcgagctaccgcgtcgacgagctcatccgcctcgcgcaccgccgcttctccaccatcgccgtcggcgtcgccacctgcctctgcaccaccatcttcgtcttcccggtctgggccggtgagggcctccacaagctcgccatcgcaaacctcaacaagctggcggagttcttggaaggaatcgaatctgaatgcttcagagagaacgctacattcgagaatttggaagctaaaccctttctccaagtgtaccagagcgtcctcaactccaaggccactgaagactctttgctcctgaatccagaaaaaaaatatacatagaagtaaatgcgatccaatggcatgtgttcccaaaaccccccgcagtgcaacttcgccaagtgggagccatgccatggcaaattcaaattgcgacatccatggagccaataccagaagctcggcgctctttgtcgcgagtgcgcttcttcaatggaggctctctcctcctacgtcgtcaccctagcaagaaccgagtatcctgaagcgcatccggagctatgctcacagcaggttcgaacagcatgccgccagatgagcttgcactcggccaaggcgctccgagagctcacagcagcgatgcggacgatgacgactgtaccgtccccagccagcgtccacgtgtctgcagcgatcaaagcggcgaaaggcctcagagacgggttatcagagggtgcggatctggcgcgagcgatgcatgttgctgttatcgcatctcttctctctgagttggttaccaagaccaagcagatcactgagtccgttgatgtcctcgcgcgacttgcccgcttcagaaaccctgaaaccactcagactcacaagggtgtggctatcgatgtagtgagctgagagtgagaagcagacgatcttcggtgggacttcactagtgatactctgtatttgtatcagaagccttttgctgaatgggataaaacagcgagctagtatgaagtacaatactaactgtgcatacagcaagtgactgatcctttgatttgtggaatcaattatgatgctggattgcgacggtaaatgtcactgtcttccacagttgcacagcaattagcttttctcagaagtaaaaataaaaacaatattcttctcaatattagggaagaaaaaaaaat

SEQ ID NO: 17058 - DNA, 2570 bp, Zea Mays
cggaggcggcgattactctataggttaacctacgccgccagattagtttggtggtggttagcctgggcctgtgttttctttggtttgctttattattgacaacctgtgacagttcagtgttgtggactctgatgacagtctgataccccactgccttcactgagtgctagagcccctccttgtcaattcactgtctggtgctgaatcgagttcattgaagatgccaaggtccgaatcagacagtgatgatgttttcttcgatgcatttgaagatgttctatctgcaggggaaccttcgttttcagaggattgcagcacaagtgatgaagtttcagggccaatgaaattagagtatgagatttgggcaaacgaaccaattagtgttcaagaaaggcgccaaaggttcctgaagggaatgagactcgatgatttcgtgtctacgaggataggttcttttcaatgccatggtgaaatcacagccgtcgagtcttccactgacatggaggagagaactgtcagtggcctttcttccggggattcatctgtttgtgacaatgagtcagattttgacggtgcctgttgcataagggatacggatactggaaagagatatattgtccacaatggtgcacacagcagtataactggcatgcccaaggaggttggatcagataaggtgatgactcttctggagtttgagagtttgcttggcctctctaggtctgttcaaaagttattgcggaggggatgtggtaacagtcctgcaaaagaaacaaaaagtgctaaggaaaaggacggcaaaagctcgtcaaggaaattcgttacaaagagaagctttggtggcatttgcaagtacgatgtccatgtgaaaaattgcacaaacagtataccaaccagaacaagagttcagcaccggaagaaaaaatttcttgaattctctgctgtgtacatggatcaagaaatcagagctcacaagggttcaattagggtcatgaaattcagcccatctggctggtatttagcaagtggcggtgaggattgtgctgtacggatatggcaaatcatagaagtagaagcatctcctaagttatacaggggagaggatccgcatgaaaaggtggaaaaagttcaggtctttaagacaaatataggaaagaagcacaaccctgcacttgcagttatacccaagaaggtttttcgtatatcagagactccattacatgaatttcgtggccatgcaagtgatatccttgatatggcatggtccaaatcagattgtctgttaacttcatctaaagataagacagtgcgcttatggaaaccgggctgcgacggttgtctcgcagttttcaaacacaaagactatgtaacatgtgttcagttcaaccctatcgacgagaaatacttcatgagcggttcattagatggtaaagtgcgcatttgggatgtgttggacaaacgagtaactggctggacttatacgcgaactatcataactgctttgagttaccagtcagatggaaagggttttgttgttggcactattgcaggcgcatgtcgtttctatgatcaatctggtgaaaacatccagctagagaaagaattgtttgtgcaagggaagaagaagtcagccgccagtcggatcaacaatctaaagttatgtacaagtgattccaatagggttgtagttacatcaggagattccaaaatccgagtcgtcaatggtgataccatccaaaagtttgaagggccttggaagtcgaaggctctgtcatcgccgtcattaacatcagacggcagataccttatatctgtgggcaaagattccaacgtctacatttggaacttggcgaactctagagatgcaagatcggttcattcgtgcgagctgttcttctccaaagctgtaactaccgcagtaccatggccgggagtgtaccaagatgggcacacgaagccttcctatctgactgagaaatactgcagcatgcccattttgcgccaccacggggagtgccagtccgctgagccgtggtcgttcgtggacggcagcaagggattggcgacatggcctgaagagaagttgccttctacagcaaagcctggaagcagcccgcagctgggcgactgtctctccatgatatccgccgcgtggagcacggtcatcgtgaccgccagccgcgatggcgtgatccgatcttttcacaactacggcttgcccgttagattgtgagcttcgagaccggtttgaggtagtcagtggagcgccgccatggttggtgactgataatccgctaaggttttgtaagtttttttttctttttcttttctggtcagagttactagaaattatttatgtaacatttttagatcattaatttcttgtgaagagatgatctgtagtcagtccaaggccaaacacttgtgctgttttttgctggatggttgtgacaaaagtaaaaaaaaactcaaccatccagttatagttagcgggaaaatatcctatgcaatcacttatcctggtgcaagcatgcaatcaagcgatctggtgcatccgatctagatctaat

SEQ ID NO: 17059 - DNA, 173 bp, Zea Mays
ctctaaagcagctgatacgagagccacatcgcctaagcaaacaggagaaaattatcacgagcaatagcaatttgacacagcgcccaagctttatcactggccaatccgtccttctgctggcagcaaatcaatcaatcaattcacacggatggcacgaacgaaacataagaaac

SEQ ID NO: 17060 - DNA, 2889 bp, Zea Mays
ctctcttctccctcctcctctttcttctccggtgagaagagaatgaagggccagtggccatggcggcaccgtcatggatctccccgtcggtgtgcccttcctcgtaagggcgctgctgtaggtgaggtcctagcgatgcttgagtatttctaaaaggaagccgaggtggaggatgatgacgataagtcgctgtcatctacggctcagaccccgggtaaagaagaaatgagaggtggatgtggatgggtggtgtgggctccctggattttatatataaaaaaaccgacctcgtcccttgcattctgcagctcaggagcaaacaaactccagttctcccattgatatctcgatcatctcctgatacacttctcccgtcatgcatctccttgccgctctttgcggcatccttttctccctgctgcacactcctacatgctcggcagcgacagatacactctcgcgcggtggttcgctggccggagacgcgaggcttgtctccagcaacggcaagtacgcactcggcttcttcgagaccaacagcaacaatcccacgcacaacgcctccaactcgtatcttggaatatggttccacaaagtccccaagctgacacccgtgtggagcgccaacggggacaatccggtctccagccctgcttcgccggagctcatgatctccgacgacggcaacctggtcatcatagccgacgacggcaccaaggtctggtggtctacccaggccaacatcacggccaacaccaccgtcgtcgtcgctgttctgttggccgacgggaaccttgtcctgcggagctcctccaactcctcggacgtattctggcagagcttcgaccacccaaccgacaccctgctgcccggtgcgaagctgggcagaaacaaggtcaccggtctggaccgccgttttgtttcaagaaggaattcgaacgaccaagctcctggtgtttattccatgggcctaggtcctggcgcccttgatgagagcatgaggctctcatggagatctacggagtactggtcctccggtgagtggaacggcagatacttcgacgcaataccggagatgtcgggtcctcgttactgcaagtatatgttcgttaccagtggcccagagttctacttctcctacaccttggtgaacgagagcacagcgtttcaggtcgtgctagatgtctctggccaatggaaggtgcgcgtatgggactgggacagaaacgactggatcacgttcagctactctccaagaagcaaatgtgatgtctatgctgtctgtggagcctacgggatctgctctaacaacgcaggtccgttgtgctcctgcatgaagggattctctgtaaggtcgcctgaggactgggaaatggaggacagggctggcgggtgcatcagagacactccattggattgcaacgcgacaagcatgacagataagttctatcccatgccatttagtaggctgcccagtaatggcatgggtctgcagaacgctacaagcgcggaatcatgtgagggatcttgtttgagtagctgctcttgcactgcatattcctacggccaaggcggttgctctctgtggcacgacgacctaaccaatgtagcagctgatgatgacactggcgagactctctaccttcgccttgccgcgaaagaggtccaaagctggcaagaccgccatagacatggaatggtcaccggtgtaagtgttgctgtgggcgtaagcactgccactgtgatcaccctagtgttggtctctctaattgtgatgatgatctggaggcgaagcagtagtcatccggcggacagcgaccagggtggcatcgggatcatcgcattcaggtacgctgatataaaacgcgcaactaacaatttctcggagaagctaggcacgggtggcttcggctccgtatttaaggggtgcctaggtgagtcggtcgccatagccgtgaagaggctagacggcgcccaccagggagagaagcagttcaggtccgaggtgagctcaataggcatcatccagcatgtcaacttggttaaactcgtcgggttctgctgcgaaggtgacaggagactccttgtctacgagcacatgccgaaccgttccctcgacttccacctgttccaccagagcgcgcatggcggtggcaccaccggtttgcgctgggacatcaggtatcagatagctctcggtgttgccagaggcatagcgtacctgcaccatagctgccgagactgcatcatacactgtgacatcaagccgcagaacatacttctcgacgcgtccttcgttccgaagatcgcggacttcggaatggccaagtttctcgggagggatttcagccgcgtcctgactacgatgagaggaactgttgggtacctcgcccctgaatggatcagcggaacagccatcacatcgaaggtcgatgtttacagctacggcatggttttgctggatatcgtatcgggaaggaggaacgccggcagagaagcttccaccgacggtgattgttgccatgccaagtgttgtttccctgtgcaggtcgtggacaagcttctcaacggaggcgtcggaagccttgtggatgcaagcttgggcggcgatgtcaacctagacgacgttgaaagagtctgcagagttgcgtgttggtgcgttcaggataatgagtatgatcgccctacaatggttgaggtggtacagtttctcgaaggcctgtctgagcctgatatgcctcccatgccaacattccttcatgctatcgctggtggatcgccttgatgctttagggcttgttcgttttgttgttaatccatgtggattattgaatgcgatatctcaatccactgcaattcacataaattacttgtatgcatgagcgtaat

SEQ ID NO: 17061 - DNA, 2953 bp, Zea Mays
cgcgtcgctctcttctccctcctcctctttcttctccggtgagaagagaatgaagggccagtggccatggcggcaccgtcatggatctccccgtcggtgtgcccttcctcgtaagggcgctgctgtaggtgaggtcctagcgatgcttgagtatttctaaaaggaagccgaggtggaggatgatgacgataagtcgctgtcatctacggctcagaccccgtcatgcaacttggatctgcaagtagctgcaatgatggaccgtcttacctccaaccagggtaaagaagaaatgagaggtggatgtggatgggtggtgtgggctccctggattttatatataaaaaaaccgacctcgtcccttgcattctgcagctcaggagcaaacaaactccagttctcccattgatatctcgatcatctcctgatacacttctcccgtcatgcatctccttgccgctctttgcggcatccttttctccctgctgcacactcctacatgctcggcagcgacagatacactctcgcgcggtggttcgctggccggagacgcgaggcttgtctccagcaacggcaagtacgcactcggcttcttcgagaccaacagcaacaatcccacgcacaacgcctccaactcgtatcttggaatatggttccacaaagtccccaagctgacacccgtgtggagcgccaacggggacaatccggtctccagccctgcttcgccggagctcatgatctccgacgacggcaacctggtcatcatagccgacgacggcaccaaggtctggtggtctacccaggccaacatcacggccaacaccaccgtcgtcgtcgctgttctgttggccgacgggaaccttgtcctgcggagctcctccaactcctcggacgtattctggcagagcttcgaccacccaaccgacaccctgctgcccggtgcgaagctgggcagaaacaaggtcaccggtctggaccgccgttttgtttcaagaaggaattcgaacgaccaagctcctggtgtttattccatgggcctaggtcctggcgcccttgatgagagcatgaggctctcatggagatctacggagtactggtcctccggtgagtggaacggcagatacttcgacgcaataccggagatgtcgggtcctcgttactgcaagtatatgttcgttaccagtggcccagagttctacttctcctacaccttggtgaacgagagcacagcgtttcaggtcgtgctagatgtctctggccaatggaaggtgcgcgtatgggactgggacagaaacgactggatcacgttcagctactctccaagaagcaaatgtgatgtctatgctgtctgtggagcctacgggatctgctctaacaacgcaggtccgttgtgctcctgcatgaagggattctctgtaaggtcgcctgaggactgggaaatggaggacagggctggcgggtgcatcagagacactccattggattgcaacgcgacaagcatgacagataagttctatcccatgccatttagtaggctgcccagtaatggcatgggtctgcagaacgctacaagcgcggaatcatgtgagggatcttgtttgagtagctgctcttgcactgcatattcctacggccaaggcggttgctctctgtggcacgacgacctaaccaatgtagcagctgatgatgacactggcgagactctctaccttcgccttgccgcgaaagaggtccaaagctggcaagaccgccatagacatggaatggtcaccggtgtaagtgttgctgtgggcgtaagcactgccactgtgatcaccctagtgttggtctctctaattgtgatgatgatctggaggcgaagcagtagtcatccggcggacagcgaccagggtggcatcgggatcatcgcattcaggtacgctgatataaaacgcgcaactaacaatttctcggagaagctaggcacgggtggcttcggctccgtatttaaggggtgcctaggtgagtcggtcgccatagccgtgaagaggctagacggcgcccaccagggagagaagcagttcaggtccgaggtgagctcaataggcatcatccagcatgtcaacttggttaaactcgtcgggttctgctgcgaaggtgacaggagactccttgtctacgagcacatgccgaaccgttccctcgacttccacctgttccaccagagcgcgcatggcggtggcaccaccggtttgcgctgggacatcaggtatcagatagctctcggtgttgccagaggcatagcgtacctgcaccatagctgccgagactgcatcatacactgtgacatcaagccgcagaacatacttctcgacgcgtccttcgttccgaagatcgcggacttcggaatggccaagtttctcgggagggatttcagccgcgtcctgactacgatgagaggaactgttgggtacctcgcccctgaatggatcagcggaacagccatcacatcgaaggtcgatgtttacagctacggcatggttttgctggatatcgtatcgggaaggaggaacgccggcagagaagcttccaccgacggtgattgttgccatgccaagtgttgtttccctgtgcaggtcgtggacaagcttctcaacggaggcgtcggaagccttgtggatgcaagcttgggcggcgatgtcaacctagacgacgttgaaagagtctgcagagttgcgtgttggtgcgttcaggataatgagtatgatcgccctacaatggttgaggtggtacagtttctcgaaggcctgtctgagcctgatatgcctcccatgccaacattccttcatgctatcgctggtggatcgccttgatgctttagggcttgttcgttttgttgttaatccatgtggattattgaatgcgatatctcaatccactgcaattcacataaattacttgtatgcatgagcgtaat

SEQ ID NO: 17062 - DNA, 2703 bp, Zea Mays
gtataatagtatatggttggttgtctcactggttgagcgaaagacttacggttcctctggaaagacttttgagacactttagctctggcttcttggctgaattgaatcctaccctgtgaaaaaactctagaggagaagcctttttttgtaagagaagagtcaagccaccttggcttctacgacttctctagattcttagataaaactgtttgcaaagaagccctaccaaccttattataatcctcggattcacaacatttcttatcagtgctagtcatcagtcagatctgtccgtttgccctctggttctgtatccgacaaaacgtgtcctgtttttttcctccggctcccatttgtaaattgatagcatgatctattgcactacctttagtggtagcactgatgaccaaatcgatggtaacaggaaataaatcatagtctgagagtccaagcagtgactaggaaaatggaaccagtgaggcatgcagacgcatggcgctcatcttcgccggcagtcacagctcagaacagaacaaaagtactacaccacccatttcaaaccatggatctgaaagattgttcggggcattcttttttcgaacaagaacaaaaagatagcagaccctggccggcatcaagcaaatactcaccgtcctgaaacataattctttttagcctactttttcgtccacattcgaatgaatgataataaatataaacatacatacaaaccatattcataagttaatattatatatatagtctgaaacgaattatattttgggacggaaggagtattaaacttagccttgcattggaatacaggtgcacgtatcattaggatgtgtttgacaaacatgaatacatgattgtcgtattatgagatcaacatatatcatggttgttgtcttgtccctctgcacttaccaccgtggacgtagctgcagatgagtcactgacgtgcggagccgaccattgcatggccccatacacaagcgatcgaacgtaagaggaaacgtttactcctaaccccagcctcaccgtcgcctacgtagcttgagttggcgagttaaccgccaaactccttttaccagtcacacactcactcacgcctagaccaataatctgtgtttgccttaagcgacacggtcgagtgcggattacaattcctttttgtatttttcaaaaccgttttgttgaccaaagtttgacttttacattttcaaattccaaatcaaaatacataaaaaaattggaccggtttttaaatttcggaccagactgataacgagaaattttgtcgaaaacagtcacttcccgagcgagaagttttaccctggtggctacccattgaccgcctcaagctctaagacgcaacaaggccaaaaaaaagtttaggagtggaataagcaaatttttaagccttgcacggctgagttagagcttatcttttcctcttttacggtaaggcccatgccatgattgaagacgcaaacgaacttatggttaaggccacggtcacgagagaaccatcatattaactatgtctaggggtcgacaagaagccaacgcctttgccttcatcaaaccctagctaccatagatccaaaggacctgatccgcttgtggttcagaattgcctatcaagcctaggcctgaatgcactagtcatctacaggacccgcaacaaaatgagctacgttgagacccatgcaacaaaggctagggtcggcgtgtcgcagagatagtaatgatggtgctggagctcttcgccattcacgcgcagctagtcttaaagagcaaggccagagaagacgaccgagacgaatgccgacaagtacgactttaccaaggtagaacgactcgttttgccacgacgcagtagctcctttcctgagaagctaccggtaaccgacacccaccttagcctataaaaaggagaggatcggccgagaacaaggagaacactcatgcagaccacagacgaccacgccaaagcacacgaatgactacggaggtcgaagccaaggagcacaccgccacgacaaccaaggcttagctaggtagcgagcaccagattcgtagtccttaggccacaccacgcataagaaacttgagagcctcctccctctctcgctcgcttgtaacccctactacgagcattgagcaacaaggtgccggtagcgtaagccaccaaagattggatgtagggacgttttgccataagcagtataaatcttgcgctcactaagcacacatctggacctagaacgcacacaaataaatttacttgtcagagctggtttgaaacaccgtaaactcaggaagaacctagatactgccttctaggagggactccgttggggaagaggggttttaggaatgctttagagtcaagagaccatccaaagcgcctcaagtcgatgtaaagccgaagagaggtgaagaagctacaactaggactaaaactagatctaatctaagaacaaaaaagtaaataaaagaatattgttgttttggttcgattgatggtgctccaatcggctatatcctatatacctttacttggtgaaatcaaacaaaatttcacaagatatccaaaaaaaatccgcaataaatcaggactcaacccgaactgatgtaattctgagcagtttggggttgaactgttcggacctttcccaccagactgttgggtggtgc

SEQ ID NO: 17063 - DNA, 1362 bp, Zea Mays
ctctcttctccctcctcctctttcttctccggtgagaagagaatgaagggccagtggccatggcggcaccgtcatggatctccccgtcggtgtgcccttcctcgtaagggcgctgctgtaggtgaggtcctagcgatgcttgagtatttctaaaaggaagccgaggtggaggatgatgacgataagtcgctgtcatctacggctcagaccccggaaataaatcatagtctgagagtccaagcagtgactaggaaaatggaaccagtgaggcatgcagacgcatggcgctcatcttcgccggcagtcacagctcagaacagaacaaaagtactacaccacccatttcaaaccatggatctgaaagattgttcggggcattcttttttcgaacaagaacaaaaagatagcagaccctggccggcatcaagcaaatactcaccgtcctgaaacataattctttttagcctactttttcgtccacattcgaatgaatgataataaatataaacatacatacaaaccatattcataagttaatattatatatatagtctgaaacgaattatattttgggacggaaggagtattaaacttagccttgcattggaatacaggtgcacgtatcattaggatgtgtttgacaaacatgaatacatgattgtcgtattatgagatcaacatatatcatggttgttgtcttgtccctctgcacttaccaccgtggacgtagctgcagatgagtcactgacgtgcggagccgaccattgcatggccccatacacaagcgatcgaacgtaagaggaaacgtttactcctaaccccagcctcaccgtcgcctacgtagcttgagttggcgagttaaccgccaaactccttttaccagtcacacactcactcacgcctagaccaataatctgtgtttgccttaagcgacacggtcgagtgcggattacaattcctttttgtatttttcaaaaccgttttgttgaccaaagtttgacttttacattttcaaattccaaatcaaaatacataaaaaaattggaccggtttttaaatttcggaccagactgataacgagaaattttgtcgaaaacagtcacttcccgagcgagaagttttaccctggtggctacccattgaccgcctcaagctctaagacgcaacaaggccaaaaaaaagtttaggagtggaataagcaaatttttaagccttgcacggctgagttagagcttatcttttcctcttttacggtaaggcccatgccatgattgaagacgcaaacgaacttatggttaaggccacggtcacgagagaaccatcatattaactatgtctaggggtcgacaagaagccaacgcc

SEQ ID NO: 17064 - DNA, 890 bp, Zea Mays
cgtcgctctcttctccctcctcctctttcttctccggtgagaagagaatgaagggccagtggccatggcggcaccgtcatggatctccccgtcggtgtgcccttcctcgtaagggcgctgctgtaggtgaggtcctagcgatgcttgagtatttctaaaaggaagccgaggtggaggatgatgacgataagtcgctgtcatctacggctcagaccccggtaagacctcctcgcctttctcatgtcttataccctttctatttcttggatctctgaattatttgggaattagatcgtgagactagggtttttgttcttggatctagggttctgttactcgatcatgaatgcttctgtcttgatctttaattagggttttgttcactagagaatgcatccccttccataaaaatccctctgtttattttctcttcttgactaagaattaatatgagtacttatcttttatgttttcttccttcaaatcttactcaaattaaaataatcatacaacataacctggctcttgatgccattgacaaattataggatcttggacaatgtatacttagtaattcgaacactttattaaacatagaattgatctactcttctacatagtgcaaacacatgaataaagagggggttaaagcacaccatcttacccttgatgaagggcaacgtttgtgaggcgggcgacgcctgctcttgtgccttgtagcggtgaggattgatcttggcgcggtggaggaggagcagggtcaccaccgccgccttgattaccgctgtcattcgcctgcagtggaggagggttgaggatagacgccattggcacgctggagtcttgtgatgccatgggtcaacactctttcggtcacattgagtgcctag

SEQ ID NO: 17065 - DNA, 3419 bp, Zea Mays
ttactctaataaaactcacaccgaaaattgcctccaaacacgaaaaacacggaggtcgggtactagcggttggagagcgcagtccccggacctgaccggtcgagtccttcggccttcccaaaacgcggaggtcgggtactagcggttggagcgcaggctgcgcagtccccggacctgaccggtcgagtccttcggccttcccaaatcgcatctcttgacactgcttccgtcccgtcgcctcgccgccgcgacgagacgaccccgcccctacaaatacaccgccactttggccgcgtcagccgccgccacttcccagatcccgatgtcccgcgcccagattccactcccttgttgcatcgctactctgttcccagctcggggcctctgacgaggcccgaggcgcaggcgccaacctcccggcccgccctagggtttggggctgatcgatccggctaggtcttggcgggagctgctccaatgggggatcgggaggaggacgaggagctccagatggcgctccgcatgagcctccagggctccccgccggcgcagcctgagcccaagcgcagcaagcccccgccccccgctgcggagtcgccggaggcagaggcgcgccggaagcagcgcgagctcatggccgccgccgccgagaagcgccgccgcggtgcagcgtcaccggcctccgtctcggtggcgcggtctcttctgcagccagtggtggtggagtcagcccccgccccggaggtcaccaaagagcaggtggaggagccggaacaagctggcgtatctatggaagaagcgaaggaggtggaggaggaagaagaagaagaaaagggggaggagttgcctccagatgtcgctgagaatctatgggcaatggtgtttgggagaggtgtttcaaaggcggtcttggcgcagtggagtaatcagggcataaggtttagctctgatccagaaacaactatgggacttgtacaacatgaaggaggtccttgtggtgttttagcaaccgtgcaggcttatgtccttaaatatcttctgtttttttctgatgacttgagtaatccagagatcagtaacccgctgtatactctgggacaaagacgcttttatcagagttcttttgctgcaggggatgatttttcatcccttactgatgatagaaagacaagagcattggttcatgctatggtggagattctttttttatgtggaactggaaaaagagctgttgtagcatctgttgcacgtgccaatcgtggaaaaattgatgcagctttggaagatctttctgtcgaatcagcagtggatctgcagaaagttcttaaaacaagtacatttacttcaaggaaggatgcattcaacacccttttggctaacattcctttgtttcaaagtcgactgggagccatgctatttcttatttctgctttgctttcacgaggattggtatgtgttcgtcagtactaaagttctcaacttgctttcatcaggattggtcccctcttgacccaatcttatgttctagttgaaaacatagtttttcaatcttaagttctagtggaaaacaaagttttcatttgttaaggccctgtttgtttccttccaggattatataatctagcttatggattatataagcacctaatgaccttcttatagattatcataatctaggtatctagattatataatccacctaataatctgagttgtttgtttgtctctaaagtcttaacttatttaagatgaattatataatctagcgggtaaacaaacaggacctaagtcacttaagtgcccatcaacctgtttgttgaaccatgtcaacactatctttatattctgaccatgtataactgtcctttaagtacaggaagacatccaagcagacagggatgatccaagccagccattggtcactgctccatttggtcatgcttcacaggaaattgtgaatttattactctgtggagaggctgttccaaatgtatttgatggcaagatggaccttggtggtggcatgtccttgaagggcataccaaacaatgttgaagttggttttcttaccctcctggaatcactaaatctctgcaaggttggtcagtacttgaagtgcccaaagtggccgatatgggttgtgggaagtgaaagtcactacacagtcctttttgccttgaaccccaacgttcaagaggagaatgagctggaagagcgcgaatcaaaaataaggagggcttttgatgcccaagatcaaagtggaggtggaggctttatcagcgttgagggcttccaacaagtcctcagggatactgacataaattttccttcggataaactcgaggacctatgtaatgctggaattatagtatggagtgaattctggcaagcattgctacagttggataaaagggctggaggcatgaaggatccaactggtcttatgggcaagaagcaattcaccatcttccacttcaatggaattgccaagtctgtgccgaatgggaatgcaagtgcaggtggttcatgtcctatacagagacccaggttatgcaagctaaatgtcactgtccccccaaggtggactcaagatgagtatctggctgatgttgtaagcgcatcaaccagcagcagcaaggacgacagtattctttctctagctcccccaggtcagactaatcagcacgcaccattggtggactgcattaggacacggtggccacgagctgtttgtagctgggttggagatgttccaagcattgtctgacacagtggatgtcgtgtgcgcactagtcgctctagctatgttgctcgtaacctcgttctgaagaatctgctcagagcaagccacttggagcttcctgattgttcatgccctggaaaaaggaatcgcccaattacatggtacatgagcttcagggatacttgatggaatgagagtagtgtaccggtgtatgtttgttgatatatatatactataaataaacacatcttttgtaataatagagatggtatatgttggagcttatggtaatgcttgagttaagttttaggaacaataaattcagtctttatcatttaatcaatatgatctattgatctctattgttgttacgttcttattgaagtatagtgtggtaatacttaagaaggctccaggctcctattagaactgctagaagaaatgttactcccatcaccaccgcttgtgtggatgcgaactctttttgaaagagggaaaagaacggagagccaaagtaattatgtattggtctcaagcagggattttacacatatacaatacaactgccgagtcgccagtgcatggctaagtagtgagtgggagcgacatgcacggcgaggtagttgaccaggcaacaagaacaacgcagcattgcatcaaactttgatacggaaag

SEQ ID NO: 17066 - DNA, 3045 bp, Zea Mays
acccatcgggtttcgggtttcgggtacccattgccatctctaatcatgtttgcttactctaataaaactcacaccgaaaattgcctccaaacacgaaaaacacggaggtcgggtactagcggttggagagcgcagtccccggacctgaccggtcgagtccttcggccttcccaaaacgcggaggtcgggtactagcggttggagcgcaggctgcgcagtccccggacctgaccggtcgagtccttcggccttcccaaatcgcatctcttgacactgcttccgtcccgtcgcctcgccgccgcgacgagacgaccccgcccctacaaatacaccgccactttggccgcgtcagccgccgccacttcccagatcccgatgtcccgcgcccagattccactcccttgttgcatcgctactctgttcccagctcggggcctctgacgaggcccgaggcgcaggcgccaacctcccggcccgccctagggtttggggctgatcgatccggctaggtcttggcgggagctgctccaatgggggatcgggaggaggacgaggagctccagatggcgctccgcatgagcctccagggctccccgccggcgcagcctgagcccaagcgcagcaagcccccgccccccgctgcggagtcgccggaggcagaggcgcgccggaagcagcgcgagctcatggccgccgccgccgagaagcgccgccgcggtgcagcgtcaccggcctccgtctcggtggcgcggtctcttctgcagccagtggtggtggagtcagcccccgccccggaggtcaccaaagagcaggtggaggagccggaacaagctggcgtatctatggaagaagcgaaggaggtggaggaggaagaagaagaagaaaagggggaggagttgcctccagatgtcgctgagaatctatgggcaatggtgtttgggagaggtgtttcaaaggcggtcttggcgcagtggagtaatcagggcataaggtttagctctgatccagaaacaactatgggacttgtacaacatgaaggaggtccttgtggtgttttagcaaccgtgcaggcttatgtccttaaatatcttctgtttttttctgatgacttgagtaatccagagatcagtaacccgctgtatactctgggacaaagacgcttttatcagagttcttttgctgcaggggatgatttttcatcccttactgatgatagaaagacaagagcattggttcatgctatggtggagattctttttttatgtggaactggaaaaagagctgttgtagcatctgttgcacgtgccaatcgtggaaaaattgatgcagctttggaagatctttctgtcgaatcagcagtggatctgcagaaagttcttaaaacaagtacatttacttcaaggaaggatgcattcaacacccttttggctaacattcctttgtttcaaagtcgactgggagccatgctatttcttatttctgctttgctttcacgaggattggaagacatccaagcagacagggatgatccaagccagccattggtcactgctccatttggtcatgcttcacaggaaattgtgaatttattactctgtggagaggctgttccaaatgtatttgatggcaagatggaccttggtggtggcatgtccttgaagggcataccaaacaatgttgaagttggttttcttaccctcctggaatcactaaatctctgcaaggttggtcagtacttgaagtgcccaaagtggccgatatgggttgtgggaagtgaaagtcactacacagtcctttttgccttgaaccccaacgttcaagaggagaatgagctggaagagcgcgaatcaaaaataaggagggcttttgatgcccaagatcaaagtggaggtggaggctttatcagcgttgagggcttccaacaagtcctcagggatactgacataaattttccttcggataaactcgaggacctatgtaatgctggaattatagtatggagtgaattctggcaagcattgctacagttggataaaagggctggaggcatgaaggatccaactggtcttatgggcaagaagcaattcaccatcttccacttcaatggaattgccaagtctgtgccgaatgggaatgcaagtgcaggtggttcatgtcctatacagagacccaggttatgcaagctaaatgtcactgtccccccaaggtggactcaagatgagtatctggctgatgttgtaagcgcatcaaccagcagcagcaaggacgacagtattctttctctagctcccccaggtcagactaatcagcacgcaccattggtggactgcattaggacacggtggccacgagctgtttgtagctgggttggagatgttccaagcattgtctgacacagtggatgtcgtgtgcgcactagtcgctctagctatgttgctcgtaacctcgttctgaagaatctgctcagagcaagccacttggagcttcctgattgttcatgccctggaaaaaggaatcgcccaattacatggtacatgagcttcagggatacttgatggaatgagagtagtgtaccggtgtatgtttgttgatatatatatactataaataaacacatcttttgtaataatagagatggtatatgttggagcttatggtaatgcttgagttaagttttaggaacaataaattcagtctttatcatttaatcaatatgatctattgatctctattgttgttacgttcttattgaagtatagtgtggtaatacttaagaaggctccaggctcctattagaactgctagaagaaatgttactcccatcaccaccgcttgtgtggatgcgaactctttttgaaagagggaaaagaacggagagccaaagtaattatgtattggtctcaagcagggattttacacatatacaatacaactgccgagtcgccagtgcatggctaagtagtgagtgggagcgacatgcacggcgaggtagttgaccaggcaacaagaacaacgcagcattgcatcaaactttgatacggaaag

SEQ ID NO: 17067 - DNA, 2985 bp, Zea Mays
aataaaatgacaatatgcactaggtttggtcgggtttaaaaaactcacgggttcacgggtttgggtactacaggaacaaacccgtacccataaacccgccgggtatagatttatgcccattaacaaacccatgagtatgaaaattgacccaaacccataccctaatggggtaaaaacccatcgggtttcgggtttcgggtacccattgccatctctaatcatgtttgcttactctaataaaactcacaccgaaaattgcctccaaacacgaaaaacacggaggtcgggtactagcggttggagagcgcagtccccggacctgaccggtcgagtccttcggccttcccaaaacgcggaggtcgggtactagcggttggagcgcaggctgcgcagtccccggacctgaccggtcgagtccttcggccttcccaaatcgcatctcttgacactgcttccgtcccgtcgcctcgccgccgcgacgagacgaccccgcccctacaaatacaccgccactttggccgcgtcagccgccgccacttcccagatcccgatgtcccgcgcccagattccactcccttgttgcatcgctactctgttcccagctcggggcctctgacgaggcccgaggcgcaggcgccaacctcccggcccgccctagggtttggggctgatcgatccggctaggtcttggcgggagctgctccaatgggggatcgggaggaggacgaggagctccagatggcgctccgcatgagcctccagggctccccgccggcgcagcctgagcccaagcgcagcaagcccccgccccccgctgcggagtcgccggaggcagaggcgcgccggaagcagcgcgagctcatggccgccgccgccgagaagcgccgccgcggtgcagcgtcaccggcctccgtctcggtggcgcggtctcttctgcagccagtggtggtggagtcagcccccgccccggaggtcaccaaagagcaggtggaggagccggaacaagctggcgtatctatggaagaagcgaaggaggtggaggaggaagaagaagaagaaaagggggaggagttgcctccagatgtcgctgagaatctatgggcaatggtgtttgggagaggtgtttcaaaggcggtcttggcgcagtggagtaatcagggcataaggtttagctctgatccagaaacaactatgggacttgtacaacatgaaggaggtccttgtggtgttttagcaaccgtgcaggcttatgtccttaaatatcttctgtttttttctgatgacttgagtaatccagagatcagtaacccgctgtatactctgggacaaagacgcttttatcagagttcttttgctgcaggggatgatttttcatcccttactgatgatagaaagacaagagcattggttcatgctatggtggagattctttttttatgtggaactggaaaaagagctgttgtagcatctgttgcacgtgccaatcgtggaaaaattgatgcagctttggaagatctttctgtcgaatcagcagtggatctgcagaaagttcttaaaacaagtacatttacttcaaggaaggatgcattcaacacccttttggctaacattcctttgtttcaaagtcgactgggagccatgctatttcttatttctgctttgctttcacgaggattggaagacatccaagcagacagggatgatccaagccagccattggtcactgctccatttggtcatgcttcacaggaaattgtgaatttattactctgtggagaggctgttccaaatgtatttgatggcaagatggaccttggtggtggcatgtccttgaagggcataccaaacaatgttgaagttggttttcttaccctcctggaatcactaaatctctgcaaggttggtcagtacttgaagtgcccaaagtggccgatatgggttgtgggaagtgaaagtcactacacagtcctttttgccttgaaccccaacgttcaagaggagaatgagctggaagagcgcgaatcaaaaataaggagggcttttgatgcccaagatcaaagtggaggtggaggctttatcagcgttgagggcttccaacaagtcctcagggatactgacataaattttccttcggataaactcgaggacctatgtaatgctggaattatagtatggagtgaattctggcaagcattgctacagttggataaaagggctggaggcatgaaggatccaactggtcttatgggcaagaagcaattcaccatcttccacttcaatggaattgccaagtctgtgccgaatgggaatgcaagtgcaggtggttcatgtcctatacagagacccaggttatgcaagctaaatgtcactgtccccccaaggtggactcaagatgagtatctggctgatgttgtaagcgcatcaaccagcagcagcaaggacgacagtattctttctctagctcccccaggtacatgagcttcagggatacttgatggaatgagagtagtgtaccggtgtatgtttgttgatatatatatactataaataaacacatcttttgtaataatagagatggtatatgttggagcttatggtaatgcttgagttaagttttaggaacaataaattcagtctttatcatttaatcaatatgatctattgatctctattgttgttacgttcttattgaagtatagtgtggtaatacttaagaaggctccaggctcctattagaactgctagaagaaatgttactcccatcaccaccgcttgtgtggatgcgaactctttttgaaagagggaaaagaacggagagccaaagtaattatgtattggtctcaagcagggattttacacatatacaatacaactgccgagtcgccagtgcatggctaagtagtgagtgggagcgacatgcacggcgaggtagttgaccaggcaacaagaacaacgcagcattgcatcaaactttgatacggaaag

SEQ ID NO: 17068 - DNA, 398 bp, Zea Mays
gtgagataaaaaatacaaatgttttatgagtataaagcaaaaaaatgtgggtggctgaaaaggtttcacatgaggacatctcttgcttgcttgcttgcacaggaggagcatctcctgatgaccacacaatcaaataaggaacccccaaacacagcatgatatcacaagtgtaggtatatgtatctcctatacatacgcccgtccaaaaatatacacggccacatgtagaacctgaaatattgtaaaatcttacacagcttacaaacacgcgtcacacgtgctaccacaggcatggatcctgacccagcagctgcagctgatactgacacgccgtggttcggagttcactcgatgtggtggctcttgcctactgctgccgtgggcggcggcggcgtgag

SEQ ID NO: 17069 - DNA, 442 bp, Zea Mays
caactggccaaccctatctatctacatgtaagacgcgctatcctatgtgtcgaaggctacacacgaacagccgcagcaagtatataatacttggccagttccagttgtgccattgccgcgtccacggctccacccctataaatgctggccatgaggcaccacggtttcttcaattcatccagacaagtcatatctagctagtagctccctgaaaagttcactagagaagcatttgagggaggagccatgtctgaggagaagcaccaccaccacctgttccaccaccgcaaggcagaggaggaggaaggcgcctccggcgaggtcgactacgagaagaaggagaagcaccacaagcacatggagcagctcggccagctcggcgccatcgccgccggcgcgtacgctctgctcttgatctgtgtgtgtctgtgcgtgtgcatcg

SEQ ID NO: 17070 - DNA, 1803 bp, Zea Mays
gcccacccagatatttcccaacaccatatgactacacgtgtgaaggctggtgtcttccaaccaaagaaattcatgaatcttcacgtcactacacaacctgctatttcacctatcccttattcttaccgtacagcccttacggatcctcactggtgccaacgttgtcagtggtaaatggatttttcggcacaagctgcacagtgatgggtccttggctcgctacaaagcacgctgggttgttcgtggctgttctcaacaggagggtattgactatggagaaacttttagtccagtcattaaaccagggactattcggagtgttctcagcattgccacatctttttcttggccaattcatcaattagatgtcaagaacgcttttctccatggtacgttatctgaaacagtttattctcaacaaccctctgactttgttgatccttctttacctcatcatgtttgcaaacttcataagtctctttatggccttaaacaagctcctcgcacatggttcttgcgatttacgacatttctttcctcgattggttttacacaatctaaatgtgatccttccctttttattcttaaaacaccctctaccactgcatatcttcttctttatgtagatgatattattcttacagcaaatacatctcatcttttatctcatattatttcacaactctgttctgaattttctatgtccgatcttggacctttacgtcactttcttggcattgaggtgacaccatcggacactggtttggttctctcacaaaagcaatatgcattggatatcttggcacgtgcaaacatgacgcattgtaatccttgccatacccctgttgacaccaactctaaacccgcctctaccgatggttgtcttctttcacaacccactgtttacagaagcttagcaggtgctttacaatatcttactttgactcggcctgatatttcttatgctgttcaacaagtttgcctgttcatgcatgctcctcgtgacactcatatgtctttgctgaaacgcatccttcgctatgtccgtggtaccttggactatggtttgcatatctatcgtagttccagtcttgatctgttggcatactctgatgctgactgggctggatgtcctgacacccgacgatctacatctggttattgtgtttttctgggtgccaatcttgttgcttggtcgtctaagcggcaacatacagtatcccggtccagtgccgaggcagaatatcgaggtgtggccaatgctgtggctgaaatttgttggcttcgccaattgttgactgagctttgtcatcctcctcgtcgtgctgctgtggtcttctgtgataatgtcagcacaatgtatctggcatccaacccagtccaacatcaacgtacgaagcatgtggaaatcgacttgcattttgtacgcgagcgcgtatctttaggagaggtgaaggtgatacatgttccttcatctcttcagtttgctgatatttttaccaaaggtctctcatcatcattgttcaaggagtttcggtccaacctgcaaatcaagccagctacagattctacaggttgaggggggctgttagataatgtaaagcgtctgttagtagatcctattttcttgtttctatccgagtcttccggccacttcgtagcccattattttaggatcacaggagacttcgtggccatcttttcaggatcagacttgcatggtccttggttgtaatctatatatatatatatttgtactcgacacatcaataaagcaatacagagagaacagttcttcctatt

SEQ ID NO: 17071 - DNA, 3587 bp, Zea Mays
tgaggaacgctcccagtccgtgtcaaactgccatgcggccgatgcggcactcgttgctgctgctacctcgtcgcgctcgccagctcctctccccgccaccgacaacaacaacacaactgcaacccccgcagttgacaaccgccaaagcagctatggccgtggtcgtggtcgcggtcgtggtggtcgcttcaacgctgctagacgcagcggccggtaccctccggcgacctttcttcctccatggcctgcacactgggctcccacctggcgcgccccatggacagggacctctggccctggcgtccttggtgcacgtcctccagcgcaagcctatccggtattccagcagccacaacctgtgtctgcgccgctgcatgctccgtcttgggacacttcggggcttattcacgcgctccaggctgcttctgttcaacagcaagcacatcccagtgattggtttctagacacgggagctagctcacacatgaccaaccattcgggatctagccaccaagaacacaatcatgaggtccaatagtgacggggatctttacccattctttggtaccagctctccttcctcgacggctctggtggctcacactgcatccgctgatgtctggcatcgccgtcttggccaccccaataatcattccttagctcgatttcctttttcatgtaataaatctttagctgcttctactctgtgtgacgcctgtcagaaggggaaacatgttcggctctctttccctcgttctacctccttcacatattttccctttcaaataatacactgtgatttgtggacatcccctatttctagtatttctggttttcactattatttgattgtcctcgatgattatactcattacgtctggacatttcccattcgtcacaaaaccgaggtgccatctgttctgcgcaatttttatagctatgtacgtacccaatttcatctttctatccaatctattcaatgtgataatggccgagaatttgacaataacgatctgcgcacttttcttttagccaatggtgtcaccctccggctctcatgtccatatacatcttctcaaaatggtaaagccgaacgtggcatccgcataataaataatattcttcgcactttgcttgaacaagcctccatgcctcgttcatattgggttgaagccctccatacagccacatatcttcttaatcgacgaccctgccaacctcttaatttttgtacaccataccagcttctctttggctgctcccctgattatcaacatctacgtacctttgggtgtctttgttatcctaatctatcttctacagcttcacataaattagccccaagatcagcacgttgtgtttttctaggatacctatctgagcacaaaggctacagatgtttaaacctcgatactatgaaaattataatttctcggcatgtaatatttgatgaatccttctttccgttcgcctcaccacagcccacaaaatccttgccacattcctccatcccggatccagcggcgtccggactggaaatcatcccggtacgggcctctcccgtcttttctgctcctgccgtttcagcaactgtgcgcacgcctccccatcctcctctgtcggtcacgggtggtcaaacctccacctcgcctgccgcacagctgtcagcctcggcccctacacgtctctgcagctcgccaacacatgcacctgcgacgcccatttcccagcagcaaacgcctggctcttccccacctgtccttcgctatgcccacccagatatttcccaacaccatatgactacacgtgtgaaggctggtgtcttccaaccaaagaaattcatgaatcttcacgtcactacacaacctgctatttcacctatcccttattcttaccgtacagcccttacggatcctcactgttcccaaacctgcaggtgccaacgttgtcagtggtaaatggatttttcggcacaagctgcacagtgatgggtccttggctcgctacaaagcacgctgggttgttcgtggctgttctcaacaggagggtattgactatggagaaacttttagtccagtcattaaaccagggactattcggagtgttctcagcattgccacatctttttcttggccaattcatcaattagatgtcaagaacgcttttctccatggtacgttatctgaaacagtttattctcaacaaccctctgactttgttgatccttctttacctcatcatgtttgcaaacttcataagtctctttatggccttaaacaagctcctcgcacatggttcttgcgatttacgacatttctttcctcgattggttttacacaatctaaatgtgatccttccctttttattcttaaaacaccctctaccactgcatatcttcttctttatgtagatgatattattcttacagcaaatacatctcatcttttatctcatattatttcacaactctgttctgaattttctatgtccgatcttggacctttacgtcactttcttggcattgaggtgacaccatcggacactggtttggttctctcacaaaagcaatatgcattggatatcttggcacgtgcaaacatgacgcattgtaatccttgccatacccctgttgacaccaactctaaacccgcctctaccgatggttgtcttctttcacaacccactgtttacagaagcttagcaggtgctttacaatatcttactttgactcggcctgatatttcttatgctgttcaacaagtttgcctgttcatgcatgctcctcgtgacactcatatgtctttgctgaaacgcatccttcgctatgtccgtggtaccttggactatggtttgcatatctatcgtagttccagtcttgatctgttggcatactctgatgctgactgggctggatgtcctgacacccgacgatctacatctggttattgtgtttttctgggtgccaatcttgttgcttggtcgtctaagcggcaacatacagtatcccggtccagtgccgaggcagaatatcgaggtgtggccaatgctgtggctgaaatttgttggcttcgccaattgttgactgagctttgtcatcctcctcgtcgtgctgctgtggtcttctgtgataatgtcagcacaatgtatctggcatccaacccagtccaacatcaacgtacgaagcatgtggaaatcgacttgcattttgtacgcgagcgcgtatctttaggagaggtgaaggtgatacatgttccttcatctcttcagtttgctgatatttttaccaaaggtctctcatcatcattgttcaaggagtttcggtccaacctgcaaatcaagccagctacagattctacaggttgaggggggctgttagataatgtaaagcgtctgttagtagatcctattttcttgtttctatccgagtcttccggccacttcgtagcccattattttaggatcacaggagacttcgtggccatcttttcaggatcagacttgcatggtccttggttgtaatctatatatatatatatttgtactcgacacatcaataaagcaatacagagagaacagttcttcctatt

SEQ ID NO: 17072 - DNA, 1829 bp, Zea Mays
tgaggaacgctcccagtccgtgtcaaactgccatgcggccgatgcggcactcgttgctgctgctacctcgtcgcgctcgccagctcctctccccgccaccgacaacaacaacacaactgcaacccccgcagttgacaaccgccaaagcagctatggccgtggtcgtggtcgcggtcgtggtggtcgcttcaacgctgctagacgcagcggccggtaccctccggcgacctttcttcctccatggcctgcacactgggctcccacctggcgcgccccatggacagggacctctggccctggcgtccttggtgcacgtcctccagcgcaagcctatccggtattccagcagccacaacctgtgtctgcgccgctgcatgctccgtcttgggacacttcggggcttattcacgcgctccaggctgcttctgttcaacagcaagcacatcccagtgattggtttctagacacgggagctagctcacacatgaccaaccattcgggtaacttacctatttattattcttcatcattgcctaattcttcgcatgttattgttggtgatggatccaaaattcttgttcatggcactggtcatacctctattcgttccccgccaaacacttttgctttacgttctgttttgcatcttccacacttagtcaagaatttaatttctgttcgccgcttcactactgataactcgtgtgccattgaatttgatccgtatggtttttctgtgaaggatctagccaccaagaacacaatcatgaggtccaatagtgacggggatctttacccattctttggtaccagctctccttcctcgacggctctggtggctcacactgcatccgctgatgtctggcatcgccgtcttggccaccccaataatcattccttagctcgatttcctttttcatgtaataaatctttagctgcttctactctgtgtgacgcctgtcagaaggggaaacatgttcggctctctttccctcgttctacctccttcacatattttccctttcaaataatacactgtgatttgtggacatcccctatttctagtatttctggttttcactattatttgattgtcctcgatgattatactcattacgtctggacatttcccattcgtcacaaaaccgaggtgccatctgttctgcgcaatttttatagctatgtacgtacccaatttcatctttctatccaatctattcaatgtgataatggccgagaatttgacaataacgatctgcgcacttttcttttagccaatggtgtcaccctccggctctcatgtccatatacatcttctcaaaatggtaaagccgaacgtggcatccgcataataaataatattcttcgcactttgcttgaacaagcctccatgcctcgttcatattgggttgaagccctccatacagccacatatcttcttaatcgacgaccctgccaacctcttaatttttgtacaccataccagcttctctttggctgctcccctgattatcaacatctacgtacctttgggtgtctttgttatcctaatctatcttctacagcttcacataaattagccccaagatcagcacgttgtgtttttctaggatacctatctgagcacaaaggctacagatgtttaaacctcgatactatgaaaattataatttctcggcatgtaatatttgatgaatccttctttccgttcgcctcaccacagcccacaaaatccttgccacattcctccatcccggatccagcggcgtccggactggaaatcatcccggtacgggcctctcccgtcttttctgctcctgccgtttcag

SEQ ID NO: 17073 - DNA, 1343 bp, Zea Mays
gttgcccgcaaaggggactgctccgaattccccaccaggccacaagtcctagttccaaaaccctctctcctccccgtcctactcgtaccccatagccaatttccctccttcgctgccaatggacctctccgccgtccaggccgccctctccgacaagtcctacaccgccgtcgcctccctctgcgacgagctcctcctacaggccgcgtccaagggaaccaataccgacgaatggccctactctgtccacctcctggcccacctctacatcaatgacctgaacagcgcgcggttcttctggaaatcgctgccgcaggaggtgaaggacacgcggccggagctcgccgcggtctggaggattggtcagtgcctctggaacagagactatgctggtgtcaacacggccgcacaggggttcgagtggggccctgacctcactgaattcatcactgccttcctagagatttggtagtggcatgggtgggtagaggctgttgaacatattgtcaccatggatttgtagtgggagaatctatctatagagttggtctgcactgagaatcatatatcctctgtgaaaatgctgatggagaagttcgcaggggagcttcatggctgttctatgatactctgattcattctgtcaaatttgttctccaagagagctacagacaaaggatattcaaactgttgacttctgcatattcgacaattagcgttgctgatgtggctcatttcatggggatgagtgaggaggatgctacaaactatgctgtgcaaatcggttggagtttgggcgcagcgaccaagatgcttactgtcaaaaagccaaaggctcagatcaaccagaagcttgatgcgagcaaactgcagcgcctgactgagtgtgttttccaccttgagcactgatgctcagtgtcaatcgtgttgcatccccgtcacttctctactctgcacattttaagaaccatgtttaccatggctgaaaaggggtgatctctcagtactgaatttgcttctgtaagtggtttctgatagcgtgctagctgttactgcgcctatgggttgttcgtatggtggcccttcgtgccagaggcgcattgaaatgcgtcacactttgtcattactctggaccttaaccagggaagtcttgattgcataaaaatgctaacaagttggtcatgctcatgcccacggttgtccatcatatgaaaagtgaagtcttttggagttcgtagaagctgtttggtaacttgtattgttttcacgctgaaagacgggttaagcaaatgacttgtatggaactgaaataggaaggaatatttgtcattaagggggtgttt

SEQ ID NO: 17074 - DNA, 1789 bp, Zea Mays
gttgcccgcaaaggggactgctccgaattccccaccaggccacaagtcctagttccaaaaccctctctcctccccgtcctactcgtaccccatagccaatttccctccttcgctgccaatggacctctccgccgtccaggccgccctctccgacaagtcctacaccgccgtcgcctccctctgcgacgagctcctcctacaggccgcgtccaagggaaccaataccgacgaatggccctactctgtccacctcctggcccacctctacatcaatgacctgaacagcgcgcggttcttctggaaatcgctgccgcaggaggtgaaggacacgcggccggagctcgccgcggtctggaggattggtcagtgcctctggaacagagactatgctggtgtcaacacggccgcacaggggttcgagtggggccctgacctcactgaattcatcactgccttcctagagatttggtagtggcatgggtgggtagaggctgttgaacatattgtcaccatggatttgtagtgggagaatctatctatagagttggtctgcactgagaatcatatatcctctgtgaaaatgctgatggagaagttcgcaggggagcttcatggctgttctatgatactctgattcattctgtcaaatttgttctccaaggtatcaactggccctagtgctttgtgtttcagtaagatagtatttttcatgccaacaaatcgggtacttgttgtgctatattgatatcataccataacatgacaaatgctggcgtagaatgtaccctttgacatagtatgttgtgaagaagttatgactgtcatctctgcatcttctgttcaaaaattgtaaaactgtaagggtgcctcttaatttagtgactatggcagaatttattaaaaacaaaattgagacatttaatgatttaatgatattcttcctcgtgttttctgtaaggaaagtatgatttccagtgttttgacatggcaaatggttttgtttttctagcttgattgtttggaaactgatcaatgcttgttttttaataacgtgagcttaactagttaaggatttgaggtgaatatctggtctttgttgtaatgcagagagctacagacaaaggatattcaaactgttgacttctgcatattcgacaattagcgttgctgatgtggctcatttcatggggatgagtgaggaggatgctacaaactatgctgtgcaaatcggttggagtttgggcgcagcgaccaagatgcttactgtcaaaaagccaaaggctcagatcaaccagaagcttgatgcgagcaaactgcagcgcctgactgagtgtgttttccaccttgagcactgatgctcagtgtcaatcgtgttgcatccccgtcacttctctactctgcacattttaagaaccatgtttaccatggctgaaaaggggtgatctctcagtactgaatttgcttctgtaagtggtttctgatagcgtgctagctgttactgcgcctatgggttgttcgtatggtggcccttcgtgccagaggcgcattgaaatgcgtcacactttgtcattactctggaccttaaccagggaagtcttgattgcataaaaatgctaacaagttggtcatgctcatgcccacggttgtccatcatatgaaaagtgaagtcttttggagttcgtagaagctgtttggtaacttgtattgttttcacgctgaaagacgggttaagcaaatgacttgtatggaactgaaataggaaggaatatttgtcattaagggggtgttt

SEQ ID NO: 17075 - DNA, 1337 bp, Zea Mays
gttgcccgcaaaggggactgctccgaattccccaccaggccacaagtcctagttccaaaaccctctctcctccccgtcctactcgtaccccatagccaatttccctccttcgctgccaatggacctctccgccgtccaggccgccctctccgacaagtcctacaccgccgtcgcctccctctgcgacgagctcctcctacaggccgcgtccaagggaaccaataccgacgaatggccctactctgtccacctcctggcccacctctacatcaatgacctcgcgcggttcttctggaaatcgctgccgcaggaggtgaaggacacgcggccggagctcgccgcggtctggaggattggtcagtgcctctggaacagagactatgctggtgtcaacacggccgcacaggggttcgagtggggccctgacctcactgaattcatcactgccttcctagagatttggtagtggcatgggtgggtagaggctgttgaacatattgtcaccatggatttgtagtgggagaatctatctatagagttggtctgcactgagaatcatatatcctctgtgaaaatgctgatggagaagttcgcaggggagcttcatggctgttctatgatactctgattcattctgtcaaatttgttctccaagagagctacagacaaaggatattcaaactgttgacttctgcatattcgacaattagcgttgctgatgtggctcatttcatggggatgagtgaggaggatgctacaaactatgctgtgcaaatcggttggagtttgggcgcagcgaccaagatgcttactgtcaaaaagccaaaggctcagatcaaccagaagcttgatgcgagcaaactgcagcgcctgactgagtgtgttttccaccttgagcactgatgctcagtgtcaatcgtgttgcatccccgtcacttctctactctgcacattttaagaaccatgtttaccatggctgaaaaggggtgatctctcagtactgaatttgcttctgtaagtggtttctgatagcgtgctagctgttactgcgcctatgggttgttcgtatggtggcccttcgtgccagaggcgcattgaaatgcgtcacactttgtcattactctggaccttaaccagggaagtcttgattgcataaaaatgctaacaagttggtcatgctcatgcccacggttgtccatcatatgaaaagtgaagtcttttggagttcgtagaagctgtttggtaacttgtattgttttcacgctgaaagacgggttaagcaaatgacttgtatggaactgaaataggaaggaatatttgtcattaagggggtgttt

SEQ ID NO: 17076 - DNA, 1202 bp, Zea Mays
gttgcccgcaaaggggactgctccgaattccccaccaggccacaagtcctagttccaaaaccctctctcctccccgtcctactcgtaccccatagccaatttccctccttcgctgccaatggacctctccgccgtccaggccgccctctccgacaagtcctacaccgccgtcgcctccctctgcgacgagctcctcctacaggccgcgtccaagggaaccaataccgacgaatggccctactctgtccacctcctggcccacctctacatcaatgacctgaacagcgcgcggttcttctggaaatcgctgccgcaggaggtgaaggacacgcggccggagctcgccgcggtctggaggattggtcagtgcctctggaacagagactatgctggtgtcaacacggccgcacaggggttcgagtggggccctgacctcactgaattcatcactgccttcctaggggagcttcatggctgttctatgatactctgattcattctgtcaaatttgttctccaagagagctacagacaaaggatattcaaactgttgacttctgcatattcgacaattagcgttgctgatgtggctcatttcatggggatgagtgaggaggatgctacaaactatgctgtgcaaatcggttggagtttgggcgcagcgaccaagatgcttactgtcaaaaagccaaaggctcagatcaaccagaagcttgatgcgagcaaactgcagcgcctgactgagtgtgttttccaccttgagcactgatgctcagtgtcaatcgtgttgcatccccgtcacttctctactctgcacattttaagaaccatgtttaccatggctgaaaaggggtgatctctcagtactgaatttgcttctgtaagtggtttctgatagcgtgctagctgttactgcgcctatgggttgttcgtatggtggcccttcgtgccagaggcgcattgaaatgcgtcacactttgtcattactctggaccttaaccagggaagtcttgattgcataaaaatgctaacaagttggtcatgctcatgcccacggttgtccatcatatgaaaagtgaagtcttttggagttcgtagaagctgtttggtaacttgtattgttttcacgctgaaagacgggttaagcaaatgacttgtatggaactgaaataggaaggaatatttgtcattaagggggtgttt

SEQ ID NO: 17077 - DNA, 1290 bp, Zea Mays
gttgcccgcaaaggggactgctccgaattccccaccaggccacaagtcctagttccaaaaccctctctcctccccgtcctactcgtaccccatagccaatttccctccttcgctgccaatggacctctccgccgtccaggccgccctctccgacaagtcctacaccgccgtcgcctccctctgcgacgagctcctcctacaggccgcgtccaagggaaccaataccgacgaatggccctactctgtccacctcctggcccacctctacatcaatgacctgtatgcgatccgccgcccttgccctcgttttttccccatccttttgatgccttggtgttgttgtgacttgggagtgagcaggaacagcgcgcggttcttctggaaatcgctgccgcaggaggtgaaggacacgcggccggagctcgccgcggtctggaggattggtcagtgcctctggaacagagactatgctggtgtcaacacggccgcacaggggttcgagtggggccctgacctcactgaattcatcactgccttcctagttcgcaggggagcttcatggctgttctatgatactctgattcattctgtcaaatttgttctccaagagagctacagacaaaggatattcaaactgttgacttctgcatattcgacaattagcgttgctgatgtggctcatttcatggggatgagtgaggaggatgctacaaactatgctgtgcaaatcggttggagtttgggcgcagcgaccaagatgcttactgtcaaaaagccaaaggctcagatcaaccagaagcttgatgcgagcaaactgcagcgcctgactgagtgtgttttccaccttgagcactgatgctcagtgtcaatcgtgttgcatccccgtcacttctctactctgcacattttaagaaccatgtttaccatggctgaaaaggggtgatctctcagtactgaatttgcttctgtaagtggtttctgatagcgtgctagctgttactgcgcctatgggttgttcgtatggtggcccttcgtgccagaggcgcattgaaatgcgtcacactttgtcattactctggaccttaaccagggaagtcttgattgcataaaaatgctaacaagttggtcatgctcatgcccacggttgtccatcatatgaaaagtgaagtcttttggagttcgtagaagctgtttggtaacttgtattgttttcacgctgaaagacgggttaagcaaatgacttgtatggaactgaaataggaaggaatatttgtcattaagggggtgttt

SEQ ID NO: 17078 - DNA, 792 bp, Zea Mays
gaaggctcatctttcgactttttatgtattggaatgcaatacgtgtacatcatctcaatacaacacatatatgccatacttgtacatcatctgcttccgctaatataaaagacaactatcagttgctggaacatagaggcaaacaagccggaaaaaacaaaagaaaaaaaacaaaccaatcctggaccaacatgttatacatgcaatcatctgcaaatataaaagacaaccccaggaaggctcgtaccatcagaacatcatggctaatatcactacacaaccagttctcagagattatatctgctacagttacttgacagattagaacttcttgggtccaaacagaaacagctagacgacacaacatacgaacaaaacaacatcccagcatgaccaaccgatcagatcagccaaccaccaaacgcaggacgattactcgtatatcagtgaaaaagtagtaacttgaaaacccaagagttttgcgaagacaataatactggaaccaatgtataacgacagaacatttttttgcatatgtcagcactggccgatccgagtaatattactagtacataataactgtccttcaaaactaaaggccacatgcgaagggaaacaccatgtccaaaccaagggcaacttcactccatggaagaagaggttgggcctgcgccgaagccgctgccgccaccacgcccaaagccaggtggcttggcagacttcttgagcgtggcaggcacgatctcagacgggaggttcaggtagttgcgtaggtgctcaatgccatcgttg

SEQ ID NO: 17079 - DNA, 740 bp, Zea Mays
cacctataggtgtcgtcgtgacgccagtaagccaggagggctgcggagcgcgcgaccaaggcacaagctagaaaggaagagctgcagaaactgccagaaaaggttatcttgtcggaggttcgtcaagcagtacagaagatgcaagctgtaaatcagcagcttgacgaagctgaagctgctatcgatgagtattttaaaccgattgacaagaacgccaaaatcatagcagatatgcagttagagaaagaggaaaaacaaaccaaggagatgacaaaacttatgcaggaacagatgaaaatgcgaagagaaatcatgatgacaagagctgaggctgcaagcgtcgagtccagtgatactaaagcgggtggaaaagtggctaacatccctccgaaataagacactggaaaagtgggagttattgtgcgtatgtgctatatgctaggaaataagtgcgtacttacaattagacaatcgctaattgtgtggttagcgaaggctattgtgctgcttctttccatttcatgttttatccacataagctttgctttgtgcgataatgtgctctgtccattaacatgttacatttactacagcaagtatgttgaggtgctgtgtcagtttattttttctggggacttgtcgaatcccgcaattcgaggtgtccagcgtttcagatttgctgctggatgataaattgttgattttgccttactcatttcttctgaggtcagttttctcta

SEQ ID NO: 17080 - DNA, 2044 bp, Zea Mays
ataaatgcgaactttctccgaataacccccttgcccttggaaactagtcaagttcagtgcccccatacttccgtcgcggcggagatcgagtcgagcgcccgccacggcgatggcggctagagtcctgccgccgccgccgctccctctcgtactcctcttgctgctgctcccgctctcagcccgggacaccgtcgccgcgggcgaggatttcccacgcgacgggcgggtgatcgacctcgacgagagcaacttcgaggcggcgctgggcgtcatcgacttcctcttcgtcgatttctacgcgccatggtgcggccactgcaagcgccttgcgcccgagttagatgaagctgcaccaatgttggcagggttgagtgagcccattgttgttgccaaagttaatgctgataaatacaggaaacttggatcaaaatatggatgggttccctaccctcatgctttttatccacggtgttccaattgaatacactggttcgaggaaggctgatcagcttgtccgcaatctgaagaagtttgttgcgccagatgtttctatccttgagtcagactctgcgataaagaactttgttgagaatgctggtacaagctttcctatgttccttggttttggggtgaatgactcattgattgctgaatatggaaggaaatacaagaaaagagcatggtttgctgttgctaaagatttctctgaggacgtcatggtagcctatgaatttgacaaggttccggcgctagttgcaatccatccaaagtataaggaacaaagcttgttctatggcccatttgaagaaaatttcttggaagattttgtacgacaatcccttctccctttggttgtcccaatcaatacagagacgataaaaatgttgaatgatgatcagaggaaagttgttctcacaattttggaggatgattcagatgaaaattctacacagctggtaaagattttgagatctgctgctagcgcaaaccgtgatttggtgtttggatatgttggaatcaagcaatgggatgagtttgtggagacttttgatgtttccaaaagctcacagctgccaaagctacttgtgtgggatagaaatgaggagtatgagctcgtaagtacagtatcctcagtaattaattctattttctaataccaccatccatataaagtgttactggcatgtttctgactaatgatgcaaaagtttttctatcaataaaggtattgcttttataggttcctgtttgttgaccctcataattccctgagaaagttaatacttgattaagaaagaaactgctaccatctctccgataatcatcaaataagaatttgttattttctgggattgaattaaaatggttcttggtgaaggtggatggttcagagagattagaagaaggtactgaccaagcatctcaaataagccaatttcttgagggatacagagcaggaagaacaacaaagaagaaaattagcggcccttctttcatgggtttcctgaattctctggtcagcttgacctcgctgtacatccttatattcgtcattgcccttctgtttgtcatggtgtactttgctgggcaagatgatactccacagccaagacgaattcatgaagagtgatggaagcttggggagcttcttgcacctgaagtgtaaagatggctaatgtaccaggagatgtagctcagaggttatagatttcaaactttcaacggacgcaagtcttgaagagtggatttggctattgatgctgagattcttcaatttctattggccacaccaacttctacatcctgcctatttatgtttctgttttgtgcccttcaatttgttctttaatttagagcttagaaattagcctctgcctgtgtattttagaaattgtccattccagagtccatttctgtgaaaatatatttattatcatactctgctactgaacgtttgtacaattaatacatgatgtatagactgttctggtgctatggtactcgctagttgtgaagttgtcaccaaaaagtaaaacaaaacaaa

SEQ ID NO: 17081 - DNA, 1926 bp, Zea Mays
agctgcttttttttttgcgcgcgcgcggtgacacttttgctggattctagctaggcaacagtagcgttacacgctggatggacgccaagaagggcatcggcagggcgaggaagcagcgcttgtcgcgtccgggggcaagaaaaaaaaaacaagcatgcatgtattttgaccagtgaggaaacaacacatgcgtggcgtggaccgacatgcgcgcggccgtcctgttctttctcgacgggacagagcctgttgctccgctgcaggaatctagctgttacaaaatatgttaccatgatgtgatcaacccttgtcagttctttcccaagggacacaccccttgggagacactattttgtacttatatataaacagtgtactctctgcaataaagacaaccgtgacttcatttgtattctctctgtctctctccactgagtatacttcaacacgttatcagcactttgctcgccaaaacagagagaaataacaaggattatgggtacacgctatgccagaatcatcatgatgaagtccttgtccgattgcagcacgcacaagcagcgctccttcatgtaatcagagaagcctgattttacaagcctcattgcgcaggcgcgcggctctgactgcgaacgcgggcagggcgcctcccagcctgggtgtcggttttaggcgcgtcagtcggcgtgtgtgaagctagccccgacacgggcgcggctggtcaccggcgcgcggctagagcgggcttggcagggtcccggcggggacgtcctggtgcggctgtttggcgcagcgtcctgtgcctcggcatgagcgcgcacggaggaccggcggcgtttccctggcggccgcgcgcccgaccaggcaaccgcggacgcggctccctgcgcaggctggccctcggcgcggcacggtttgggcgcggctggtcgggccctggcatggatggcccgtcgccgatgaggccacggtcggccccaggcgcggagggcctctcgccgggtgctgctggctcctggcgcgacgcaggcgcgtccggcccccgaagacgctcgggcgcggcagcggttggccccggcgcgggtgcagctagccctcgggagacggcggacgaacgctacccgggcggcgcggcatcgactctggcagagggcaggcgggcccccacggcccccacacgcgcaagcaggcctgctcggcctccacgtgggcacgagcagcgagatgctctgcctccgggcaagggcacagccggcctcggcctcggcctcggacctagcgcaggggcgggcgcggtccgaccccagcaccagcacccatgcatcccagcgcggcgcgtgcccggtcggccggcctcggcaagccccggcggaccacggcggtcctcctcgggcgcgactcctcggctggagcgctcctggcggctcggccacggcccagccgacgtggattgggcgtgagcgctcctcgacgcgagcgcgctcggcggcggtgcggtgaaggcgcaggtccggcggcggccgaacaccctggcggcggctggggcgctccctggaagacgacggctggagcggttagggtttggaaaacctaatcgcccctatttctaatgggcttcgtggcctcagttgggccgtttaggctggccagccaggctgggccggcgtgctggccaccaggccgctgcctggcccgcctggtaggccgccttggctgttttcaagggcccagaatggcccattttattattttaaattctgaattttaagtataagactctgttttatatatcaattcagttctaacttgtgttagtgtgtataaatttgacatttcgactgcaaattgtactatatatattgtacatacttgtctgttttattataaatctggcagactttaatttgtgaattatctttgttttta

SEQ ID NO: 17082 - DNA, 2368 bp, Zea Mays
cccggcaccctgcccgcctgtcgacactgtcgggtccggttggtgccccagcgaaaagcaaaagaaatactactaccggaagaaactgcctcctcctctcctcgcttctctctttggaggcaggcgcaggcgggcgagtggtccggtacacctctagctgcagatcccagctcgcgcggtccagcaggccagcactaagctccctccctcctgtccacctggacagcgcgcccgatcgtgaatcgtcgcttgctctggagaaagcttgcatttttttttcgtttcttcttcttcttcttcttcttcttctttttttttttgcttcgcatccttttttcctggcgcggtttcctttgtacgggaaattttcggttggtgcggttggttggtcattttcccgcaccttctctttggttcttgctcgagagcgccatctttcctgctacccgttgactcgggcgggcattccgtcgagcaccttccgtgcggtgtggggagcgacggttcctggtttctcggggacgttccttgatgccgctgttgtgtcaggcgcaggattctagcggatggaatgccacagctgcgctgaaatcaagaagatctgtagcgatcgctggtgcggggtttgaagatgctgcagaaggcgccagcgatcttggtgacacgatgagtcttgcacgcaagcagaaggttgtcaaggaaacagtggagatggaggaggagcaggagtttgtttggaaatctaacctgctcccctacaaggatgatgatgccttcgttcttcctgagagtagcaaggaggaatacgcatcaacatcaggagacacagctccgtctggcaaaatggaccccaggatagaaaggtctggaagcaatgggacaagcaaggtccctagactgggttccatgcttgggacagccagcatggctggatttggcaaggcagtggagattctagacacgttaggctgcttgatgacgaccttgagctcagatggtggctttgtttccaggaccaagaccaaaggatgcaagatatcaattcttgcttttgaggttgccaacacaatacttaaaggtgctagtattatgcaatctctctcggaagacactgtcacatacttcaaacaggttgtgcttccttccgaaggtgtgcagaatttggtttccagtgagatgagtgaactgatgcgaattgcagctaacgacaaaagagaagagctgaaaatattttcccaggagattgttaggttcgggaaccgctgtaaagatccccagtggcataacctggatcgctactttgtgaagttagaatcagagagtgcaccccagaagcagctgaaagaaacagcaatagcagagatgcaaaagttgatgaacctcgttcaacgtacaactgatttgtatcatgagttgcatgcactagacagattcgagcaagagtaccgctctaggctaaacggaaagggtaatacagatagatttgaaaaaggagacaatattcaaattgtgagactagagttgaagacccaaagtagttatgtgaagagcttgaaaaaaagatctctctggtccaagacgttggaagaagtggtcgagaagcttgtagaagttgtgcactacttgcatgtcgagatcgacaatgctttcggaccttctgatggaggaggtgtggtggtgaatgcggaaccaaccgtgagctgtcaaaggctaggtcctgccgggctcgcattacattatgcaaacattatcatccagatatatagcatcgtttctcgatccgggtatgtgccagcaaattcaagagacgccctctaccagggactgccaccgaggatcaagtcggcgctaccaaatgagctgaggacgacctcggcgcctcagctcaccgtcgaccagataagggctaggatggagaagaccctgaaatggctcgcgcccatggccatcaacaccacctgcgcccgaggcttcttcctgaggtttagcgagtgggcgaaatcagggaccgagagcgttggcagacgactgggccaagcggatcgggtcgagacgctgtaccatgcggacaaggcaaggaccgaggatcgcattctggagctggtcgtctggcttcaccacctcgtcagccagagtagccggccggcgttgcaaaaaggccactgaccagatagatgccaggaatggtggaagaagctggagctgttcttgccatggagaggaggacgtccgggtacagtcggggagatgcttgtatatgcgtgctttgtaacatcagctgagtaggttttagttactactttgttctgcttgttgtttgtaagtgtacttgtgaataccacgttatacaatgcaaagaaaaacgcac

SEQ ID NO: 17083 - DNA, 2008 bp, Zea Mays
cccggcaccctgcccgcctgtcgacactgtcgggtccggttggtgccccagcgaaaagcaaaagaaatactactaccggaagaaactgcctcctcctctcctcgcttctctctttggaggcaggcgcaggcgggcgagtggtccggtacacctctagctgcagatcccagctcgcgcggtccagcaggattctagcggatggaatgccacagctggtacgcgctgaaatcaagaagatctgtagcgatcgctggtgcggggtttgaagatgctgcagaaggcgccagcgatcttggtgacacgatgagtcttgcacgcaagcagaaggttgtcaaggaaacagtggagatggaggaggagcaggagtttgtttggaaatctaacctgctcccctacaaggatgatgatgccttcgttcttcctgagagtagcaaggaggaatacgcatcaacatcaggagacacagctccgtctggcaaaatggaccccaggatagaaaggtctggaagcaatgggacaagcaaggtccctagactgggttccatgcttgggacagccagcatggctggatttggcaaggcagtggagattctagacacgttaggctgcttgatgacgaccttgagctcagatggtggctttgtttccaggaccaagaccaaaggatgcaagatatcaattcttgcttttgaggttgccaacacaatacttaaaggtgctagtattatgcaatctctctcggaagacactgtcacatacttcaaacaggttgtgcttccttccgaaggtgtgcagaatttggtttccagtgagatgagtgaactgatgcgaattgcagctaacgacaaaagagaagagctgaaaatattttcccaggagattgttaggttcgggaaccgctgtaaagatccccagtggcataacctggatcgctactttgtgaagttagaatcagagagtgcaccccagaagcagctgaaagaaacagcaatagcagagatgcaaaagttgatgaacctcgttcaacgtacaactgatttgtatcatgagttgcatgcactagacagattcgagcaagagtaccgctctaggctaaacggaaagggtaatacagatagatttgaaaaaggagacaatattcaaattgtgagactagagttgaagacccaaagtagttatgtgaagagcttgaaaaaaagatctctctggtccaagacgttggaagaagtggtcgagaagcttgtagaagttgtgcactacttgcatgtcgagatcgacaatgctttcggaccttctgatggaggaggtgtggtggtgaatgcggaaccaaccgtgagctgtcaaaggctaggtcctgccgggctcgcattacattatgcaaacattatcatccagatatatagcatcgtttctcgatccgggtatgtgccagcaaattcaagagacgccctctaccagggactgccaccgaggatcaagtcggcgctaccaaatgagctgaggacgacctcggcgcctcaggtgctcaccgtcgaccagataagggctaggatggagaagaccctgaaatggctcgcgcccatggccatcaacaccacctgcgcccgaggcttcttcctgaggtttagcgagtgggcgaaatcagggaccgagagcgttggcagacgactgggccaagcggatcgggtcgagacgctgtaccatgcggacaaggcaaggaccgaggatcgcattctggagctggtcgtctggcttcaccacctcgtcagccagagtagccggccggcgttgcaaaaaggccactgaccagatagatgccaggaatggtggaagaagctggagctgttcttgccatggagaggaggacgtccgggtacagtcggggagatgcttgtatatgcgtgctttgtaacatcagctgagtaggttttagttactactttgttctgcttgttgtttgtaagtgtacttgtgaataccacgttatacaatgcaaagaaaaacgcac

SEQ ID NO: 17084 - DNA, 2371 bp, Zea Mays
cccggcaccctgcccgcctgtcgacactgtcgggtccggttggtgccccagcgaaaagcaaaagaaatactactaccggaagaaactgcctcctcctctcctcgcttctctctttggaggcaggcgcaggcgggcgagtggtccggtacacctctagctgcagatcccagctcgcgcggtccagcaggccagcactaagctccctccctcctgtccacctggacagcgcgcccgatcgtgaatcgtcgcttgctctggagaaagcttgcatttttttttcgtttcttcttcttcttcttcttcttcttctttttttttttgcttcgcatccttttttcctggcgcggtttcctttgtacgggaaattttcggttggtgcggttggttggtcattttcccgcaccttctctttggttcttgctcgagagcgccatctttcctgctacccgttgactcgggcgggcattccgtcgagcaccttccgtgcggtgtggggagcgacggttcctggtttctcggggacgttccttgatgccgctgttgtgtcaggcgcaggattctagcggatggaatgccacagctggtacgcgctgaaatcaagaagatctgtagcgatcgctggtgcggggtttgaagatgctgcagaaggcgccagcgatcttggtgacacgatgagtcttgcacgcaagcagaaggttgtcaaggaaacagtggagatggaggaggagcaggagtttgtttggaaatctaacctgctcccctacaaggatgatgatgccttcgttcttcctgagagtagcaaggaggaatacgcatcaacatcaggagacacagctccgtctggcaaaatggaccccaggatagaaaggtctggaagcaatgggacaagcaaggtccctagactgggttccatgcttgggacagccagcatggctggatttggcaaggcagtggagattctagacacgttaggctgcttgatgacgaccttgagctcagatggtggctttgtttccaggaccaagaccaaaggatgcaagatatcaattcttgcttttgaggttgccaacacaatacttaaaggtgctagtattatgcaatctctctcggaagacactgtcacatacttcaaacaggttgtgcttccttccgaaggtgtgcagaatttggtttccagtgagatgagtgaactgatgcgaattgcagctaacgacaaaagagaagagctgaaaatattttcccaggagattgttaggttcgggaaccgctgtaaagatccccagtggcataacctggatcgctactttgtgaaaatcagagagtgcaccccagaagcagctgaaagaaacagcaatagcagagatgcaaaagttgatgaacctcgttcaacgtacaactgatttgtatcatgagttgcatgcactagacagattcgagcaagagtaccgctctaggctaaacggaaagggtaatacagatagatttgaaaaaggagacaatattcaaattgtgagactagagttgaagacccaaagtagttatgtgaagagcttgaaaaaaagatctctctggtccaagacgttggaagaagtggtcgagaagcttgtagaagttgtgcactacttgcatgtcgagatcgacaatgctttcggaccttctgatggaggaggtgtggtggtgaatgcggaaccaaccgtgagctgtcaaaggctaggtcctgccgggctcgcattacattatgcaaacattatcatccagatatatagcatcgtttctcgatccgggtatgtgccagcaaattcaagagacgccctctaccagggactgccaccgaggatcaagtcggcgctaccaaatgagctgaggacgacctcggcgcctcaggtgctcaccgtcgaccagataagggctaggatggagaagaccctgaaatggctcgcgcccatggccatcaacaccacctgcgcccgaggcttcttcctgaggtttagcgagtgggcgaaatcagggaccgagagcgttggcagacgactgggccaagcggatcgggtcgagacgctgtaccatgcggacaaggcaaggaccgaggatcgcattctggagctggtcgtctggcttcaccacctcgtcagccagagtagccggccggcgttgcaaaaaggccactgaccagatagatgccaggaatggtggaagaagctggagctgttcttgccatggagaggaggacgtccgggtacagtcggggagatgcttgtatatgcgtgctttgtaacatcagctgagtaggttttagttactactttgttctgcttgttgtttgtaagtgtacttgtgaataccacgttatacaatgcaaagaaaaacgcac

SEQ ID NO: 17085 - DNA, 2371 bp, Zea Mays
cccggcaccctgcccgcctgtcgacactgtcgggtccggttggtgccccagcgaaaagcaaaagaaatactactaccggaagaaactgcctcctcctctcctcgcttctctctttggaggcaggcgcaggcgggcgagtggtccggtacacctctagctgcagatcccagctcgcgcggtccagcaggccagcactaagctccctccctcctgtccacctggacagcgcgcccgatcgtgaatcgtcgcttgctctggagaaagcttgcatttttttttcgtttcttcttcttcttcttcttcttcttctttttttttttgcttcgcatccttttttcctggcgcggtttcctttgtacgggaaattttcggttggtgcggttggttggtcattttcccgcaccttctctttggttcttgctcgagagcgccatctttcctgctacccgttgactcgggcgggcattccgtcgagcaccttccgtgcggtgtggggagcgacggttcctggtttctcggggacgttccttgatgccgctgttgtgtcaggcgcaggattctagcggatggaatgccacagctggtacgcgctgaaatcaagaagatctgtagcgatcgctggtgcggggtttgaagatgctgcagaaggcgccagcgatcttggtgacacgatgagtcttgcacgcaagcagaaggttgtcaaggaaacagtggagatggaggaggagcaggagtttgtttggaaatctaacctgctcccctacaaggatgatgatgccttcgttcttcctgagagtagcaaggaggaatacgcatcaacatcaggagacacagctccgtctggcaaaatggaccccaggatagaaaggtctggaagcaatgggacaagcaaggtccctagactgggttccatgcttgggacagccagcatggctggatttggcaaggcagtggagattctagacacgttaggctgcttgatgacgaccttgagctcagatggtggctttgtttccaggaccaagaccaaaggatgcaagatatcaattcttgcttttgaggttgccaacacaatacttaaaggtgctagtattatgcaatctctctcggaagacactgtcacatacttcaaacaggttgtgcttccttccgaaggtgtgcagaatttggtttccagtgagatgagtgaactgatgcgaattgcagctaacgacaaaagagaagagctgaaaatattttcccaggagattgttaggttcgggaaccgctgtaaagatccccagtggcataacctggatcgctactttgtgaagttagaatcagagagtgcaccccagaagcagctgaaagaaacagcaatagcagagatgcaaaagttgatgaacctcgttcaacgtacaactgatttgtatcatgagttgcatgcactagacagattcgagcaagagtaccgctctaggctaaacggaaagggtaatacagatagatttgaaaaaggagacaatattcaaattgtgagactagagttgaagacccaaagtagttatgtgaagagcttgaaaaaaagatctctctggtccaagacgttggaagaagtggtcgagaagcttgtagaagttgtgcactacttgcatgtcgagatcgacaatgctttcggaccttcatggaggaggtgtggtggtgaatgcggaaccaaccgtgagctgtcaaaggctaggtcctgccgggctcgcattacattatgcaaacattatcatccagatatatagcatcgtttctcgatccgggtatgtgccagcaaattcaagagacgccctctaccagggactgccaccgaggatcaagtcggcgctaccaaatgagctgaggacgacctcggcgcctcagctcaccgtcgaccagataagggctaggatggagaagaccctgaaatggctcgcgcccatggccatcaacaccacctgcgcccgaggcttcttcctgaggtttagcgagtgggcgaaatcagggaccgagagcgttggcagacgactgggccaagcggatcgggtcgagacgctgtaccatgcggacaaggcaaggaccgaggatcgcattctggagctggtcgtctggcttcaccacctcgtcagccagagtagccggccggcgttgcaaaaaggccactgaccagatagatgccaggaatggtggaagaagctggagctgttcttgccatggagaggaggacgtccgggtacagtcggggagatgcttgtatatgcgtgctttgtaacatcagctgagtaggttttagttactactttgttctgcttgttgtttgtaagtgtacttgtgaataccacgttatacaatgcaaagaaaaacgcac

SEQ ID NO: 17086 - DNA, 2406 bp, Zea Mays
cccggcaccctgcccgcctgtcgacactgtcgggtccggttggtgccccagcgaaaagcaaaagaaatactactaccggaagaaactgcctcctcctctcctcgcttctctctttggaggcaggcgcaggcgggcgagtggtccggtacacctctagctgcagatcccagctcgcgcggtccagcaggccagcactaagctccctccctcctgtccacctggacagcgcgcccgatcgtgaatcgtcgcttgctctggagaaagcttgcatttttttttcgtttcttcttcttcttcttcttcttcttctttttttttttgcttcgcatccttttttcctggcgcggtttcctttgtacgggaaattttcggttggtgcggttggttggtcattttcccgcaccttctctttggttcttgctcgagagcgccatctttcctgctacccgttgactcgggcgggcattccgtcgagcaccttccgtgcggtgtggggagcgacggttcctggtttctcggggacgttccttgatgccgctgttgtgtcaggcgcaggattctagcggatggaatgccacagctggtacggtatgtgatgctttcgctgtcctggactcctagcgctgaaatcaagaagatctgtagcgatcgctggtgcggggtttgaagatgctgcagaaggcgccagcgatcttggtgacacgatgagtcttgcacgcaagcagaaggttgtcaaggaaacagtggagatggaggaggagcaggagtttgtttggaaatctaacctgctcccctacaaggatgatgatgccttcgttcttcctgagagtagcaaggaggaatacgcatcaacatcaggagacacagctccgtctggcaaaatggaccccaggatagaaaggtctggaagcaatgggacaagcaaggtccctagactgggttccatgcttgggacagccagcatggctggatttggcaaggcagtggagattctagacacgttaggctgcttgatgacgaccttgagctcagatggtggctttgtttccaggaccaagaccaaaggatgcaagatatcaattcttgcttttgaggttgccaacacaatacttaaaggtgctagtattatgcaatctctctcggaagacactgtcacatacttcaaacaggttgtgcttccttccgaaggtgtgcagaatttggtttccagtgagatgagtgaactgatgcgaattgcagctaacgacaaaagagaagagctgaaaatattttcccaggagattgttaggttcgggaaccgctgtaaagatccccagtggcataacctggatcgctactttgtgaagttagaatcagagagtgcaccccagaagcagctgaaagaaacagcaatagcagagatgcaaaagttgatgaacctcgttcaacgtacaactgatttgtatcatgagttgcatgcactagacagattcgagcaagagtaccgctctaggctaaacggaaagggtaatacagatagatttgaaaaaggagacaatattcaaattgtgagactagagttgaagacccaaagtagttatgtgaagagcttgaaaaaaagatctctctggtccaagacgttggaagaagtggtcgagaagcttgtagaagttgtgcactacttgcatgtcgagatcgacaatgctttcggaccttctgatggaggaggtgtggtggtgaatgcggaaccaaccgtgagctgtcaaaggctaggtcctgccgggctcgcattacattatgcaaacattatcatccagatatatagcatcgtttctcgatccgggtatgtgccagcaaattcaagagacgccctctaccagggactgccaccgaggatcaagtcggcgctaccaaatgagctgaggacgacctcggcgcctcagctcaccgtcgaccagataagggctaggatggagaagaccctgaaatggctcgcgcccatggccatcaacaccacctgcgcccgaggcttcttcctgaggtttagcgagtgggcgaaatcagggaccgagagcgttggcagacgactgggccaagcggatcgggtcgagacgctgtaccatgcggacaaggcaaggaccgaggatcgcattctggagctggtcgtctggcttcaccacctcgtcagccagagtagccggccggcgttgcaaaaaggccactgaccagatagatgccaggaatggtggaagaagctggagctgttcttgccatggagaggaggacgtccgggtacagtcggggagatgcttgtatatgcgtgctttgtaacatcagctgagtaggttttagttactactttgttctgcttgttgtttgtaagtgtacttgtgaataccacgttatacaatgcaaagaaaaacgcac

SEQ ID NO: 17087 - DNA, 2297 bp, Zea Mays
cgaaaaccctactcggcccagcgcaccgctcggctccccgccaccgccgcagccgagatggaggacatcgaggacgtgctgggcgcggccggcctttctggcggcggagcgcctccggggctccgcctcccgctagccgccgtcgcggtgaagcccaagcgccggtcgtccagggtcgcacaggcgccgcctcagcccgaggccgggatccccggcacgcagacgatttacgtcaagacattcgggtgctcacataaccagagtgacagtgaatacatgtcaggtcagctctctgcatttggatatgcgatcactgaagatcctgaaggagccgatttgtggctaattaacacatgcacagtgaaaaatccaagtcaatctgcaatgacaaccctcatatctaaatgcaagaatgcgaacaagccacttgtagtggctggatgtgtaccccaaggaagccagggcctcaaggagcttgaaggtattagtataattggagttcaacagatagaccgggttgttgaagtggttgaggaaactttaaagggacacgaggttcgcttgttgagtcggaaaacattgccgtcacttgatttacctaaggtaagaaagaacaagtttattgagattcttcctattaatgtgggatgtttaggcgcctgcacatactgtaagacaaagcatgctcgtggccatttgggaagctatactattgacagcttggtggatcgtgtgaaaactgtcgtctccgaaggtgtccgggagatctggttgagcagcgaagatactggtgcttatggacgggatatcggtacaaatcttccaaatttgttaaatgcgatcgttgcggagcttcctgttgaccaaagcacaatgctccgcataggcatgacaaatcctcctttcatactagagcatttgaaggagatagctgccgttttgtgtcatccctgtgtttactctttcctccatgtccctgtgcaatctggaagcgattctgttttaaaggcaatgaatcgtgaatatactgttggcgagttcagaaaggtagtcgacactctgtgtgagcttgtccctggaatgcaaattgctacagatattatctgtggctttcctgtgagaccgacgaagatttctctgagactgttaacctcgtaaaggaatatcaattccctcaagtccacatttcgcagttctaccccagaccagggacgcctgctgctaggatgaagaaagtaccaagcaacgaagtgaagaagcggagccgtgaattgacttcagtcttcgaatcgttttcgccataccaaggaatggaaggcaaagtagagaagatctggatcaccgagattgcgtctgatggtgttcacctggtcggacataccaagggatacatccaggtgctggtaactgctcctgatagcatgttgggaacgtccgcggacgcgaagatcacgtctgtcggacgatggtccgtcttcggtgtagtggtagaaggatctgttgcagtcatagaagcaccaatacaaactagtgccgaactgcaggaggaacacgtacagaatcaggtggaggaagctggttgctgtgccaccgactcctgtggcgcctgcgcgtgctccaatgaggcgcaaccgtgtggcccagaccgatgtggagatgcacttcgtgccccgcagacctgtggtggtgacgttgttacaactcgccaggaggcactccagcctacgctcgtgaggagaagcgtagatggaaccacgaaaggaagcgacagtactgcggcgcattcagcagggaaggaacagcgggtggaagtagtgactaggcgtggggtagatatcgacacggttctgtggtgcggtttggccgcgagcttcgctgtgacggtagccctgcttgcactcctcaccagcaagattttgtcgacgacatcacactagggctaataaggcgaagctttgtaacttgtggtttggttcttgagcgtgtcgctggatcgattttggcggtctctttctttacttgatccgcctgtatgtcgttgcaaaaaactgtgccactgtatacaaaaacacgtggttgcaaacaagttttctcgttgctttcgggtgctggctgcatcaatgatcagggttccatgaaggtgaagtacattatgtgtgtttgccaccgtgctaaaaatagccgaaaaggggagcaggtgctgccaaacgaacaggtcggagaaacgattgagcaggagggaaccagacaacagcagcaaacagactgaagcacaaaaaatcggaagaataaaaaaa

SEQ ID NO: 17088 - DNA, 648 bp, Zea Mays
cgaacatgtagtagaagaacaaacctaccgacatatccattgggtttccatttaaaccattaataccatagatagagaagttgaccaaacttatattctactagacacccataccctaattgagaaaaacccacctaatttcaggtacccattgctaatagagaaaaccattgctaatagagaaaaaccgacgggttttggataaccattgccatcttacaccatacaccagtagtcaaattctattggcattttatgaggaccagccgtgccgggtcagcagccataccatcaccacaaccagtccaccacgagacaagcacgccctgctgacctcacattatcagataagactagcctaaacttacacatatgagtattacttggtacatccaaagtacacactaaccctactactacccaacacaagtgaaacagaaaccagccgaacacaaactgaagcctaaactacggggaagtcgccaacgtgagtcgtgacacatctacatcagaaactagtaaactcctacaagagaccacgaagccacccatatcatcaacctagcaggcggtgcccgcgtgcagcctcaccgcccggctcttcgacatctccgcgtcggctgttgccgtcgccggcttcgattgctt

SEQ ID NO: 17089 - DNA, 592 bp, Zea Mays
taccgacatatccattgggtttccatttaaaccattaataccatagatagagaagttgaccaaacttatattctactagacacccataccctaattgagaaaaacccacctaatttcaggtacccattgctaatagagaaaaccattgctaatagagaaaaaccgacgggttttggataaccattgccatcttacaccatacaccagtagtcaaattctattggcattttatgaggaccagccgtgccgggtcagcagccataccatcaccacaaccagtccaccacgagacaagcacgccctgctgacctcacattatcagataagactagcctaaacttacacatatgagtattacttggtacatccaaagtacacactaaccctactactacccaacacaagtgaaacagaaaccagccgaacacaaactgaagcctaaactacggggaagtcgccaacgtgagtcgtgacacatctacatcagaaactagtaaactcctacaagagaccacgaagccacccatatcatcaacctagcaggcggtgccaggtgagggacatgagacagagcacgttgcacagggacgag

SEQ ID NO: 17090 - DNA, 611 bp, Zea Mays
gagttttaaaaacatgagtttacgaacatgtagtagaagaacaaacctaccgacatatccattgggtttccatttaaaccattaataccatagatagagaagttgaccaaacttatattctactagacacccataccctaattgagaaaaacccacctaatttcaggtacccattgctaatagagaaaaccattgctaatagagaaaaaccgacgggttttggataaccattgccatcttacaccatacaccagtagtcaaattctattggcattttatgaggaccagccgtgccgggtcagcagccataccatcaccacaaccagtccaccacgagacaagcacgccctgctgacctcacattatcagataagactagcctaaacttacacatatgagtattacttggtacatccaaagtacacactaaccctactactacccaacacaagtgaaacagaaaccagccgaacacaaactgaagcctaaactacggggaagtcgccaacgtgagtcgtgacacatctacatcagaaactagtaaactcctacaagagaccacgaagtgccaggtgagggacatgagacagagcacgttgcacagggacgag

SEQ ID NO: 17091 - DNA, 2983 bp, Zea Mays
tggagatcgcggacaccgttgagacggcggtggacgcggacaccatgttggcgcttggcggctagcaaaaggatgggtgctgccacagaagtaggggcgacgacgcggacgcccccgccgcctaggcctcctccctcctgagttcgccgctcgtctcaccagtcaccacaccagcgaggcgcgggtctcgcccgtcgaggtcctgggttcgggccagcgttttcgggggtgaggacgggctcgcgccgaggggcttcaccggtacctccgccgttcgtcggcggtgggcactggacttcaggtgcgtctgcgtatctctcttccgctgcacgaaaccgagcttccggtcagtggagtgagggtgattctgggcgattcggagagattgttcgtcgggtggcgacgaccgtgggggctccggttccgtcgaccgcgtggcggggtctttgctggctggcggttccgtggggaagggggattgggttgaaggggaagttatccctcatactctactgcacaaggtatgttttatagtttctcctttcttctatcaatacttaaagtgcaagttatatgacacattttcttttccattctaaatgcatgctttaatactggttatcatttatccatgagtgaccatatagatgagcatgagatctgcacgtgctctacatttaaaaatgcaggacagtggcctggctatcgcatgctccttctgcatcttggtttctccagagtacactacaggtctatatatatacatcagagagagggttttctgttcaacaatccaagtggttttcttgctgtggagcatatggaaagttgtagttgtaggatttatgagtgagctgggaagaggaagagagggcctaagagcagtgggaatgggaaaattgagaaaacactagtttcctccttgagaaacagaggtggaagctttgtccggtgtttcccaatgactcccattcctgccgttcttaagcgctccatccttttcattttggcttgctgcgcacttgtttcagtagactaccaaattatgctcctatttcgatgatttgcatttggaagtgagcatggaagaggaagtaaagatgatctaagagcagtgggcatgggaacatggaggaaggcctatgaggttgaaacctcattttgtgtcttcctaatgcctcccattcctatcgttcttaggtgatccttcctcttgctttaggctcacatgacatacatgatgagtggtgatctgacatttttttttctttaatgtttgttttggtatgcttcaatagatgcatagtttacgatgttggtttgcttactggaatttttaagattaaaattctttggtttgtttggtcacagacaatttaaaggtatagcttagttagactgccagtaattcaagtttcagattcctctagcacaaccatacaactgcttaactttgactgttatgagtatgaacacatcttatgctgatatttatcagctagcatatggagtaaaaaactttctagcatttcctcgaacttaactgcaagagacagaaatgctatttgacagaacatatgatggcatgcattttttgccatcttctctttgaccaagtactgcaaaagaaagtacagataaacaaggatgatgaaacacaagatatgaacaccgtcatctgactctgcagcagaaacaaaattatcaacttcctgcaaaatttgaaccaaattagctacactgagatcacacaagcattgggcatagcaacaaaaggtggtcgataagtttgcaagaagcaaatgtggcaagtagaagatttatgactacctgcattctgtctgcactgcaaaaaaaaaagaagctcggctctggcaaatgattgctcaacatgtgagctcctggcgatatgcactaataagtgataactggctacactctgggtccaagcagctgtgcaccatctcatagagccccagccaagtgtaaagtttgcagagccgagaattttttactccatgcgtactttgtgctagtctctagtaattgtttccggtcatctctaagtcacaatttcatgggaactcatttgttttcttcttcttaaaaaaaagagaagtgcactaataagtagaaacaataaaattggtgtctatgtatgaataaacagcttggagttttcttgctagcctgaacatttcttagtttttcaactgtgacaactgtcactgtcttattgtctttcctcttagcctgaacgattataatttacacctctcaagctttcaggtgtcaactgtgatagttatcaccatcttcttgttcgctttagttatgatgttgtcaatttcttatgccttggaagagcttctaattgctttcaaatagcatggtattcctggcatctgaatcatggctatagctgaaatgtttaagatatgttatcccctaattgttctaattcttaaatgctgggtatgctggtggtcctgttagatatgggtaaagcttaagattccctccatatgatttgtatttacactcagtctgcaggacaaagcttggccatttcatatccacatgccctctccgtgtcatcgactgtttcagctctaattatctgcatggaccagattggctaggagagggctacctcaccaaccagcttgccccttttgtgatcaagctgacaaaactatcaatgacatcctctcatcttgtgtcttgattagggaggtttggagctgcattctaaagtggttaaggatcttaaggttgagggtttgtttgggagcaagtgtaatagaggggattgagtgggttagaatcccttattattcaagcaagtgtaatggagagaactgagaaggtaagaatcccttaatattcaaattgaataataagatattctaacccctcaatcctctccattacacttactcccaaacaaaacctggagctgattctggtacccatttctttg

SEQ ID NO: 17092 - DNA, 564 bp, Zea Mays
atcaatcccacccccaccacggcaccacccgcactgtgcagcagcctcctttcgtctcgtagttggctggggttgccaacgcgacacctcgtcggaatccggtcgcgcgacctccacttctcgccggccggagcgggtgcgccatcaccatggacccggaagcggtacggaaaagcctggagcccaccgcaaactgtcgaaaaaaatcaccggctccacccctgcgcggctccacttctacgacccctttcgtcctcagcggagtcagcatcgaagccgctgagcacggtcgcctcctctgctcctttgtcgtcacccctcgccttgcggaggaaatagaggtcgagggaaagctgttgcgtgccggcaagtcagtcggtgtcgtctctgtcgatttcaggaagaaaaagacaggaaaactgatggcgcaggcccgtcacaccaagtatcttgtggcatcaagcagattgtgaggctgcccccttctgttaacaagatgtcaacataattgcgcccgaactgtccattactgatgccattattaataggcagcaacgatacaac

SEQ ID NO: 17093 - DNA, 2029 bp, Zea Mays
tacaacataccacctagcagtcagctacctccctgcagaattggctacattcaaacattcagttaacaaacaaggcaaagttcagaagcatggagtcaaagagaagctagcaaacaaagctcccattgacttcctcgagatccctgcaaatgcaatgcaataccctcgcctatattaactcgtgttctaccctcagcaaggcacttttagctgcagcttaagcaatggtcgtctccctggtgctcccgttcaccctcctcgcgggcattctcctcctctccggatatgccttggctgggccggagaccgctgcggagccgggcgagatggtcctgacgctggacgctggtaacttctcggaggtggtggccaagcaccagttcatcgtcgtcgagttctacgctccatggtgtggccattgcaagcaactcgctccagagtacgagaaggcagccgccgttctgagggatcacgacccgccgttggtgctcgccaaagtggacgcgtacgacgagaggaacaaggatatcaaggacaagtaccaggtgcacgcgtaccccaccctcaagatcatagagaacggagggaaggacgtgcgtggctatggtggtccgagggatgccgatggcatcgtggagtacctcaagaagcaggtcggcccggcttccatcgagctcagttcggcggaggctgctcaggcgtccatcggcgacaaaggagtgattcttgttggagttttccccgagtttgctggtgtggagtacgagaatttcatggccgtggcagagagaaaacggtcagactacgatttctttcacacgtcggacgcgagcattctgccgcgtggtgatgtagccatcaagggccctgctgttcgtctctttaaaccatttgatgagctctttgttgattcacaggattttgatacggatgctcttgaaaaattcattgaagtgtctggtttccctgcagtggttaccttcgatgctgacccaaccaaccataagtttcttgagagatactacagcactcctagcgccaaagcaatgcttttcttgaacttcagcgacgacagaatcgaggccttcaagagtcagattcaagaagctgccacgaaattcagtgctaataacataagttttttaattggtgacgttgaatctgctgaccgtgccttccagtactttgggcttaaagaggacgatgtgccgctcctttttgtgattgcacagggtgggaaatatctcaatccgaccatcgaccctgatcaagtcataccctggttgaagcagtatacatatggaaacttgacaccttatgtgaagtcagcgccaatcccaaaggtgaatgaccaacctgttaaggtcgttgtggctgacagtatcgatgatgttgttttcaactctggcaaaaatgtactgctcgagttctatgcaccttggtgtggccattgccggaagctggccccaatcctggaggaagttgcagtctcattgcaagacgacgaagacgttgtcattgcaaagatggatggcactgcaaatgatatccctaccgactttgcggtggagggataccccacgatctacttctactcaaccaccggtgaactttattcctacaatggcggaagaacggccgaggacatcatcagtttcatcaagaagaacaagggccccagagcgggtgccgtggacgaacagacgggtgatgctagtgctgcagaggaggccgttacaccgccgtcgtcgtcagagcttctgaaagacgaactctgatcacggtgccatatgtaggcatgcagctagctacagcgagagaatcgggcacgtccagagattcagagaaaatattcagttataacttacagtactaaatgcactcaggtcgctagttttatttgtcccgagaattattattaatgatcaaaaccgttactgatttgaataaggctagtgtaatccaccactcaactttttccttgtttctgccaaattcatgtagaaatagttcgttttggtgcttgtac

SEQ ID NO: 17094 - DNA, 2378 bp, Zea Mays
cttgaatgctatgcttgagctcaacgcttatggtggctgtggtttgaatgggttgcactagagtgcccttgtattggcatgcccctgcctgtagagctttactaatattgttctcttcaatgcagctatggttacccaactgaacagtggcctcatagaccacagcttgtctctggacatcgagttgggttcgaggagacacactgggcggcaagaacgccaagtaccttgtatttggagaacttgcaaaaaattctgctgtgcttttagccttttagtgcacaactgtaatttacaaaggcgatataccacttgcacacaaaaggtgctgtactgtcaatatttggtagcacttacaagctacaggctatcatttgctgaataaaaaagaagatgagtgaggctcactaatgtcttttgaaggcaaagttcagaagcatggagtcaaagagaagctagcaaacaaagctcccattgacttcctcgagatccctgcaaatgcaatgcaataccctcgcctatattaactcgtgttctaccctcagcaaggcacttttagctgcagcttaagcaatggtcgtctccctggtgctcccgttcaccctcctcgcgggcattctcctcctctccggatatgccttggctgggccggagaccgctgcggagccgggcgagatggtcctgacgctggacgctggtaacttctcggaggtggtggccaagcaccagttcatcgtcgtcgagttctacgctccatggtgtggccattgcaagcaactcgctccagagtacgagaaggcagccgccgttctgagggatcacgacccgccgttggtgctcgccaaagtggacgcgtacgacgagaggaacaaggatatcaaggacaagtaccaggtgcacgcgtaccccaccctcaagatcatagagaacggagggaaggacgtgcgtggctatggtggtccgagggatgccgatggcatcgtggagtacctcaagaagcaggtcggcccggcttccatcgagctcagttcggcggaggctgctcaggcgtccatcggcgacaaaggagtgattcttgttggagttttccccgagtttgctggtgtggagtacgagaatttcatggccgtggcagagagaaaacggtcagactacgatttctttcacacgtcggacgcgagcattctgccgcgtggtgatgtagccatcaagggccctgctgttcgtctctttaaaccatttgatgagctctttgttgattcacaggattttgatacggatgctcttgaaaaattcattgaagtgtctggtttccctgcagtggttaccttcgatgctgacccaaccaaccataagtttcttgagagatactacagcactcctagcgccaaagcaatgcttttcttgaacttcagcgacgacagaatcgaggccttcaagagtcagattcaagaagctgccacgaaattcagtgctaataacataagttttttaattggtgacgttgaatctgctgaccgtgccttccagtactttgggcttaaagaggacgatgtgccgctcctttttgtgattgcacagggtgggaaatatctcaatccgaccatcgaccctgatcaagtcataccctggttgaagcagtatacatatggaaacttgacaccttatgtgaagtcagcgccaatcccaaaggtgaatgaccaacctgttaaggtcgttgtggctgacagtatcgatgatgttgttttcaactctggcaaaaatgtactgctcgagttctatgcaccttggtgtggccattgccggaagctggccccaatcctggaggaagttgcagtctcattgcaagacgacgaagacgttgtcattgcaaagatggatggcactgcaaatgatatccctaccgactttgcggtggagggataccccacgatctacttctactcaaccaccggtgaactttattcctacaatggcggaagaacggccgaggacatcatcagtttcatcaagaagaacaagggccccagagcgggtgccgtggacgaacagacgggtgatgctagtgctgcagaggaggccgttacaccgccgtcgtcgtcagagcttctgaaagacgaactctgatcacggtgccatatgtaggcatgcagctagctacagcgagagaatcgggcacgtccagagattcagagaaaatattcagttataacttacagtactaaatgcactcaggtcgctagttttatttgtcccgagaattattattaatgatcaaaaccgttactgatttgaataaggctagtgtaatccaccactcaactttttccttgtttctgccaaattcatgtagaaatagttcgttttggtgcttgtac

SEQ ID NO: 17095 - DNA, 2865 bp, Zea Mays
caacctttgagtgcaggttaacggttttcttttgggtgattccctgtttatccttgcaggatataatgcacatgggcccatggatccggctgcttttgcgagggaaagaaatatgccttctgattcagataggatcttaaatgaagacaagtgtttcatgtcttgtagtatgccacgggagcatcagaagttctttgatgttcctgcggctagtgttagagaacttcatttgcaaagtgatgcaccttcaacgagtgaagccaattgttcacgtggaagaatgatatctggagatctttttgctccaagaacaaggagtctctctcctatcccaaaaggccatgcattcgctgtgagcaatggaaattctagagaatttggtttcagcccgaggtcaccagtaagaaagatggatggtttgaggagcccaccacatcccttgcctcttcctccagcttctggtgcatgctcgcctcttcatccagcttctggtgcatgctcgcctcttcatccagcttctggtgcttgctcacctcttcttccaacccacagtttttgctcgcctcttccttcgtctcccagttcctgcccacctcttcctgcatctcccactaactgctcacagtcccagtcacaatggaagaaagggaaattgctagggagtggtacatttggtcaggtttaccttggatttaacagtgaaaatgggcagttttgtgcgattaaggaggttcaagttattatggatgatccacattcgaaggaacgactcaaacaattaaaccaggaaatagatatgcttagacaactctcccacccaaacatagtgcagtaccatggaaagtgatgaatcactttccatttgtcttgagtatgtttcggggggttcaatccacaaattattaagagaatatggctcttttaaggaacctgtgattcgtaattacactgggcaaattcttgctggccttgcctacttacatgggcggaacactgtccacagagatatcaaaggagcaaacatactcgtgggtcctaatggtgaagtcaagctggctgactttggcatggctaagcatgtatgcagtgtttactttctgaccctctctgtctatctgcctgtgtttaacgctttcagttatcataatatttaatatttgttggacttttaaagtcaactactgtgtttttgtctgagtgctctccactttgtatgacacacggcagtcatttttgcttgtagaccctggaaattcgctgaggaatacttatatgtatctgagtactatacagtttcaaatctcagttgaagtagttcgaaaaattgcagttgaaataaatacttctcaattgtattagtatccatggttctaatagaaaaggaattaaagtaggtgcaaactctgatttcttatgaacccaagtatgaagtatccagttatctgctagtgcctactaacataataaatgtggaaaagttttggaagggtgctcttctgtgtttgcccagctaaaagactcttgacgatggacaagtttttagctcttggatggtcagcaaaacaaggatacacactgattgtgcttgcttttgtttttttctctgtaaacccattcattttttgaaatttgttgagcagatatcatcttttgctgaaatacgttctttcaaaggaagtccttactggatggctcctgaggttataatgaactgtaaaggctacagtttatcagtggacatatggagtctgggctgtaccattattgaaatggcgacggcaagacctccttggcaccaatacgagggggtagcagcaatatttaagatcgcaaacagtaaagatatacctgaaatcccagacagtttctcagaggaagggaaaagtttcttgcagctttgcttgaaacgtaaccctgcatctcgtgcttctgcagtccagctgatggatcatccttttgttcaggatcaccctgcagtgagagctgcaaaatccagtgtattgagaaacacaccatcttctccagcagatggcagacacacaatgtccaacagggagttgccatctcggaaaattataactcctctgaaggatattggactgggcatgagagattttactggattttccactactgttccttcaccacacagtcctattcctggaagagcaaacatgtctacgccagtttcaccatgctcaagcccgctgcggcagtttaagcaatccaatgtgaggggcatgcgttctccacctcatccaatgctctcccctggtcttggcaacacagtaagttacacccaaaatcagacaagacgcaatccagctcctgccatttcagatccttggatggatgttggccagatgaaactccaaagccccaatatttcccccagaaggttctgagaacgatttaaatataaaaaaagagaatcatgggcgcaatatatccatgacaagttagttattaagagatgttcagtaaggaacttgtttgtgtagttactacaatacgacactcaccagagattcagtacagcgaaatggggctcttgagaatttgtaacaggaagttctgtatatccttaggttttaaggtttgttgtcgcccttgctatatgtagttatacgtgtacacgtcctgatgtaaaggttcacaaaaaatcttacagatgaccacgggatgtaaattcgaaagtttgtgcaaactggtatttctgtgtagtagttaggacttccatggcagaagtaactatgcacttccgattgaatcgagtacaatgtccagtttcatttccatttcatcactggaatcaagcatgtaactaaaaagagagtaagagagcggggtgcagattatattttg

SEQ ID NO: 17096 - DNA, 2955 bp, Zea Mays
aaaaataataaaagtacaattacagtaataacgagtgaacagccatgtcttcactgcatcatctgttcgaaaccagagctatcaacctttgagtgcaggttaacggttttcttttgggtgattccctgtttatccttgcaggatataatgcacatgggcccatggatccggctgcttttgcgagggaaagaaatatgccttctgattcagataggatcttaaatgaagacaagtgtttcatgtcttgtagtatgccacgggagcatcagaagttctttgatgttcctgcggctagtgttagagaacttcatttgcaaagtgatgcaccttcaacgagtgaagccaattgttcacgtggaagaatgatatctggagatctttttgctccaagaacaaggagtctctctcctatcccaaaaggccatgcattcgctgtgagcaatggaaattctagagaatttggtttcagcccgaggtcaccagtaagaaagatggatggtttgaggagcccaccacatcccttgcctcttcctccagcttctggtgcatgctcgcctcttcatccagcttctggtgcatgctcgcctcttcatccagcttctggtgcttgctcacctcttcttccaacccacagtttttgctcgcctcttccttcgtctcccagttcctgcccacctcttcctgcatctcccactaactgctcacagtcccagtcacaatggaagaaagggaaattgctagggagtggtacatttggtcaggtttaccttggatttaacagtgaaaatgggcagttttgtgcgattaaggaggttcaagttattatggatgatccacattcgaaggaacgactcaaacaattaaaccaggaaatagatatgcttagacaactctcccacccaaacatagtgcagtaccatggaagtgagctgagtgatgaatcactttccatttgtcttgagtatgtttcggggggttcaatccacaaattattaagagaatatggctcttttaaggaacctgtgattcgtaattacactgggcaaattcttgctggccttgcctacttacatgggcggaacactgtccacagagatatcaaaggagcaaacatactcgtgggtcctaatggtgaagtcaagctggctgactttggcatggctaagcatgtatgcagtgtttactttctgaccctctctgtctatctgcctgtgtttaacgctttcagttatcataatatttaatatttgttggacttttaaagtcaactactgtgtttttgtctgagtgctctccactttgtatgacacacggcagtcatttttgcttgtagaccctggaaattcgctgaggaatacttatatgtatctgagtactatacagtttcaaatctcagttgaagtagttcgaaaaattgcagttgaaataaatacttctcaattgtattagtatccatggttctaatagaaaaggaattaaagtaggtgcaaactctgatttcttatgaacccaagtatgaagtatccagttatctgctagtgcctactaacataataaatgtggaaaagttttggaagggtgctcttctgtgtttgcccagctaaaagactcttgacgatggacaagtttttagctcttggatggtcagcaaaacaaggatacacactgattgtgcttgcttttgtttttttctctgtaaacccattcattttttgaaatttgttgagcagatatcatcttttgctgaaatacgttctttcaaaggaagtccttactggatggctcctgaggttataatgaactgtaaaggctacagtttatcagtggacatatggagtctgggctgtaccattattgaaatggcgacggcaagacctccttggcaccaatacgagggggtagcagcaatatttaagatcgcaaacagtaaagatatacctgaaatcccagacagtttctcagaggaagggaaaagtttcttgcagctttgcttgaaacgtaaccctgcatctcgtgcttctgcagtccagctgatggatcatccttttgttcaggatcaccctgcagtgagagctgcaaaatccagtgtattgagaaacacaccatcttctccagcagatggcagacacacaatgtccaacagggagttgccatctcggaaaattataactcctctgaaggatattggactgggcatgagagattttactggattttccactactgttccttcaccacacagtcctattcctggaagagcaaacatgtctacgccagtttcaccatgctcaagcccgctgcggcagtttaagcaatccaatgtgaggggcatgcgttctccacctcatccaatgctctcccctggtcttggcaacacagtaagttacacccaaaatcagacaagacgcaatccagctcctgccatttcagatccttggatggatgttggccagatgaaactccaaagccccaatatttcccccagaaggttctgagaacgatttaaatataaaaaaagagaatcatgggcgcaatatatccatgacaagttagttattaagagatgttcagtaaggaacttgtttgtgtagttactacaatacgacactcaccagagattcagtacagcgaaatggggctcttgagaatttgtaacaggaagttctgtatatccttaggttttaaggtttgttgtcgcccttgctatatgtagttatacgtgtacacgtcctgatgtaaaggttcacaaaaaatcttacagatgaccacgggatgtaaattcgaaagtttgtgcaaactggtatttctgtgtagtagttaggacttccatggcagaagtaactatgcacttccgattgaatcgagtacaatgtccagtttcatttccatttcatcactggaatcaagcatgtaactaaaaagagagtaagagagcggggtgcagattatattttg

SEQ ID NO: 17097 - DNA, 2773 bp, Zea Mays
atcagttccgaatttgccgcagcctggttgtcactagaatttccccatttggctgcaataactacaattgaattgcctggtgctctgatcaaatttggggggagtcgagtgcctagagataggttgatctgcaggtttgctttattgtcttcccctcaatttggtgtgcgacgtatttagggggtttgagtcaagggcagagttagagtgaactgtgaggattcatcacaccaaatgcaccagttgacctttttttaggtcgttccagttcgacaatcctggtcatctcttcctctccctctccctctcgctttggtaaacatagaatgaggactggagagatcagggcttcaggagaccaaggcgtgtgaattgttgacaaaaataataaaagtacaattacagtaataacgagtgaacagccatgtcttcactgcatcatctgttcgaaaccagagctatcaacctttgagtgcaggttaacggttttcttttgggtgattccctgtttatccttgcaggatataatgcacatgggcccatggatccggctgcttttgcgagggaaagaaatatgccttctgattcagataggatcttaaatgaagacaagtgtttcatgtcttgtagtatgccacgggagcatcagaagttctttgatgttcctgcggctagtgttagagaacttcatttgcaaagtgatgcaccttcaacgagtgaagccaattgttcacgtggaagaatgatatctggagatctttttgctccaagaacaaggagtctctctcctatcccaaaaggccatgcattcgctgtgagcaatggaaattctagagaatttggtttcagcccgaggtcaccagtaagaaagatggatggtttgaggagcccaccacatcccttgcctcttcctccagcttctggtgcatgctcgcctcttcatccagcttctggtgcatgctcgcctcttcatccagcttctggtgcttgctcacctcttcttccaacccacagtttttgctcgcctcttccttcgtctcccagttcctgcccacctcttcctgcatctcccactaactgctcacagtcccagtcacaatggaagaaagggaaattgctagggagtggtacatttggtcaggtttaccttggatttaacagtgaaaatgggcagttttgtgcgattaaggaggttcaagttattatggatgatccacattcgaaggaacgactcaaacaattaaaccaggaaatagatatgcttagacaactctcccacccaaacatagtgcagtaccatggaagtgagctgagtgatgaatcactttccatttgtcttgagtatgtttcggggggttcaatccacaaattattaagagaatatggctcttttaaggaacctgtgattcgtaattacactgggcaaattcttgctggccttgcctacttacatgggcggaacactgtccacaagatatcaaaggagcaaacatactcgtgggtcctaatggtgaagtcaagctggctgactttggcatggctaagcatatatcatcttttgctgaaatacgttctttcaaaggaagtccttactggatggctcctgaggttataatgaactgtaaaggctacagtttatcagtggacatatggagtctgggctgtaccattattgaaatggcgacggcaagacctccttggcaccaatacgagggggtagcagcaatatttaagatcgcaaacagtaaagatatacctgaaatcccagacagtttctcagaggaagggaaaagtttcttgcagctttgcttgaaacgtaaccctgcatctcgtgcttctgcagtccagctgatggatcatccttttgttcaggatcaccctgcagtgagagctgcaaaatccagtgtattgagaaacacaccatcttctccagcagatggcagacacacaatgtccaacagggagttgccatctcggaaaattataactcctctgaaggatattggactgggcatgagagattttactggattttccactactgttccttcaccacacagtcctattcctggaagagcaaacatgtctacgccagtttcaccatgctcaagcccgctgcggcagtttaagcaatccaatgtgaggggcatgcgttctccacctcatccaatgctctcccctggtcttggcaacacagtaagttacacccaaaatcagacaagacgcaatccagctcctgccatttcagatccttggatggatgttggccagatgaaactccaaagccccaatatttcccccagaaggttctgagaacgatttaaatataaaaaaagagaatcatgggcgcaatatatccatgacaagttagttattaagagatgttcagtaaggaacttgtttgtgtagttactacaatacgacactcaccagagattcagtacagcgaaatggggctcttgagaatttgtaacaggaagttctgtatatccttaggttttaaggtttgttgtcgcccttgctatatgtagttatacgtgtacacgtcctgatgtaaaggttcacaaaaaatcttacagatgaccacgggatgtaaattcgaaagtttgtgcaaactggtatttctgtgtagtagttaggacttccatggcagaagtaactatgcacttccgattgaatcgagtacaatgtccagtttcatttccatttcatcactggaatcaagcatgtaactaaaaagagagtaagagagcggggtgcagattatattttg

SEQ ID NO: 17098 - DNA, 2793 bp, Zea Mays
gccttaatatggcccaatcatcagttccgaatttgccgcagcctggttgtcactagaatttccccatttggctgcaataactacaattgaattgcctggtgctctgatcaaatttggggggagtcgagtgcctagagataggttgatctgcaggtttgctttattgtcttcccctcaatttggtgtgcgacgtatttagggggtttgagtcaagggcagagttagagtgaactgtgaggattcatcacaccaaatgcaccagttgacctttttttaggtcgttccagttcgacaatcctggtcatctcttcctctccctctccctctcgctttggtaaacatagaatgaggactggagagatcagggcttcaggagaccaaggcgtgtgaattgttgacaaaaataataaaagtacaattacagtaataacgagtgaacagccatgtcttcactgcatcatctgttcgaaaccagagctatcaacctttgagtgcaggttaacggttttcttttgggtgattccctgtttatccttgcaggatataatgcacatgggcccatggatccggctgcttttgcgagggaaagaaatatgccttctgattcagataggatcttaaatgaagacaagtgtttcatgtcttgtagtatgccacgggagcatcagaagttctttgatgttcctgcggctagtgttagagaacttcatttgcaaagtgatgcaccttcaacgagtgaagccaattgttcacgtggaagaatgatatctggagatctttttgctccaagaacaaggagtctctctcctatcccaaaaggccatgcattcgctgtgagcaatggaaattctagagaatttggtttcagcccgaggtcaccagtaagaaagatggatggtttgaggagcccaccacatcccttgcctcttcctccagcttctggtgcatgctcgcctcttcatccagcttctggtgcatgctcgcctcttcatccagcttctggtgcttgctcacctcttcttccaacccacagtttttgctcgcctcttccttcgtctcccagttcctgcccacctcttcctgcatctcccactaactgctcacagtcccagtcacaatggaagaaagggaaattgctagggagtggtacatttggtcaggtttaccttggatttaacagtgaaaatgggcagttttgtgcgattaaggaggttcaagttattatggatgatccacattcgaaggaacgactcaaacaattaaaccaggaaatagatatgcttagacaactctcccacccaaacatagtgcagtaccatggaagtgagctgagtgatgaatcactttccatttgtcttgagtatgtttcggggggttcaatccacaaattattaagagaatatggctcttttaaggaacctgtgattcgtaattacactgggcaaattcttgctggccttgcctacttacatgggcggaacactgtccacagagatatcaaaggagcaaacatactcgtgggtcctaatggtgaagtcaagctggctgactttggcatggctaagcatatatcatcttttgctgaaatacgttctttcaaaggaagtccttactggatggctcctgaggttataatgaactgtaaaggctacagtttatcagtggacatatggagtctgggctgtaccattattgaaatggcgacggcaagacctccttggcaccaatacgagggggtagcagcaatatttaagatcgcaaacagtaaagatatacctgaaatcccagacagtttctcagaggaagggaaaagtttcttgcagctttgcttgaaacgtaaccctgcatctcgtgcttctgcagtccagctgatggatcatccttttgttcaggatcaccctgcagtgagagctgcaaaatccagtgtattgagaaacacaccatcttctccagcagatggcagacacacaatgtccaacagggagttgccatctcggaaaattataactcctctgaaggatattggactgggcatgagagattttactggattttccactactgttccttcaccacacagtcctattcctggaagagcaaacatgtctacgccagtttcaccatgctcaagcccgctgcggcagtttaagcaatccaatgtgaggggcatgcgttctccacctcatccaatgctctcccctggtcttggcaacacagtaagttacacccaaaatcagacaagacgcaatccagctcctgccatttcagatccttggatggatgttggccagatgaaactccaaagccccaatatttcccccagaaggttctgagaacgatttaaatataaaaaaagagaatcatgggcgcaatatatccatgacaagttagttattaagagatgttcagtaaggaacttgtttgtgtagttactacaatacgacactcaccagagattcagtacagcgaaatggggctcttgagaatttgtaacaggaagttctgtatatccttaggttttaaggtttgttgtcgcccttgctatatgtagttatacgtgtacacgtcctgatgtaaaggttcacaaaaaatcttacagatgaccacgggatgtaaattcgaaagtttgtgcaaactggtatttctgtgtagtagttaggacttccatggcagaagtaactatgcacttccgattgaatcgagtacaatgtccagtttcatttccatttcatcactggaatcaagcatgtaactaaaaagagagtaagagagcggggtgcagattatattttg

SEQ ID NO: 17099 - DNA, 2871 bp, Zea Mays
tcccccgttcgtatctctctctcccttcacctaaagcgaggcgccgtcggcttctgctccttacctcgcgccttcctcgcgcggcgcgcctcgccctcgccctctccctctccctctctcctcccccacccttcctctccctccatctctccgcggcagttcgagcttggcgggggaaccgtacccggcaagcgcgcggacgcccccccgggtgggggcgacagccagcggcgcgatgcccgcgtggtggccccgcagcaagctgaggtctaggtcgaaggccaagccgggcgcagggtccgtctccgcagcttcgtccccgcgcaagtccgcggacctcgagtcgccctccccgtccccgtcgccgacgccgacgccgcgggacaggaaggcgcacagcctcgacttccccggcgcggccgccgcgcgcggccggccagccggcgccgcgccggggcatgggtcggtagggtacaagctcccgacgccggtggaggcggtggagcctgtcgggactctgtacgaggtggtgctggcggcggcggcggccgccgctgccggtgacggctgctcgtccgcggaggagtctagcgtgtgctcggccgcgtcgttggacgagccgcactaccaacatgggtttaggcccatggatccggctgcttttgcgagggaaagaaatatgccttctgattcagataggatcttaaatgaagacaagtgtttcatgtcttgtagtatgccacgggagcatcagaagttctttgatgttcctgcggctagtgttagagaacttcatttgcaaagtgatgcaccttcaacgagtgaagccaattgttcacgtggaagaatgatatctggagatctttttgctccaagaacaaggagtctctctcctatcccaaaaggccatgcattcgctgtgagcaatggaaattctagagaatttggtttcagcccgaggtcaccagtaagaaagatggatggtttgaggagcccaccacatcccttgcctcttcctccagcttctggtgcatgctcgcctcttcatccagcttctggtgcatgctcgcctcttcatccagcttctggtgcttgctcacctcttcttccaacccacagtttttgctcgcctcttccttcgtctcccagttcctgcccacctcttcctgcatctcccactaactgctcacagtcccagtcacaatggaagaaagggaaattgctagggagtggtacatttggtcaggtttaccttggatttaacagtgaaaatgggcagttttgtgcgattaaggaggttcaagttattatggatgatccacattcgaaggaacgactcaaacaattaaaccaggaaatagatatgcttagacaactctcccacccaaacatagtgcagtaccatggaaagtgatgaatcactttccatttgtcttgagtatgtttcggggggttcaatccacaaattattaagagaatatggctcttttaaggaacctgtgattcgtaattacactgggcaaattcttgctggccttgcctacttacatgggcggaacactgtccacagagatatcaaaggagcaaacatactcgtgggtcctaatggtgaagtcaagctggctgactttggcatggctaagcatatatcatcttttgctgaaatacgttctttcaaaggaagtccttactggatggctcctgaggttataatgaactgtaaaggctacagtttatcagtggacatatggagtctgggctgtaccattattgaaatggcgacggcaagacctccttggcaccaatacgagggggtagcagcaatatttaagatcgcaaacagtaaagatatacctgaaatcccagacagtttctcagaggaagggaaaagtttcttgcagctttgcttgaaacgtaaccctgcatctcgtgcttctgcagtccagctgatggatcatccttttgttcaggatcaccctgcagtgagagctgcaaaatccagtgtattgagaaacacaccatcttctccagcagatggcagacacacaatgtccaacagggagttgccatctcggaaaattataactcctctgaaggatattggactgggcatgagagattttactggattttccactactgttccttcaccacacagtcctattcctggaagagcaaacatgtctacgccagtttcaccatgctcaagcccgctgcggcagtttaagcaatccaatgtgaggggcatgcgttctccacctcatccaatgctctcccctggtcttggcaacacagtaagttacacccaaaatcagacaagacgcaatccagctcctgccatttcagatccttggatggatgttggccagatgaaactccaaagccccaatatttcccccagaaggttctgagaacgatttaaatataaaaaaagagaatcatgggcgcaatatatccatgacaagttagttattaagagatgttcagtaaggaacttgtttgtgtagttactacaatacgacactcaccagagattcagtacagcgaaatggggctcttgagaatttgtaacaggaagttctgtatatccttaggttttaaggtttgttgtcgcccttgctatatgtagttatacgtgtacacgtcctgatgtaaaggttcacaaaaaatcttacagatgaccacgggatgtaaattcgaaagtttgtgcaaactggtatttctgtgtagtagttaggacttccatggcagaagtaactatgcacttccgattgaatcgagtacaatgtccagtttcatttccatttcatcactggaatcaagcatgtaactaaaaagagagtaagagagcggggtgcagattatattttg

SEQ ID NO: 17100 - DNA, 2788 bp, Zea Mays
tcccccgttcgtatctctctctcccttcacctaaagcgaggcgccgtcggcttctgctccttacctcgcgccttcctcgcgcggcgcgcctcgccctcgccctctccctctccctctctcctcccccacccttcctctccctccatctctccgcggcagttcgagcttggcgggggaaccgtacccggcaagcgcgcggacgcccccccgggtgggggcgacagccagcggcgcgatgcccgcgtggtggccccgcagcaagctgaggtctaggtcgaaggccaagccgggcgcagggtccgtctccgcagcttcgtccccgcgcaagtccgcggacctcgagtcgccctccccgtccccgtcgccgacgccgacgccgcgggacaggaaggcgcacagcctcgacttccccggcgcggccgccgcgcgcggccggccagccggcgccgcgccggggcatgggtcggtagggtacaagctcccgacgccggtggaggcggtggagcctgtcgggactctgtacgaggtggtgctggcggcggcggcggccgccgctgccggtgacggctgctcgtccgcggaggagtctagcgtgtgctcggccgcgtcgttggacgagccgcactaccaacatgggtttaggcccatggatccggctgcttttgcgagggaaagaaatatgccttctgattcagataggatcttaaatgaagacaagtgtttcatgtcttgtagtatgccacgggagcatcagaagttctttgatgttcctgcggctagtgttagagaacttcatttgcaaagtgatgcaccttcaacgagtgaagccaattgttcacgtggaagaatgatatctggagatctttttgctccaagaacaaggagtctctctcctatcccaaaaggccatgcattcgctgtgagcaatggaaattctagagaatttggtttcagcccgaggtcaccagtaagaaagatggatggtttgaggagcccaccacatcccttgcctcttcctccagcttctggtgcatgctcgcctcttcatccagcttctgttcctgcccacctcttcctgcatctcccactaactgctcacagtcccagtcacaatggaagaaagggaaattgctagggagtggtacatttggtcaggtttaccttggatttaacagtgaaaatgggcagttttgtgcgattaaggaggttcaagttattatggatgatccacattcgaaggaacgactcaaacaattaaaccaggaaatagatatgcttagacaactctcccacccaaacatagtgcagtaccatggaagtgagctgagtgatgaatcactttccatttgtcttgagtatgtttcggggggttcaatccacaaattattaagagaatatggctcttttaaggaacctgtgattcgtaattacactgggcaaattcttgctggccttgcctacttacatgggcggaacactgtccacagagatatcaaaggagcaaacatactcgtgggtcctaatggtgaagtcaagctggctgactttggcatggctaagcatatatcatcttttgctgaaatacgttctttcaaaggaagtccttactggatggctcctgaggttataatgaactgtaaaggctacagtttatcagtggacatatggagtctgggctgtaccattattgaaatggcgacggcaagacctccttggcaccaatacgagggggtagcagcaatatttaagatcgcaaacagtaaagatatacctgaaatcccagacagtttctcagaggaagggaaaagtttcttgcagctttgcttgaaacgtaaccctgcatctcgtgcttctgcagtccagctgatggatcatccttttgttcaggatcaccctgcagtgagagctgcaaaatccagtgtattgagaaacacaccatcttctccagcagatggcagacacacaatgtccaacagggagttgccatctcggaaaattataactcctctgaaggatattggactgggcatgagagattttactggattttccactactgttccttcaccacacagtcctattcctggaagagcaaacatgtctacgccagtttcaccatgctcaagcccgctgcggcagtttaagcaatccaatgtgaggggcatgcgttctccacctcatccaatgctctcccctggtcttggcaacacagtaagttacacccaaaatcagacaagacgcaatccagctcctgccatttcagatccttggatggatgttggccagatgaaactccaaagccccaatatttcccccagaaggttctgagaacgatttaaatataaaaaaagagaatcatgggcgcaatatatccatgacaagttagttattaagagatgttcagtaaggaacttgtttgtgtagttactacaatacgacactcaccagagattcagtacagcgaaatggggctcttgagaatttgtaacaggaagttctgtatatccttaggttttaaggtttgttgtcgcccttgctatatgtagttatacgtgtacacgtcctgatgtaaaggttcacaaaaaatcttacagatgaccacgggatgtaaattcgaaagtttgtgcaaactggtatttctgtgtagtagttaggacttccatggcagaagtaactatgcacttccgattgaatcgagtacaatgtccagtttcatttccatttcatcactggaatcaagcatgtaactaaaaagagagtaagagagcggggtgcagattatattttg

SEQ ID NO: 17101 - DNA, 1398 bp, Zea Mays
cacagctattccctgttttttatgttgtcaaatgagatatgccatgcaacaagcatttaagtcaatgatgacccagtcagcaccaaactcatttggctccaactcgcctttcccatttagcatgccgccacaggcatctcctactgctccaagcacttacccgtacttggaaccaaagaaagatacttccccgcatgtgtcaactgttgatgtctcagctaatgaagtggaagccactggaacatcgaaagaggtggatgttactgaaacgccaaaaccttcaaagaagtttgcatttgttgatgtttctcccgaagagttgcagcaaaagaacctccaatcttcaccggagacggtagatgtaaaacatgatagtacatacagtgaaagtaaggaggatactgaggaacaagttcccacaattagtacaaacactgaaagtaaggaggatactgaggaaaaagttcccacaaatggagcatcttttaagctgaacgaaggtgctgctcatgggccaactgaatctaataactcggcatctatgctatccgttgagacaattgagaaaatgatggaagatccagctgtgcagaagatggtgtatccctacttgcctgaagagatgcggaacccaaattcattcaagtaatccaatgtaccgccaacaactacaggatatgctaaataacatgggcgcaactcctgatcaatgggataaccgcatgcttgatcaccttaagaacttcgaccttagcagtccagaagtgcggcagcagtttgcgcaagttggcatgactcctgaggaagtagtatcgaaaataatggcaaacccagatgtagctgttgcattccagaatccaaaaatacagacagccatcatggactgctcgcagaaccctcttaacattgtaaaataccaaaatgacaaggaggtcatggatgttttcatgaagatatcacaaatcttcccccaaattaacggctagctgatcttcgtcgtgggatagcacttctgatttttgtcggcccgtcatctccagtctggagggctgctgcggtagcatctatcaagaaaagggtcgtgacgctccgatataccctccccgtgtcaaggtttttgagtttcttatgtacatcatgtgatgtagcggccttggtttagctatgagtaattgagtatgacccttgccagttcattaagtcaggctattgacatagcagggtccaagtttttattaagccagccaatcagtggaaaggtgcagcagagacggttcgtatcagatcaattttgatatataattgttattattaatctgtaatatattagagacacaatggcaatgcaagtaatctgttacgacatttcctgaccatatttgaccgggtagcaatgca

SEQ ID NO: 17102 - DNA, 1881 bp, Zea Mays
aaaactccccgtctctactccctactggcctcctcccacgagtcggataccgaacctcggcggcgtcggcgccacgcgagcaaaaaccctagtgcgagcaagcgagaggcagagacctcagtgcctcgagcaacgcgcgcccggcccgacggcatggagagcctcatcctcgcctcctcctgctccgcgtccccacggctcccgctactctcctccgccgcccgcttccgcgggctgcccgtttccgtgccgccgccgtcttcggcgtccatcagcggtgccgcgaggaaagggccgatgaggcccaggctcttcgttgccgcggcggcggctcctcgcggctccggaaacgttttcgagggattgagagcaaaaggctttgcaagcatgtcatcttcgactggcaatgagaatatgtctactggaactgtggttcacctgttttctggattggagttggtgtagcattgtctgtggcgtttaccacggtctcttccatgttaaagagatatgccatgcaacaagcatttaagtcaatgatgacccagtcagcaccaaactcatttggctccaactcgcctttcccatttagcatgccgccacaggcatctcctactgctccaagcacttacccgtacttggaaccaaagaaagatacttccccgcatgtgtcaactgttgatgtctcagctaatgaagtggaagccactggaacatcgaaagaggtggatgttactgaaacgccaaaaccttcaaagaagtttgcatttgttgatgtttctcccgaagagttgcagcaaaagaacctccaatcttcaccggagacggtagatgtaaaacatgatagtacatacagtgaaagtaaggaggatactgaggaacaagttcccacaattagtacaaacactgaaagtaaggaggatactgaggaaaaagttcccacaaatggagcatcttttaagctgaacgaaggtgctgctcatgggccaactgaatctaataactcggcatctatgctatccgttgagacaattgagaaaatgatggaagatccagctgtgcagaagatggtgtatccctacttgcctgaagagatgcggaacccaaattcattcaagtggatgctgcagaatccaatgtaccgccaacaactacaggatatgctaaataacatgggcgcaactcctgatcaatgggataaccgcatgcttgatcaccttaagaacttcgaccttagcagtccagaagtgcggcagcagtttgcgcaagttggcatgactcctgaggaagtagtatcgaaaataatggcaaacccagatgtagctgttgcattccagaatccaaaaatacagacagccatcatggactgctcgcagaaccctcttaacattgtaaaataccaaaatgacaaggaggtcatggatgttttcatgaagatatcacaaatcttcccccaaattaacggctagctgatcttcgtcgtgggatagcacttctgatttttgtcggcccgtcatctccagtctggagggctgctgcggtagcatctatcaagaaaagggtcgtgacgctccgatataccctccccgtgtcaaggtttttgagtttcttatgtacatcatgtgatgtagcggccttggtttagctatgagtaattgagtatgacccttgccagttcattaagtcaggctattgacatagcagggtccaagtttttattaagccagccaatcagtggaaaggtgcagcagagacggttcgtatcagatcaattttgatatataattgttattattaatctgtaatatattagagacacaatggcaatgcaagtaatctgttacgacatttcctgaccatatttgaccgggtagcaatgca

SEQ ID NO: 17103 - DNA, 1001 bp, Zea Mays
atggcatcctccctcgcccagagacggcacgctgtggtatgcgggcggggacattcgaatcgtgtccgtaccgcgcggggtgtcgctgcaggacctcgtgcggctcgtcgtatggcgatgaagggacatccgtcgccgaggttcgccaagatcgacggcgtctgcgccgcgctctccatggaaggttcgcctagatacactctgattccctgctctgcgctctcccctgttctcgcgctctacatggaaggcgagatcgacaacgttcggccgctggtgcccggcgccaagctccacgccgtcgtcgacgcgtgccacagcgattccgtcctcgacttccccttcctctgcaacatgtccagggaactactcgtgtcattctataaggcaaatgggagccacaaaccaaataggaaaattttctatggagacatgccagtgaggagcagtttagtcggttcttgctttatgaagtggatgcaattagaaaggcgtgtgccagcttggaagagggctaccttcctccggttacattcattgtggtgcaaaagcgccatcacacacgattttgtcctaaagatcatcgttcacacaaacagacagatcgacgtggaaatattttgccaggacactttggagacaatagttcttatggtgcagccaggctagcaggcttcctgaaaaatgttcttattgttcaagttatgaggtggagtgatggctcttatcttgaagatcaggatcactggaggttgggttactccttgattcttacatggtgccccattcctattagttcacttccagatatgacagatctaggggttgtgtgcgcacttagaatcaatggtgcagttgtcaaagttcaactagcatttgtttgcactttcttcttcaatttgaagtacttaaacgtcgcaatggtcatgatattaaagaacatgctgccaaatattataacggttataggagagagagatattcatgaagagtcagaataa

SEQ ID NO: 17104 - DNA, 1179 bp, Zea Mays
gaagaccagaggagacaccaattagaggcgcaaattgttggataaaagcagaggaggctcgaatcaacgaagggaggggttaattgatggagaagaagaggtggtgtggcactgccaataacaatcaaagtatattgcacaacttaaggaaaaagcagagctacgcaaacgagaacaagatataatatacgagaggaagcttcagaaagagagaagcaaggaggaccacctttttggggacaaggataaatttgtaacatcagcctacaggaagaaacttgaggagcagcaaaagtggcttgaagaagaaagagtgaggcagcttcgagaagaaaaggaagatgtaactaaaaagaaagacctgagtgatttttactttgggcttgtgaagaatgttgctttcggtgcacagacacatgataacacaaaatctggtcaccctctaaaggcggacaataaacctgaggatacaaatactagtagccttgatgctgaagcctctgaaccttctccaaagcgtagaagagaatccagtatagaatcagagaggactaagagtatggatatggaagagccgtcggcaagtcgaatgagggattcaacagttgctgcatctactgagaaaaatgctgctgatgtttcatcacatgctaaagagatcccacaaaacattcagccagcaaaggttactgatgatcactacaagagaagtgatggcgcacttgctgctgctagagcgcgagcactggcccgaaagaaagcgaaggaccagcaattgtgaagtacaaggcagaaaagtttaccgatccttgaggtacaatttcatgttttattcaataggatcgtgtaaagatgtcatctgaaatgatctgatagctcccttgcactttaagaagcattttttattgtggttgatgtgtatctatgttgtaaaatgacctcatcagatgccatcttctgccagtaactttggtgttttgacacgtcaactggtttgaacttatatggccgtgcaatagactgttttgcactgtagaatgtactgagtttgaaatagaaagtgtgatagtgagatatactgctcagaacatttcatgaagtaacctggcaagtatgcagatgtgttatttttatcaagccaatcttaatggatagatgtattttgttgtttgcaaatat

SEQ ID NO: 17105 - DNA, 1091 bp, Zea Mays
attcaaggtgtcacccaggcggtgcgagccggggagtcaaagtatattgcacaacttaaggaaaaagcagagctacgcaaacgagaacaagatataatatacgagaggaagcttcagaaagagagaagcaaggaggaccacctttttggggacaaggataaatttgtaacatcagcctacaggaagaaacttgaggagcagcaaaagtggcttgaagaagaaagagtgaggcagcttcgagaagaaaaggaagatgtaactaaaaagaaagacctgagtgatttttactttgggcttgtgaagaatgttgctttcggtgcacagacacatgataacacaaaatctggtcaccctctaaaggcggacaataaacctgaggatacaaatactagtagccttgatgctgaagcctctgaaccttctccaaagcgtagaagagaatccagtatagaatcagagaggactaagagtatggatatggaagagccgtcggcaagtcgaatgagggattcaacagttgctgcatctactgagaaaaatgctgctgatgtttcatcacatgctaaagagatcccacaaaacattcagccagcaaaggttactgatgatcactacaagagaagtgatggcgcacttgctgctgctagagcgcgagcactggcccgaaagaaagcgaaggaccagcaattgtgaagtacaaggcagaaaagtttaccgatccttgaggtacaatttcatgttttattcaataggatcgtgtaaagatgtcatctgaaatgatctgatagctcccttgcactttaagaagcattttttattgtggttgatgtgtatctatgttgtaaaatgacctcatcagatgccatcttctgccagtaactttggtgttttgacacgtcaactggtttgaacttatatggccgtgcaatagactgttttgcactgtagaatgtactgagtttgaaatagaaagtgtgatagtgagatatactgctcagaacatttcatgaagtaacctggcaagtatgcagatgtgttatttttatcaagccaatcttaatggatagatgtattttgttgtttgcaaatat

SEQ ID NO: 17106 - DNA, 1375 bp, Zea Mays
gatttctatgttcttttcttacaagtgaacagccgttgcccgtcggccgccgcccctccctccgcgccctcccgaccaccgctccttccccgccttccacctgcgctgtccgccagtcctcctccacctcgctccggcacgcagggcccacaagaagcgccccttccagaagttaatccgccccggtttgactagggtttgtcccgtctcctaatcgatcagattggcaggtaactgccgttgccgccgcgatgaagaggtacggactgcagctccgcacgaagccgccatcgtcctcgtcgtcacgcgcgccgccacctcccgcccggcccctggcggccttcgccgacgacgatgacgatgatgtggaggcagaaatcctccgccaggcggccaagaagcgctccctccagaaggttgaggagcagcaaaagaaggccatggaggaggatccctcggtgtacgcctacgacgagctgtacgacgaaatgaaagagaaggaagcccgccctaagatgcaggataaggtcgtccgcgaggtaactaaaaagaaagacctgagtgatttttactttgggcttgtgaagaatgttgctttcggtgcacagacacatgataacacaaaatctggtcaccctctaaaggcggacaataaacctgaggatacaaatactagtagccttgatgctgaagcctctgaaccttctccaaagcgtagaagagaatccagtatagaatcagagaggactaagagtatggatatggaagagccgtcggcaagtcgaatgagggattcaacagttgctgcatctactgagaaaaatgctgctgatgtttcatcacatgctaaagagatcccacaaaacattcagccagcaaaggttactgatgatcactacaagagaagtgatggcgcacttgctgctgctagagcgcgagcactggcccgaaagaaagcgaaggaccagcaattgtgaagtacaaggcagaaaagtttaccgatccttgaggtacaatttcatgttttattcaataggatcgtgtaaagatgtcatctgaaatgatctgatagctcccttgcactttaagaagcattttttattgtggttgatgtgtatctatgttgtaaaatgacctcatcagatgccatcttctgccagtaactttggtgttttgacacgtcaactggtttgaacttatatggccgtgcaatagactgttttgcactgtagaatgtactgagtttgaaatagaaagtgtgatagtgagatatactgctcagaacatttcatgaagtaacctggcaagtatgcagatgtgttatttttatcaagccaatcttaatggatagatgtattttgttgtttgcaaatat

SEQ ID NO: 17107 - DNA, 1645 bp, Zea Mays
atttaaacgtcacggcaggttgtattataagttgtttggcctgatctatacctagtatcagattgagttagatcagtgaacagccgttgcccgtcggccgccgcccctccctccgcgccctcccgaccaccgctccttccccgccttccacctgcgctgtccgccagtcctcctccacctcgctccggcacgcagggcccacaagaagcgccccttccagaagttaatccgccccggtttgactagggtttgtcccgtctcctaatcgatcagattggcaggtaactgccgttgccgccgcgatgaagaggtacggactgcagctccgcacgaagccgccatcgtcctcgtcgtcacgcgcgccgccacctcccgcccggcccctggcggccttcgccgacgacgatgacgatgatgtggaggcagaaatcctccgccaggcggccaagaagcgctccctccagaaggttgaggagcagcaaaagaaggccatggaggaggatccctcggtgtacgcctacgacgagctgtacgacgaaatgaaagagaaggaagcccgccctaagatgcaggataaggtcgtccgcgagtcaaagtatattgcacaacttaaggaaaaagcagagctacgcaaacgagaacaagatataatatacgagaggaagcttcagaaagagagaagcaaggaggaccacctttttggggacaaggataaatttgtaacatcagcctacaggaagaaacttgaggagcagcaaaagtggcttgaagaagaaagagtgaggcagcttcgagaagaaaaggaagatgtaactaaaaagaaagacctgagtgatttttactttgggcttgtgaagaatgttgctttcggtgcacagacacatgataacacaaaatctggtcaccctctaaaggcggacaataaacctgaggatacaaatactagtagccttgatgctgaagcctctgaaccttctccaaagcgtagaagagaatccagtatagaatcagagaggactaagagtatggatatggaagagccgtcggcaagtcgaatgagggattcaacagttgctgcatctactgagaaaaatgctgctgatgtttcatcacatgctaaagagatcccacaaaacattcagccagcaaaggttactgatgatcactacaagagaagtgatggcgcacttgctgctgctagagcgcgagcactggcccgaaagaaagcgaaggaccagcaattgtgaagtacaaggcagaaaagtttaccgatccttgaggtacaatttcatgttttattcaataggatcgtgtaaagatgtcatctgaaatgatctgatagctcccttgcactttaagaagcattttttattgtggttgatgtgtatctatgttgtaaaatgacctcatcagatgccatcttctgccagtaactttggtgttttgacacgtcaactggtttgaacttatatggccgtgcaatagactgttttgcactgtagaatgtactgagtttgaaatagaaagtgtgatagtgagatatactgctcagaacatttcatgaagtaacctggcaagtatgcagatgtgttatttttatcaagccaatcttaatggatagatgtattttgttgtttgcaaatat

SEQ ID NO: 17108 - DNA, 1653 bp, Zea Mays
ctggaggctagatctatttaaacgtcacggcaggttgtattataagttgtttggcctgatctatacctagtatcagattgagttagatcagccgttgcccgtcggccgccgcccctccctccgcgccctcccgaccaccgctccttccccgccttccacctgcgctgtccgccagtcctcctccacctcgctccggcacgcagggcccacaagaagcgccccttccagaagttaatccgccccggtttgactagggtttgtcccgtctcctaatcgatcagattggcaggtaactgccgttgccgccgcgatgaagaggtacggactgcagctccgcacgaagccgccatcgtcctcgtcgtcacgcgcgccgccacctcccgcccggcccctggcggccttcgccgacgacgatgacgatgatgtggaggcagaaatcctccgccaggcggccaagaagcgctccctccagaaggttgaggagcagcaaaagaaggccatggaggaggatccctcggtgtacgcctacgacgagctgtacgacgaaatgaaagagaaggaagcccgccctaagatgcaggataaggtcgtccgcgagtcaaagtatattgcacaacttaaggaaaaagcagagctacgcaaacgagaacaagatataatatacgagaggaagcttcagaaagagagaagcaaggaggaccacctttttggggacaaggataaatttgtaacatcagcctacaggaagaaacttgaggagcagcaaaagtggcttgaagaagaaagagtgaggcagcttcgagaagaaaaggaagatgtaactaaaaagaaagacctgagtgatttttactttgggcttgtgaagaatgttgctttcggtgcacagacacatgataacacaaaatctggtcaccctctaaaggcggacaataaacctgaggatacaaatactagtagccttgatgctgaagcctctgaaccttctccaaagcgtagaagagaatccagtatagaatcagagaggactaagagtatggatatggaagagccgtcggcaagtcgaatgagggattcaacagttgctgcatctactgagaaaaatgctgctgatgtttcatcacatgctaaagagatcccacaaaacattcagccagcaaaggttactgatgatcactacaagagaagtgatggcgcacttgctgctgctagagcgcgagcactggcccgaaagaaagcgaaggaccagcaattgtgaagtacaaggcagaaaagtttaccgatccttgaggtacaatttcatgttttattcaataggatcgtgtaaagatgtcatctgaaatgatctgatagctcccttgcactttaagaagcattttttattgtggttgatgtgtatctatgttgtaaaatgacctcatcagatgccatcttctgccagtaactttggtgttttgacacgtcaactggtttgaacttatatggccgtgcaatagactgttttgcactgtagaatgtactgagtttgaaatagaaagtgtgatagtgagatatactgctcagaacatttcatgaagtaacctggcaagtatgcagatgtgttatttttatcaagccaatcttaatggatagatgtattttgttgtttgcaaatat

SEQ ID NO: 17109 - DNA, 982 bp, Zea Mays
gccaaatccatccctgaagtttcttctcgaagatactcccatcgaaacaggtattgccagtcgtggtgaagtcttggattctgcagtgcattcttctttgttagctgttgatcctgtgaagtatgttaacaaaatgtccaacggtcaaatgctgctatgaagtgcaacctcagatttgtcaatcgaggtcttgctgctatagctgaaaagagagcttgctgatttgattcacagaaatagtgaagtaacataacccggcatgtaggtagctctcgaccacttttgggcaagatttgattcggtcccaaggttgatatttctggagcaatgggtggagattagtttggcaccagtacctcactacctcgtgacagtggtcacatatttccaagacccctggaggctacacgcaccctcgtcagagatggatgtaaatatctctagagaaagaagaggtctggttctgattgctgtttacaggttagaggtgcagcgtatttacaaagagatataagagttatcacttatcatcagactgcttggtttgctaaataaaggtgaatttagttactagattatgagaccccgtgttttgactgccgcaatcgtggttcgcggcagcagaaaggttacctagagtctaaaagtggcatctcattttggtattatggttctgaccaaatgggatatgatgtgacttgtgcggttgttttggacgcctggtgtgttttgctaccatgttccaccagacgacccgggggttctgtagtgtcagggatggatgatgtgtttggtgtacagcatcactggtgcttactgttttaaatcttaaaagtgatgttgccttgccttaatggttgatggtgtctgttctcttgtccattccgtcatgaaagttaaaaaaacatgcttgaaaacggaactctccagtattttggagtggttggacacctctaagctgattctcttgtttataaccggt

SEQ ID NO: 17110 - DNA, 1712 bp, Zea Mays
cttgtaccaaatcatgaaattgccaataatgccacaagtgggggaacatctggatctggtcaggttgctgagtttaaaagggataaaattgtcatattgaaaggaagaggaaggattgattctaatacacctaatggagcaactcagcactcatcaacccctatcaagaatgtgccaccatcgcgttctagacaagaccagcgacttgaagccagtggaaaaattattaagactatactatcaaacaaggaagcccgcagttcaaatccttctgaacatgagcaggaaggtcacatgtttaatactgagaaggataagcggccaccacgggctttcaaccctcgtaccattgtgaaagatcaggttgaaaggcatgctagaaacagagatagacccgatcgtggtgtatgggcagctcgccgctatgacaaatctacatctgcaggtagttcacatccttcgtcgtcagagttccctcaaatgcagtcacattctggagataatattttgcaactagcagatggtcatggagacagaaagacagacacaaggggtcaaggtggtagccgtggtgttcctgttgaaaatggacataggcacgccaaccgtcgtggccttccacgtggaccaaaggaaactgaaatatctgcaagtgtgcctgatgcgaagaattcaaagaggggctctgctagctatggtgctcatgagagacaagtatgggttcagaagtcaagttcaggctcgtgagtttgttcattgatgatactcccatcgaaacaggtattgccagtcgtggtgaagtcttggattctgcagtgcattcttctttgttagctgttgatcctgtgaagtatgttaacaaaatgtccaacggtcaaatgctgctatgaagtgcaacctcagatttgtcaatcgaggtcttgctgctatagctgaaaagagagcttgctgatttgattcacagaaatagtgaagtaacataacccggcatgtaggtagctctcgaccacttttgggcaagatttgattcggtcccaaggttgatatttctggagcaatgggtggagattagtttggcaccagtacctcactacctcgtgacagtggtcacatatttccaagacccctggaggctacacgcaccctcgtcagagatggatgtaaatatctctagagaaagaagaggtctggttctgattgctgtttacaggttagaggtgcagcgtatttacaaagagatataagagttatcacttatcatcagactgcttggtttgctaaataaaggtgaatttagttactagattatgagaccccgtgttttgactgccgcaatcgtggttcgcggcagcagaaaggttacctagagtctaaaagtggcatctcattttggtattatggttctgaccaaatgggatatgatgtgacttgtgcggttgttttggacgcctggtgtgttttgctaccatgttccaccagacgacccgggggttctgtagtgtcagggatggatgatgtgtttggtgtacagcatcactggtgcttactgttttaaatcttaaaagtgatgttgccttgccttaatggttgatggtgtctgttctcttgtccattccgtcatgaaagttaaaaaaacatgcttgaaaacggaactctccagtattttggagtggttggacacctctaagctgattctcttgtttataaccggt

SEQ ID NO: 17111 - DNA, 1741 bp, Zea Mays
gtatgcttgtaccaaatcatgaaattgccaataatgccacaagtgggggaacatctggatctggtcaggttgctgagtttaaaagggataaaattgtcatattgaaaggaagaggaaggattgattctaatacacctaatggagcaactcagcactcatcaacccctatcaagaatgtgccaccatcgcgttctagacaagaccagcgacttgaagccagtggaaaaattattaagactatactatcaaacaaggaagcccgcagttcaaatccttctgaacatgagcaggaaggtcacatgtttaatactgagaaggataagcggccaccacgggctttcaaccctcgtaccattgtgaaagatcaggtagttgaaaatgctgagaggagccattttgatgagaaggctaatcatctccatggctccgttcccattggtgagaaggttgaaaggcatgctagaaacagagatagacccgatcgtggtgtatgggcagctcgccgctatgacaaatctacatctgcagtctcaaaacttgaactcaacacaggtcatggagacagaaagacagacacaaggggtcaaggtggtagccgtggtgttcctgttgaaaatggacataggcacgccaaccgtcgtggccttccacgtggaccaaaggaaactgaaatatctgcaagtgtgcctgatgcgaagaattcaaagaggggctctgctagctatggtgctcatgagagacaagtatgggttcagaagtcaagttcaggctcgtgagtttgttcattgatgatactcccatcgaaacaggtattgccagtcgtggtgaagtcttggattctgcagtgcattcttctttgttagctgttgatcctgtgaagtatgttaacaaaatgtccaacggtcaaatgctgctatgaagtgcaacctcagatttgtcaatcgaggtcttgctgctatagctgaaaagagagcttgctgatttgattcacagaaatagtgaagtaacataacccggcatgtaggtagctctcgaccacttttgggcaagatttgattcggtcccaaggttgatatttctggagcaatgggtggagattagtttggcaccagtacctcactacctcgtgacagtggtcacatatttccaagacccctggaggctacacgcaccctcgtcagagatggatgtaaatatctctagagaaagaagaggtctggttctgattgctgtttacaggttagaggtgcagcgtatttacaaagagatataagagttatcacttatcatcagactgcttggtttgctaaataaaggtgaatttagttactagattatgagaccccgtgttttgactgccgcaatcgtggttcgcggcagcagaaaggttacctagagtctaaaagtggcatctcattttggtattatggttctgaccaaatgggatatgatgtgacttgtgcggttgttttggacgcctggtgtgttttgctaccatgttccaccagacgacccgggggttctgtagtgtcagggatggatgatgtgtttggtgtacagcatcactggtgcttactgttttaaatcttaaaagtgatgttgccttgccttaatggttgatggtgtctgttctcttgtccattccgtcatgaaagttaaaaaaacatgcttgaaaacggaactctccagtattttggagtggttggacacctctaagctgattctcttgtttataaccggt

SEQ ID NO: 17112 - DNA, 2703 bp, Zea Mays
acacatcctaaatccaaaccaaccccacacccccaccaaactaccgaagcggaagggggggaaaatccacgcgacgacgacgcggcgaaacgaagggaagggaagcaggagcgagacaaatccccacccggctccaaaccctagccacctcccccgtcctgtccccagatctcgctgccgtctgacccgcctcgcttcgatgtgacccggccctagggtttgagacgtgttgcggtaggggtgttctcaaggattcacgacacgagagagattcggggaggcgtcgacggtgcgagcacacatgaaggacccggcgcaccgcacgaaggtggtgctccggcggctgccgccggcgatcgcgcagcaggccgttgtggaccaggtcgacttgcgcttcgctgggcggtacgactgggcgtgcttccgccccgggaatgccagccaaaagaaccatagacattctcgactttaccttaatttcaagcgccccgaggatgttgttgagttcgctgaggtcttcaatgggcacgtatttgtgaatgaaaagggtgctcagtttaaagctttcgtggaatatgcaccatcacaacaggttcccaagtcaactatcaagaaggatggccgtgaaggaactattatgaaagatccggagtacttggagtttcttgagtttatttcaaagcctactgagcatctgcctagtgctgaaattcagctcgaaaggaaagaagctgaaagggcagctgctggaaaggaggcacctgttgtgacacctcttatgatgtatgtccgccagcaaagggcagctaagagtatggttcatagacctggaagtagacttagcagaaaacttgcaagtgtcgtaagcagttccagtcctaaaaggtcttctgagaagcgcagatcctccacgtatgttgtacgagacaacactaaggagaaaccaacctatatcatggtgccaaagagagaggagcatacacaaagggaaaaagatgttgctggaaattcaggcgatgccacaagtgggggaacatctggatctggtcaggttgctgagtttaaaagggataaaattgtcatattgaaaggaagaggaaggattgattctaatacacctaatggagcaactcagcactcatcaacccctatcaagaatgtgccaccatcgcgttctagacaagaccagcgacttgaagccagtggaaaaattattaagactatactatcaaacaaggaagcccgcagttcaaatccttctgaacatgagcaggaaggtcacatgtttaatactgagaaggataagcggccaccacgggctttcaaccctcgtaccattgtgaaagatcaggtagttgaaaatgctgagaggagccattttgatgagaaggctaatcatctccatggctccgttcccattggtgagaaggttgaaaggcatgctagaaacagagatagacccgatcgtggtgtatgggcagctcgccgctatgacaaatctacatctgcaggtagtcatggagacagaaagacagacacaaggggtcaaggtggtagccgtggtgttcctgttgaaaatggacataggcacgccaaccgtcgtggccttccacgtggaccaaaggaaactgaaatatctgcaagtgtgcctgatgcgaagaattcaaagaggggctctgctagctatggtgctcatgagagacaagtatgggttcagaagtcaagttcaggctcgtgagtttgttcattgatgatactcccatcgaaacaggtattgccagtcgtggtgaagtcttggattctgcagtgcattcttctttgttagctgttgatcctgtgaagtatgttaacaaaatgtccaacggtcaaatgctgctatgaagtgcaacctcagatttgtcaatcgaggtcttgctgctatagctgaaaagagagcttgctgatttgattcacagaaatagtgaagtaacataacccggcatgtaggtagctctcgaccacttttgggcaagatttgattcggtcccaaggttgatatttctggagcaatgggtggagattagtttggcaccagtacctcactacctcgtgacagtggtcacatatttccaagacccctggaggctacacgcaccctcgtcagagatggatgtaaatatctctagagaaagaagaggtctggttctgattgctgtttacaggttagaggtgcagcgtatttacaaagagatataagagttatcacttatcatcagactgcttggtttgctaaataaaggtgaatttagttactagattatgagaccccgtgttttgactgccgcaatcgtggttcgcggcagcagaaaggttacctagagtctaaaagtggcatctcattttggtattatggttctgaccaaatgggatatgatgtgacttgtgcggttgttttggacgcctggtgtgttttgctaccatgttccaccagacgacccgggggttctgtagtgtcagggatggatgatgtgtttggtgtacagcatcactggtgcttactgttttaaatcttaaaagtgatgttgccttgccttaatggttgatggtgtctgttctcttgtccattccgtcatgaaagttaaaaaaacatgcttgaaaacggaactctccagtattttggagtggttggacacctctaagctgattctcttgtttataaccggt

SEQ ID NO: 17113 - DNA, 2748 bp, Zea Mays
acacatcctaaatccaaaccaaccccacacccccaccaaactaccgaagcggaagggggggaaaatccacgcgacgacgacgcggcgaaacgaagggaagggaagcaggagcgagacaaatccccacccggctccaaaccctagccacctcccccgtcctgtccccagatctcgctgccgtctgacccgcctcgcttcgatgtgacccggccctagggtttgagacgtgttgcggtaggggtgttctcaaggattcacgacacgagagagattcggggaggcgtcgacggtgcgagcacacatgaaggacccggcgcaccgcacgaaggtggtgctccggcggctgccgccggcgatcgcgcagcaggccgttgtggaccaggtcgacttgcgcttcgctgggcggtacgactgggcgtgcttccgccccgggaatgccagccaaaagaaccatagacattctcgactttaccttaatttcaagcgccccgaggatgttgttgagttcgctgaggtcttcaatgggcacgtatttgtgaatgaaaagggtgctcagtttaaagctttcgtggaatatgcaccatcacaacaggttcccaagtcaactatcaagaaggatggccgtgaaggaactattatgaaagatccggagtacttggagtttcttgagtttatttcaaagcctactgagcatctgcctagtgctgaaattcagctcgaaaggaaagaagctgaaagggcagctgctggaaaggaggcacctgttgtgacacctcttatgatgtatgtccgccagcaaagggcagctaagagtatggttcatagacctggaagtagacttagcagaaaacttgcaagtgtcgtaagcagttccagtcctaaaaggtcttctgagaagcgcagatcctccacgtatgttgtacgagacaacactaaggagaaaccaacctatatcatggtgccaaagagagaggagcatacacaaagggaaaaagatgttgctggaaattcaggcgatgccacaagtgggggaacatctggatctggtcaggttgctgagtttaaaagggataaaattgtcatattgaaaggaagaggaaggattgattctaatacacctaatggagcaactcagcactcatcaacccctatcaagaatgtgccaccatcgcgttctagacaagaccagcgacttgaagccagtggaaaaattattaagactatactatcaaacaaggaagcccgcagttcaaatccttctgaacatgagcaggaaggtcacatgtttaatactgagaaggataagcggccaccacgggctttcaaccctcgtaccattgtgaaagatcaggtagttgaaaatgctgagaggagccattttgatgagaaggctaatcatctccatggctccgttcccattggtgagaaggttgaaaggcatgctagaaacagagatagacccgatcgtggtgtatgggcagctcgccgctatgacaaatctacatctgcaggtagttcacatccttcgtcgtcagagttccctcaaatgcagtcacattctggagataatattttgcaactagcagatggtcatggagacagaaagacagacacaaggggtcaaggacataggcacgccaaccgtcgtggccttccacgtggaccaaaggaaactgaaatatctgcaagtgtgcctgatgcgaagaattcaaagaggggctctgctagctatggtgctcatgagagacaagtatgggttcagaagtcaagttcaggctcgtgagtttgttcattgatgatactcccatcgaaacaggtattgccagtcgtggtgaagtcttggattctgcagtgcattcttctttgttagctgttgatcctgtgaagtatgttaacaaaatgtccaacggtcaaatgctgctatgaagtgcaacctcagatttgtcaatcgaggtcttgctgctatagctgaaaagagagcttgctgatttgattcacagaaatagtgaagtaacataacccggcatgtaggtagctctcgaccacttttgggcaagatttgattcggtcccaaggttgatatttctggagcaatgggtggagattagtttggcaccagtacctcactacctcgtgacagtggtcacatatttccaagacccctggaggctacacgcaccctcgtcagagatggatgtaaatatctctagagaaagaagaggtctggttctgattgctgtttacaggttagaggtgcagcgtatttacaaagagatataagagttatcacttatcatcagactgcttggtttgctaaataaaggtgaatttagttactagattatgagaccccgtgttttgactgccgcaatcgtggttcgcggcagcagaaaggttacctagagtctaaaagtggcatctcattttggtattatggttctgaccaaatgggatatgatgtgacttgtgcggttgttttggacgcctggtgtgttttgctaccatgttccaccagacgacccgggggttctgtagtgtcagggatggatgatgtgtttggtgtacagcatcactggtgcttactgttttaaatcttaaaagtgatgttgccttgccttaatggttgatggtgtctgttctcttgtccattccgtcatgaaagttaaaaaaacatgcttgaaaacggaactctccagtattttggagtggttggacacctctaagctgattctcttgtttataaccggt

SEQ ID NO: 17114 - DNA, 2692 bp, Zea Mays
aattacacatcctaaatccaaaccaaccccacacccccaccaaactaccgaagcggaagggggggaaaatccacgcgacgacgacgcggcgaaacgaagggaagggaagcaggagcgagacaaatccccacccggctccaaaccctagccacctcccccgtcctgtccccagatctcgctgccgtctgacccgcctcgcttcgatgtgacccggccctagggtttgagacgtgttgcggtaggggtgttctcaaggattcacgacacgagagagattcggggaggcgtcgacggtgcgagcacacatgaaggacccggcgcaccgcacgaaggtggtgctccggcggctgccgccggcgatcgcgcagcaggccgttgtggaccaggtcgacttgcgcttcgctgggcggtacgactgggcgtgcttccgccccgggaatgccagccaaaagaaccatagacattctcgactttaccttaatttcaagcgccccgaggatgttgttgagttcgctgaggtcttcaatgggcacgtatttgtgaatgaaaagggtgctcagtttaaagctttcgtggaatatgcaccatcacaacaggttcccaagtcaactatcaagaaggatggccgtgaaggaactattatgaaagatccggagtacttggagtttcttgagtttatttcaaagcctactgagcatctgcctagtgctgaaattcagctcgaaaggaaagaagctgaaagggcagctgctggaaaggaggcacctgttgtgacacctcttatgatgtatgtccgccagcaaagggcagctaagagtatggttcatagacctggaagtagacttagcagaaaacttgcaagtgtcgtaagcagttccagtcctaaaaggtcttctgagaagcgcagatcctccacgtatgttgtacgagacaacactaaggagaaaccaacctatatcatggtgccaaagagagaggagcatacacaaagggaaaaagatgttgctggaaattcaggcgatgccacaagtgggggaacatctggatctggtcaggttgctgagtttaaaagggataaaattgtcatattgaaaggaagaggaaggattgattctaatacacctaatggagcaactcagcactcatcaacccctatcaagaatgtgccaccatcgcgttctagacaagaccagcgacttgaagccagtggaaaaattattaagactatactatcaaacaaggaagcccgcagttcaaatccttctgaacatgagcaggaaggtcacatgtttaatactgagaaggataagcggccaccacgggctttcaaccctcgtaccattgtgaaagatcaggtagttgaaaatgctgagaggagccattttgatgagaaggctaatcatctccatggctccgttcccattggtagttcacatccttcgtcgtcagagttccctcaaatgcagtcacattctggagataatattttgcaactagcagatggtcatggagacagaaagacagacacaaggggtcaaggtggtagccgtggtgttcctgttgaaaatggacataggcacgccaaccgtcgtggccttccacgtggaccaaaggaaactgaaatatctgcaagtgtgcctgatgcgaagaattcaaagaggggctctgctagctatggtgctcatgagagacaagtatgggttcagaagtcaagttcaggctcgtgagtttgttcattgatgatactcccatcgaaacaggtattgccagtcgtggtgaagtcttggattctgcagtgcattcttctttgttagctgttgatcctgtgaagtatgttaacaaaatgtccaacggtcaaatgctgctatgaagtgcaacctcagatttgtcaatcgaggtcttgctgctatagctgaaaagagagcttgctgatttgattcacagaaatagtgaagtaacataacccggcatgtaggtagctctcgaccacttttgggcaagatttgattcggtcccaaggttgatatttctggagcaatgggtggagattagtttggcaccagtacctcactacctcgtgacagtggtcacatatttccaagacccctggaggctacacgcaccctcgtcagagatggatgtaaatatctctagagaaagaagaggtctggttctgattgctgtttacaggttagaggtgcagcgtatttacaaagagatataagagttatcacttatcatcagactgcttggtttgctaaataaaggtgaatttagttactagattatgagaccccgtgttttgactgccgcaatcgtggttcgcggcagcagaaaggttacctagagtctaaaagtggcatctcattttggtattatggttctgaccaaatgggatatgatgtgacttgtgcggttgttttggacgcctggtgtgttttgctaccatgttccaccagacgacccgggggttctgtagtgtcagggatggatgatgtgtttggtgtacagcatcactggtgcttactgttttaaatcttaaaagtgatgttgccttgccttaatggttgatggtgtctgttctcttgtccattccgtcatgaaagttaaaaaaacatgcttgaaaacggaactctccagtattttggagtggttggacacctctaagctgattctcttgtttataaccggt

SEQ ID NO: 17115 - DNA, 2678 bp, Zea Mays
cccaattacacatcctaaatccaaaccaaccccacacccccaccaaactaccgaagcggaagggggggaaaatccacgcgacgacgacgcggcgaaacgaagggaagggaagcaggagcgagacaaatccccacccggctccaaaccctagccacctcccccgtcctgtccccagatctcgctgccgtctgacccgcctcgcttcgatgtgacccggccctagggtttgagacgtgttgcggtaggggtgttctcaaggattcacgacacgagagagattcggggaggcgtcgacggtgcgagcacacatgaaggacccggcgcaccgcacgaaggtggtgctccggcggctgccgccggcgatcgcgcagcaggccgttgtggaccaggtcgacttgcgcttcgctgggcggtacgactgggcgtgcttccgccccgggaatgccaggtgctcagtttaaagctttcgtggaatatgcaccatcacaacaggttcccaagtcaactatcaagaaggatggccgtgaaggaactattatgaaagatccggagtacttggagtttcttgagtttatttcaaagcctactgagcatctgcctagtgctgaaattcagctcgaaaggaaagaagctgaaagggcagctgctggaaaggaggcacctgttgtgacacctcttatgatgtatgtccgccagcaaagggcagctaagagtatggttcatagacctggaagtagacttagcagaaaacttgcaagtgtcgtaagcagttccagtcctaaaaggtcttctgagaagcgcagatcctccacgtatgttgtacgagacaacactaaggagaaaccaacctatatcatggtgccaaagagagaggagcatacacaaagggaaaaagatgttgctggaaattcaggcgatgccacaagtgggggaacatctggatctggtcaggttgctgagtttaaaagggataaaattgtcatattgaaaggaagaggaaggattgattctaatacacctaatggagcaactcagcactcatcaacccctatcaagaatgtgccaccatcgcgttctagacaagaccagcgacttgaagccagtggaaaaattattaagactatactatcaaacaaggaagcccgcagttcaaatccttctgaacatgagcaggaaggtcacatgtttaatactgagaaggataagcggccaccacgggctttcaaccctcgtaccattgtgaaagatcaggtagttgaaaatgctgagaggagccattttgatgagaaggctaatcatctccatggctccgttcccattggtgagaaggttgaaaggcatgctagaaacagagatagacccgatcgtggtgtatgggcagctcgccgctatgacaaatctacatctgcaggtagttcacatccttcgtcgtcagagttccctcaaatgcagtcacattctggagataatattttgcaactagcagatggtcatggagacagaaagacagacacaaggggtcaaggtggtagccgtggtgttcctgttgaaaatggacataggcacgccaaccgtcgtggccttccacgtggaccaaaggaaactgaaatatctgcaagtgtgcctgatgcgaagaattcaaagaggggctctgctagctatggtgctcatgagagacaagtatgggttcagaagtcaagttcaggctcgtgagtttgttcattgatgatactcccatcgaaacaggtattgccagtcgtggtgaagtcttggattctgcagtgcattcttctttgttagctgttgatcctgtgaagtatgttaacaaaatgtccaacggtcaaatgctgctatgaagtgcaacctcagatttgtcaatcgaggtcttgctgctatagctgaaaagagagcttgctgatttgattcacagaaatagtgaagtaacataacccggcatgtaggtagctctcgaccacttttgggcaagatttgattcggtcccaaggttgatatttctggagcaatgggtggagattagtttggcaccagtacctcactacctcgtgacagtggtcacatatttccaagacccctggaggctacacgcaccctcgtcagagatggatgtaaatatctctagagaaagaagaggtctggttctgattgctgtttacaggttagaggtgcagcgtatttacaaagagatataagagttatcacttatcatcagactgcttggtttgctaaataaaggtgaatttagttactagattatgagaccccgtgttttgactgccgcaatcgtggttcgcggcagcagaaaggttacctagagtctaaaagtggcatctcattttggtattatggttctgaccaaatgggatatgatgtgacttgtgcggttgttttggacgcctggtgtgttttgctaccatgttccaccagacgacccgggggttctgtagtgtcagggatggatgatgtgtttggtgtacagcatcactggtgcttactgttttaaatcttaaaagtgatgttgccttgccttaatggttgatggtgtctgttctcttgtccattccgtcatgaaagttaaaaaaacatgcttgaaaacggaactctccagtattttggagtggttggacacctctaagctgattctcttgtttataaccggt

SEQ ID NO: 17116 - DNA, 2749 bp, Zea Mays
cccaattacacatcctaaatccaaaccaaccccacacccccaccaaactaccgaagcggaagggggggaaaatccacgcgacgacgacgcggcgaaacgaagggaagggaagcaggagcgagacaaatccccacccggctccaaaccctagccacctcccccgtcctgtccccagatctcgctgccgtctgacccgcctcgcttcgatgtgacccggccctagggtttgagacgtgttgcggtaggggtgttctcaaggattcacgacacgagagagattcggggaggcgtcgacggtgcgagcacacatgaaggacccggcgcaccgcacgaaggtggtgctccggcggctgccgccggcgatcgcgcagcaggccgttgtggaccaggtcgacttgcgcttcgctgggcggtacgactgggcgtgcttccgccccgggaatgccagccaaaagaaccatagacattctcgactttaccttaatttcaagcgccccgaggatgttgttgagttcgctgaggtcttcaatgggcacgtatttgtgaatgaaaagggtgctcagtttaaagctttcgtggaatatgcaccatcacaacaggttcccaagtcaactatcaagaaggatggccgtgaaggaactattatgaaagatccggagtacttggagtttcttgagtttatttcaaagcctactgagcatctgcctagtgctgaaattcagctcgaaaggaaagaagctgaaagggcagctgctggaaaggaggcacctgttgtgacacctcttatgatgtatgtccgccagcaaagggcagctaagagtatggttcatagacctggaagtagacttagcagaaaacttgcaagtgtcgtaagcagttccagtcctaaaaggtcttctgagaagcgcagatcctccacgtatgttgtacgagacaacactaaggagaaaccaacctatatcatggtgccaaagagagaggagcatacacaaagggaaaaagatgttgctggaaattcaggcgatgccacaagtgggggaacatctggatctggtcaggttgctgagtttaaaagggataaaattgtcatattgaaaggaagaggaaggattgattctaatacacctaatggagcaactcagcactcatcaacccctatcaagaatgtgccaccatcgcgttctagacaagaccagcgacttgaagccagtggaaaaattattaagactatactatcaaacaaggaagcccgcagttcaaatccttctgaacatgagcaggaaggtcacatgtttaatactgagaaggataagcggccaccacgggctttcaaccctcgtaccattgtgaaagatcaggtagttgaaaatgctgagaggagccattttgatgagaaggctaatcatctccatggctccgttcccattggtgagaaggttgaaaggcatgctagaaacagagatagacccgatcgtggtgtatgggcagctcgccgctatgacaaatctacatctgcagcattggtgatgcctgcagtctcaaaacttgaactcaacacaggtcatggagacagaaagacagacacaaggggtcaaggtggtagccgtggtgttcctgttgaaaatggacataggcacgccaaccgtcgtggccttccacgtggaccaaaggaaactgaaatatctgcaagtgtgcctgatgcgaagaattcaaagaggggctctgctagctatggtgctcatgagagacaagtatgggttcagaagtcaagttcaggctcgtgagtttgttcattgatgatactcccatcgaaacaggtattgccagtcgtggtgaagtcttggattctgcagtgcattcttctttgttagctgttgatcctgtgaagtatgttaacaaaatgtccaacggtcaaatgctgctatgaagtgcaacctcagatttgtcaatcgaggtcttgctgctatagctgaaaagagagcttgctgatttgattcacagaaatagtgaagtaacataacccggcatgtaggtagctctcgaccacttttgggcaagatttgattcggtcccaaggttgatatttctggagcaatgggtggagattagtttggcaccagtacctcactacctcgtgacagtggtcacatatttccaagacccctggaggctacacgcaccctcgtcagagatggatgtaaatatctctagagaaagaagaggtctggttctgattgctgtttacaggttagaggtgcagcgtatttacaaagagatataagagttatcacttatcatcagactgcttggtttgctaaataaaggtgaatttagttactagattatgagaccccgtgttttgactgccgcaatcgtggttcgcggcagcagaaaggttacctagagtctaaaagtggcatctcattttggtattatggttctgaccaaatgggatatgatgtgacttgtgcggttgttttggacgcctggtgtgttttgctaccatgttccaccagacgacccgggggttctgtagtgtcagggatggatgatgtgtttggtgtacagcatcactggtgcttactgttttaaatcttaaaagtgatgttgccttgccttaatggttgatggtgtctgttctcttgtccattccgtcatgaaagttaaaaaaacatgcttgaaaacggaactctccagtattttggagtggttggacacctctaagctgattctcttgtttataaccggt

SEQ ID NO: 17117 - DNA, 2753 bp, Zea Mays
cgacagttcccaattacacatcctaaatccaaaccaaccccacacccccaccaaactaccgaagcggaagggggggaaaatccacgcgacgacgacgcggcgaaacgaagggaagggaagcaggagcgagacaaatccccacccggctccaaaccctagccacctcccccgtcctgtccccagatctcgctgccgtctgacccgcctcgcttcgatgtgacccggccctagggtttgagacgtgttgcggtaggggtgttctcaaggattcacgacacgagagagattcggggaggcgtcgacggtgcgagcacacatgaaggacccggcgcaccgcacgaaggtggtgctccggcggctgccgccggcgatcgcgcagcaggccgttgtggaccaggtcgacttgcgcttcgctgggcggtacgactgggcgtgcttccgccccgggaatgccagccaaaagaaccatagacattctcgactttaccttaatttcaagcgccccgaggatgttgttgagttcgctgaggtcttcaatgggcacgtatttgtgaatgaaaagggtgctcagtttaaagctttcgtggaatatgcaccatcacaacaggttcccaagtcaactatcaagaaggatggccgtgaaggaactattatgaaagatccggagtacttggagtttcttgagtttatttcaaagcctactgagcatctgcctagtgctgaaattcagctcgaaaggaaagaagctgaaagggcagctgctggaaaggaggcacctgttgtgacacctcttatgatagacctggaagtagacttagcagaaaacttgcaagtgtcgtaagcagttccagtcctaaaaggtcttctgagaagcgcagatcctccacgtatgttgtacgagacaacactaaggagaaaccaacctatatcatggtgccaaagagagaggagcatacacaaagggaaaaagatgttgctggaaattcaggcgatgccacaagtgggggaacatctggatctggtcaggttgctgagtttaaaagggataaaattgtcatattgaaaggaagaggaaggattgattctaatacacctaatggagcaactcagcactcatcaacccctatcaagaatgtgccaccatcgcgttctagacaagaccagcgacttgaagccagtggaaaaattattaagactatactatcaaacaaggaagcccgcagttcaaatccttctgaacatgagcaggaaggtcacatgtttaatactgagaaggataagcggccaccacgggctttcaaccctcgtaccattgtgaaagatcaggtagttgaaaatgctgagaggagccattttgatgagaaggctaatcatctccatggctccgttcccattggtgagaaggttgaaaggcatgctagaaacagagatagacccgatcgtggtgtatgggcagctcgccgctatgacaaatctacatctgcaggtagttcacatccttcgtcgtcagagttccctcaaatgcagtcacattctggagataatattttgcaactagcagatggtcatggagacagaaagacagacacaaggggtcaaggtggtagccgtggtgttcctgttgaaaatggacataggcacgccaaccgtcgtggccttccacgtggaccaaaggaaactgaaatatctgcaagtgtgcctgatgcgaagaattcaaagaggggctctgctagctatggtgctcatgagagacaagtatgggttcagaagtcaagttcaggctcgtgagtttgttcattgatgatactcccatcgaaacaggtattgccagtcgtggtgaagtcttggattctgcagtgcattcttctttgttagctgttgatcctgtgaagtatgttaacaaaatgtccaacggtcaaatgctgctatgaagtgcaacctcagatttgtcaatcgaggtcttgctgctatagctgaaaagagagcttgctgatttgattcacagaaatagtgaagtaacataacccggcatgtaggtagctctcgaccacttttgggcaagatttgattcggtcccaaggttgatatttctggagcaatgggtggagattagtttggcaccagtacctcactacctcgtgacagtggtcacatatttccaagacccctggaggctacacgcaccctcgtcagagatggatgtaaatatctctagagaaagaagaggtctggttctgattgctgtttacaggttagaggtgcagcgtatttacaaagagatataagagttatcacttatcatcagactgcttggtttgctaaataaaggtgaatttagttactagattatgagaccccgtgttttgactgccgcaatcgtggttcgcggcagcagaaaggttacctagagtctaaaagtggcatctcattttggtattatggttctgaccaaatgggatatgatgtgacttgtgcggttgttttggacgcctggtgtgttttgctaccatgttccaccagacgacccgggggttctgtagtgtcagggatggatgatgtgtttggtgtacagcatcactggtgcttactgttttaaatcttaaaagtgatgttgccttgccttaatggttgatggtgtctgttctcttgtccattccgtcatgaaagttaaaaaaacatgcttgaaaacggaactctccagtattttggagtggttggacacctctaagctgattctcttgtttataaccggt

SEQ ID NO: 17118 - DNA, 2758 bp, Zea Mays
cctcccctttcccaatctacgacagttcccaattacacatcctaaatccaaaccaaccccacacccccaccaaactaccgaagcggaagggggggaaaatccacgcgacgacgacgcggcgaaacgaagggaagggaagcaggagcgagacaaatccccacccggctccaaaccctagccacctcccccgtcctgtccccagatctcgctgccgtctgacccgcctcgcttcgatgtgacccggccctagggtttgagacgtgttgcggtaggggtgttctcaaggattcacgacacgagagagattcggggaggcgtcgacggtgcgagcacacatgaaggacccggcgcaccgcacgaaggtggtgctccggcggctgccgccggcgatcgcgcagcaggccgttgtggaccaggtcgacttgcgcttcgctgggcggtacgactgggcgtgcttccgccccgggaatgccagccaaaagaaccatagacattctcgactttaccttaatttcaagcgccccgaggatgttgttgagttcgctgaggtcttcaatgggcacgtatttgtgaatgaaaagggtgctcagtttaaagctttcgtggaatatgcaccatcacaacaggttcccaagtcaactatcaagaaggatggccgtgaaggaactattatgaaagatccggagtacttggagtttcttgagtttatttcaaagcctactgagcatctgcctagtgctgaaattcagctcgaaaggaaagaagctgaaagggcagctgctggaaaggaggcacctgttgtgacacctcttatgatgtatgtccgccagcaaagggcagctaagagtatggttcatagacctggaagtagacttagcagaaaacttgcaagtgtcgtaagcagttccagtcctaaaaggtcttctgagaagcgcagatcctccacgtatgttgtacgagacaacactaaggagaaaccaacctatatcatggtgccaaagagagaggagcatacacaaagggaaaaagatgttgctggaaattcaggcgatgccacaagtgggggaacatctggatctggtcaggttgctgagtttaaaagggataaaattgtcatattgaaaggaagaggaaggattgattctaatacacctaatggagcaactcagcactcatcaacccctatcaagaatgtgccaccatcgcgttctagacaagaccagcgacttgaagccagtggaaaaattattaagactatactatcaaacaaggaagcccgcagttcaaatccttctgaacatgagcaggaaggtcacatgtttaatactgagaaggataagcggccaccacgggctttcaaccctcgtaccattgtgaaagatcaggtagttgaaaatgctgagaggagccattttgatgagaaggctaatcatctccatggctccgttcccattggtgagaaggttgaaaggcatgctagaaacagagatagacccgatcgtggtgtatgggcagctcgccgctatgacaaatctacatctgcagtctcaaaacttgaactcaacacaggtcatggagacagaaagacagacacaaggggtcaaggtggtagccgtggtgttcctgttgaaaatggacataggcacgccaaccgtcgtggccttccacgtggaccaaaggaaactgaaatatctgcaagtgtgcctgatgcgaagaattcaaagaggggctctgctagctatggtgctcatgagagacaagtatgggttcagaagtcaagttcaggctcgtgagtttgttcattgatgatactcccatcgaaacaggtattgccagtcgtggtgaagtcttggattctgcagtgcattcttctttgttagctgttgatcctgtgaagtatgttaacaaaatgtccaacggtcaaatgctgctatgaagtgcaacctcagatttgtcaatcgaggtcttgctgctatagctgaaaagagagcttgctgatttgattcacagaaatagtgaagtaacataacccggcatgtaggtagctctcgaccacttttgggcaagatttgattcggtcccaaggttgatatttctggagcaatgggtggagattagtttggcaccagtacctcactacctcgtgacagtggtcacatatttccaagacccctggaggctacacgcaccctcgtcagagatggatgtaaatatctctagagaaagaagaggtctggttctgattgctgtttacaggttagaggtgcagcgtatttacaaagagatataagagttatcacttatcatcagactgcttggtttgctaaataaaggtgaatttagttactagattatgagaccccgtgttttgactgccgcaatcgtggttcgcggcagcagaaaggttacctagagtctaaaagtggcatctcattttggtattatggttctgaccaaatgggatatgatgtgacttgtgcggttgttttggacgcctggtgtgttttgctaccatgttccaccagacgacccgggggttctgtagtgtcagggatggatgatgtgtttggtgtacagcatcactggtgcttactgttttaaatcttaaaagtgatgttgccttgccttaatggttgatggtgtctgttctcttgtccattccgtcatgaaagttaaaaaaacatgcttgaaaacggaactctccagtattttggagtggttggacacctctaagctgattctcttgtttataaccggt

SEQ ID NO: 17119 - DNA, 2747 bp, Zea Mays
ctttctatcgtctcctcccctttcccaatctacgacagttcccaattacacatcctaaatccaaaccaaccccacacccccaccaaactaccgaagcggaagggggggaaaatccacgcgacgacgacgcggcgaaacgaagggaagggaagcaggagcgagacaaatccccacccggctccaaaccctagccacctcccccgtcctgtccccagatctcgctgccgtctgacccgcctcgcttcgatgtgacccggccctagggtttgagacgtgttgcggtaggggtgttctcaaggattcacgacacgagagagattcggggaggcgtcgacggtgcgagcacacatgaaggacccggcgcaccgcacgaaggtggtgctccggcggctgccgccggcgatcgcgcagcaggccgttgtggaccaggtcgacttgcgcttcgctgggcggtacgactgggcgtgcttccgccccgggaatgccagccaaaagaaccatagacattctcgactttaccttaatttcaagcgccccgaggatgttgttgagttcgctgaggtcttcaatgggcacgtatttgtgaatgaaaagggtgctcagtttaaagctttcgtggaatatgcaccatcacaacaggttcccaagtcaactatcaagaaggatggccgtgaaggaactattatgaaagatccggagtacttggagtttcttgagtttatttcaaagcctactgagcatctgcctagtgctgaaattcagctcgaaaggaaagaagctgaaagggcagctgctggaaaggaggcacctgttgtgacacctcttatgatgtatgtccgccagcaaagggcagctaagagtatggttcatagacctggaagtagacttagcagaaaacttgcaagtgtcgtaagcagttccagtcctaaaaggtcttctgagaagcgcagatcctccacgtatgttgtacgagacaacactaaggagaaaccaacctatatcatggtgccaaagagagaggagcatacacaaagggaaaaagatgttgctggaaattcaggcgatgccacaagtgggggaacatctggatctggtcaggttgctgagtttaaaagggataaaattgtcatattgaaaggaagaggaaggattgattctaatacacctaatggagcaactcagcactcatcaacccctatcaagaatgtgccaccatcgcgttctagacaagaccagcgacttgaagccagtggaaaaattattaagactatactatcaaacaaggaagcccgcagttcaaatccttctgaacatgagcaggaaggtcacatgtttaatactgagaaggataagcggccaccacgggctttcaaccctcgtaccattgtgaaagatcaggtagttgaaaatgctgagaggagccattttgatgagaaggctaatcatctccatggctccgttcccattggtgagaaggttgaaaggcatgctagaaacagagatagacccgatcgtggtgtatgggcagctcgccgctatgacaaatctacatctgcaggtcatggagacagaaagacagacacaaggggtcaaggtggtagccgtggtgttcctgttgaaaatggacataggcacgccaaccgtcgtggccttccacgtggaccaaaggaaactgaaatatctgcaagtgtgcctgatgcgaagaattcaaagaggggctctgctagctatggtgctcatgagagacaagtatgggttcagaagtcaagttcaggctcgtgagtttgttcattgatgatactcccatcgaaacaggtattgccagtcgtggtgaagtcttggattctgcagtgcattcttctttgttagctgttgatcctgtgaagtatgttaacaaaatgtccaacggtcaaatgctgctatgaagtgcaacctcagatttgtcaatcgaggtcttgctgctatagctgaaaagagagcttgctgatttgattcacagaaatagtgaagtaacataacccggcatgtaggtagctctcgaccacttttgggcaagatttgattcggtcccaaggttgatatttctggagcaatgggtggagattagtttggcaccagtacctcactacctcgtgacagtggtcacatatttccaagacccctggaggctacacgcaccctcgtcagagatggatgtaaatatctctagagaaagaagaggtctggttctgattgctgtttacaggttagaggtgcagcgtatttacaaagagatataagagttatcacttatcatcagactgcttggtttgctaaataaaggtgaatttagttactagattatgagaccccgtgttttgactgccgcaatcgtggttcgcggcagcagaaaggttacctagagtctaaaagtggcatctcattttggtattatggttctgaccaaatgggatatgatgtgacttgtgcggttgttttggacgcctggtgtgttttgctaccatgttccaccagacgacccgggggttctgtagtgtcagggatggatgatgtgtttggtgtacagcatcactggtgcttactgttttaaatcttaaaagtgatgttgccttgccttaatggttgatggtgtctgttctcttgtccattccgtcatgaaagttaaaaaaacatgcttgaaaacggaactctccagtattttggagtggttggacacctctaagctgattctcttgtttataaccggt

SEQ ID NO: 17120 - DNA, 3668 bp, Zea Mays
gacgtacctgtttttttttctcctcttgcgagccacctgtcctctcgtcgtcgcccctcctgtggcagcacccatccttttggttcgccgccaagcgccaacatggtggccgcgtccaccgccgtctcaacggtgtccgcgatctccactcacattgccgccgggcacctcttcgcggccatcgacgccctgccctcgtgctccgcctccttgctcccgccctctctttacgcctcgctcctccgcttggcaacctcccgccgctccctcgccgccgcccgccggatcgcctcccacctggcctcctcttcgtcagcttccccttccacctcggtctcgttcactccaacattcctgttcaaccgcgccatcgagtgcctcgctgcctgcggcagtcttgccgacgcgcgggagatgttcgacgcaatgccacgccgggacggcggttcctggaacgccatcatctcggcctcgtcccgcgccgggcaccctgcagaggcgttctccctcttcgctgacatgaactctcttggcattcgccccaaggatgtcacgctggcatcagtgcttgcctgctgtgctgagtgccttgacctgcgtggtgcacagcagctacatggtcttatcgcaaagagggactttcagtccaatgtgattctaggcacggcactggtcgacgtgtacgggaagtgcctctcgcttacggatgtaaggcgagcatttgatgacatcctgcaacccaatgacgtttcatggaacataatcatccggagatatcgtcttgctggtatgggcgacatggcacttcatatgtttttcatgatggtacgggctggcgttaggccgctggtatatactgtcgcacatgcaatgcttgcttgccgggataactgtgcacttaaagaagggaagtgcatacatagttttgtgctccgccgaggatatgaccaccacatacatgcgcggagctctgttgtagacatgtatgctaagtgtggcgacattgatgcagcacaaaggctcttcaacttggcaccaaagaaggatgtggtgatgtccacttcagttgtgtcagggttggctgcttgtgggaggatcgctgatgcaaaaatggtgtttgatggcatggaacaacacaatttggtatcctggaatgctatgttgaccggttatgtcaagtccatggatctgactggtgctttagatttgttccagcagatgaggcacgagacaaaggagcttgatgtagttacacttgcttctgtactcaatgcttgtacaggcctgcttgaccttgggaaaggtgaggagctccatgcactcgctctcaagtgtggtttgttcagttgccccttttttaggaacgcacttgtgaggttgtattccaaatgtggatgcctgaggactgcaaaacgtcttcttctatttgaaatgggatcagagagagatagatacgcctggaactcaatcatctcaggttacgaacgccactccatgagtgaagacgctctgcatgccctacgtgagatgcaatccgaggcaaaacctagccagtcaacgttcagctctgcccttgcagcctgtgcgaacatatttctacttaagcatgggaagcagattcatgcatacatgatcagaaacaggtatgatattgacgatatactgcgaagtgcactggttgatatgtattccaagtgtaggctgtttgattattccacccggatctttgagttaggatcatctgatgatgtcatcctgtggaattctatgatctttgcatgcgcttaccatagtaaaggtgactatgggcttggattgttggatgaaatgcggaagcagggggttagaccagactctgtcacttttcttggtgctctggtttcatgtatctgtgagggccatgtcgggttgggaaggagttatttcactctgatgattgatgagtatagcatcgttccacgaatcgaacactatgaatgcatgatcgagctgttgggaaagcatggatacatggttgagctagaggatttcgtggaccacatgccctttgagccaacaaccgcgatgtggctcaggatctttgactgctgcagggaatatgggaacagaaaattagggcagagggctgcacagcgtatcaatgatagcaaacccctgactcccgttatatttgttgagtccgctccggtctacgaatgcagtgactgtgacgatgcagagcccatgtcattctgctgaggtggacaaaactggtgacgattgagattcttgctgaactgtgaggggttttaggtgactgagaagcttaatgtgctgtctgagatgtcacaaacttgaatttgatcttttagctgcctatgaacgggtagaatcagcacttatgataccctgctaagacaataatttaggctgaacaaagctcatgtgctgatggaccgttcataatcgtacctgctaaactttatgctccttttatgtgttctgagaactagccgttctgattttattttgggagtgttaacaagtaccttgaagctaacagaaaatttctgttggagtgaggtttaggatgagatttgaaggcgatgaggctcctgaaagaaggtttagtgaacaattatttattattggcatcgagagtttgctggccatgtcagaatctctgtgggcagattctgactggagatctctaaaggttcaatgggatgaaccttcatccattcttcgtctagatagaatctcaccatgggaagtggagccattggatgcagctaatccacactcccttcaacctccattaaaaactaagcgttcacgacccccagcttcaccatgtatggtttcaggactgccttcaagttttgaacctcagcaggctcgggagttatttccttcaattcccacgtcaaccttctcatcatcgtcaaacgtcagtttcaattcaaagaatgagccgcccatgcaaaccagtcagttctactggtcagcaagggatacaagagctgactcctgcgctgctagcaccaacacagtcataatctaaaagaagcaagagccaagttccggtggttgcaggctgttcggaattgatgatatatgctgagctgaggaagaagtattacctgtggttagtactccaggtgtaggttatgaccagacagctgcctctgtagaactgaactcggacaagctatcacagccatctgatacgaacaattctaatgccccagcagctagcagtgagcgttcacctcttgaatcccaaagccggcaagtgaggaggtgcaccaaagtgatcttataccgcactatttttttttctcatcgtgttctgttcttgcctgtggttcactgggcaactggttagtattgcgcacacaggtaaggcctcgtttggtttgagggactaaagattagtccctttattttagtctcatttagtctataaattgccaaacggtgggactaaaatagggactaaactgctttagtctctagtccctcaaagggtgactaaaagtgactaaaccatattaattttactttttgtccctcatttatttcagttgcactaattgcaggagaatgctaatgggtattttggtcttcttatgattcatttaatgtgctttgaatatttttagttcctacaactaaatagggtagtg

SEQ ID NO: 17121 - DNA, 2931 bp, Zea Mays
gacgtacctgtttttttttctcctcttgcgagccacctgtcctctcgtcgtcgcccctcctgtggcagcacccatccttttggttcgccgccaagcgccaacatggtggccgcgtccaccgccgtctcaacggtgtccgcgatctccactcacattgccgccgggcacctcttcgcggccatcgacgccctgccctcgtgctccgcctccttgctcccgccctctctttacgcctcgctcctccgcttggcaacctcccgccgctccctcgccgccgcccgccggatcgcctcccacctggcctcctcttcgtcagcttccccttccacctcggtctcgttcactccaacattcctgttcaaccgcgccatcgagtgcctcgctgcctgcggcagtcttgccgacgcgcgggagatgttcgacgcaatgccacgccgggacggcggttcctggaacgccatcatctcggcctcgtcccgcgccgggcaccctgcagaggcgttctccctcttcgctgacatgaactctcttggcattcgccccaaggatgtcacgctggcatcagtgcttgcctgctgtgctgagtgccttgacctgcgtggtgcacagcagctacatggtcttatcgcaaagagggactttcagtccaatgtgattctaggcacggcactggtcgacgtgtacgggaagtgcctctcgcttacggatgtaaggcgagcatttgatgacatcctgcaacccaatgacgtttcatggaacataatcatccggagatatcgtcttgctggtatgggcgacatggcacttcatatgtttttcatgatggtacgggctggcgttaggccgctggtatatactgtcgcacatgcaatgcttgcttgccgggataactgtgcacttaaagaagggaagtgcatacatagttttgtgctccgccgaggatatgaccaccacatacatgcgcggagctctgttgtagacatgtatgctaagtgtggcgacattgatgcagcacaaaggctcttcaacttggcaccaaagaaggatgtggtgatgtccacttcagttgtgtcagggttggctgcttgtgggaggatcgctgatgcaaaaatggtgtttgatggcatggaacaacacaatttggtatcctggaatgctatgttgaccggttatgtcaagtccatggatctgactggtgctttagatttgttccagcagatgaggcacgagacaaaggagcttgatgtagttacacttgcttctgtactcaatgcttgtacaggcctgcttgaccttgggaaaggtgaggagctccatgcactcgctctcaagtgtggtttgttcagttgccccttttttaggaacgcacttgtgaggttgtattccaaatgtggatgcctgaggactgcaaaacgtcttcttctatttgaaatgggatcagagagagatagatacgcctggaactcaatcatctcaggttacgaacgccactccatgagtgaagacgctctgcatgccctacgtgagatgcaatccgaggcaaaacctagccagtcaacgttcagctctgcccttgcagcctgtgcgaacatatttctacttaagcatgggaagcagattcatgcatacatgatcagaaacaggtatgatattgacgatatactgcgaagtgcactggttgatatgtattccaagtgtaggctgtttgattattccacccggatctttgagttaggatcatctgatgatgtcatcctgtggaattctatgatctttgcatgcgcttaccatagtaaaggtgactatgggcttggattgttggatgaaatgcggaagcagggggttagaccagactctgtcacttttcttggtgctctggtttcatgtatctgtgagggccatgtcgggttgggaaggagttatttcactctgatgattgatgagtatagcatcgttccacgaatcgaacactatgaatgcatgatcgagctgttgggaaagcatggatacatggttgagctagaggatttcgtggaccacatgccctttgagccaacaaccgcgatgtggctcaggatctttgactgctgcagggaatatgggaacagaaaattagggcagagggctgcacagcgtatcaatgatagcaaacccctgactcccgttatatttgttgagtccgctccggtctacgaatgcagtgactgtgacgatgcagagcccatgtcattctgctgaggtggacaaaactggtgacgattgagattcttgctgaactgtgaggggttttaggtgactgagaagcttaatgtgctgtctgagatgtcacaaacttgaatttgatcttttagctgcctatgaacgggtagaatcagcacttatgataccctgctaagacaataatttaggctgaacaaagctcatgtgctgatggaccgttcataatcgtacctgctaaactttatgctccttttatgtgttctgagaactagccgttctgattttattttgggagtgttaacaagtaccttgaagctaacagaaaatttctgttggagtgaggtttaggatgagatttgaaggcgatgaggctcctgaaagaaggtttagtgaacaattatttattattggcatcgagagtttgctggccatgtcagaatctctgtgggcagattctgactggagatctctaaaggttcaatgggatgaaccttcatccattcttcgtctagatagaatctcaccatgggaagtggagccattggatgcagctaatccacactcccttcaacctccattaaaaactaagcgttcacgacccccagcttcaccatgtatggtttcaggactgccttcaagttttgcaaggtggacgacgtgtaagcagcaaggtcaatgacgacgtcgacaacaggatcgacgagaagatcg

SEQ ID NO: 17122 - DNA, 1838 bp, Zea Mays
ctgcctgcctgcctcagtcctgacaccatccatactaggagccgtccctgtcctgcgagccgtcagaggattgcctcctcctctctctctctctctctctctctctctctctctctctctctctctctctctctctctctctctctctctctctctctctctctctctctctctctctctctctctctctctctctctctctctctctctctctctctctctctctctctctctctctctctctctctctctctctctctctctctctctctctctctctctctctctctctctctctctctctctctctctctctctctctctctcttcgtcctggacctggcctcctgtggcgtcacgctcacgcttataagagcacgcggccggcaacactcttccttgccgcgctttataaactttcgccgctgccgctgccccccgctctggttggcgagaaagagcagagggacaccgaaacagagaggagcagaggggagcgacgacaggtcagcggagatggaagcagcggcaggaggagtggaggcggagggggtgatgagggtgctggtggtggacgactcccccgtcgaccgccgggtggcgcagctgcttctcagcagcgactcctgcgccggctcattccacgtcatcgccgtcgacagcgcgaggaaggcgatggagttcctcggcctcaaggacggcggcgaggccgtcgacatggtgctcacggactactgcatgcccgagatgaccggctacgacctcctcaaggccatcaaggcactgaaccccctggagccgatcccggtcgtcgtcatgtcgtcagaagacgagccccagaggatcagccgatgcctgagcgccggcgccgaggacttcatcgtgaagcccctgcagagcaaggacgtgcagcgcctccggaactgctccgccgccgcgaggcccagcaagggcgccgcgccgtgcgaggccgccgtcgtggccaagaggaatcaaaagccgccgcatcctgccggcgccgcgtcgccgtctggacggcgagcgagcctcgccggagtcgccatggtgctgcactcgtcgggcgtggagtacctgccgctcctgctcaagctcgtcgtgctggcgtacgcggcgctgtgcctgggagagctcctgcacaggtgggcgtcgtcggacggccgctgctcgctctccccgtggtgcgcctgagcagcggtgcgtgtcctgggcaccagcaggagactggtgatgcaaatgcagagtttttcagctgctgaaccaaaaaaaaaaacctccaacagccgtggaggtctagcttagcctttaatttaggcactgtagaagattgactgctttgggattgggtacgctcgcgtctgccgtctgcgtggcgtttgtttcttgatttgagggagacgtatgtatgtacgtacgatacgaggccacggggggtacgctcccctgtatcctctcctctgtatagaatccactgaatcagaatgcaacgcgtgacccgagccaagtacctggcgtcctcttcggcctggatccgggctgatatgcttcacgcgacggacggcgatggcgattgctcaccagctcggatgatcagatccgatattcccatccgatcccaggggaaagacgacaacgcaggttgttgacttgtcgtagcatcggaccctcccgactcgatgattgcgatgtttaccactaccagtttgttcatgtaagccttgagctgcgcaatctcaaccactggaggcatgggaatgggatcacgatcatcaccgaactcaaccgttgcataaaaaggaaagaaagattctactgctatg

SEQ ID NO: 17123 - DNA, 2350 bp, Zea Mays
ctgcctgcctgcctcagtcctgacaccatccatactaggagccgtccctgtcctgcgagccgtcagaggattgcctcctcctctctctctctctctctctctctctctctctctctctctctctctctctctctctctctctctctctctctctctctctctctctctctctctctctctctctctctctctctctctctctctctctctctctctctctctctctctctctctctctctctctctctctctctctctctctctctctctctctctctctctctctctctctctctctctctctctctctctctctctctctctctcttcgtcctggacctggcctcctgtggcgtcacgctcacgcttataagagcacgcggccggcaacactcttccttgccgcgctttataaactttcgccgctgccgctgccccccgctctggttggcgagaaagagcagagggacaccgaaacagagaggagcagaggggagcgacgacaggtcagcggagatggaagcagcggcaggaggagtggaggcggagggggtgatgagggtgctggtggtggacgactcccccgtcgaccgccgggtggcgcagctgcttctcagcagcgactcctgcgccggctcattccacggtcagccacccctctggtgtctaccacagaaccacctgcccacctcctcccagtttctctttcctaccattcgattcttcttcttccgtccgcgtcgctcgcaccgcgagagctcgcaggctggctcccccctgtttttcaactctggaagagcaccacgcgtgcgtgcatgcatttccagagctgatctgcctctgcttttcatcggctgtcaccgtttccagttttcatcgccgtcgacagcgcgaggaaggcgatggagttcctcggcctcaaggacggcggcgaggtaacagccgctacctgccctgcccacagcgagctagcctgaaggcgacacacgggattagtcagcactcagcaccaccaggtccggccgccggccggcatccctttcccgtgccggggagctgctcacaaagagagcgcatgggctcctgcctcggtgcctcctgcaccacaggccgcgccgtatcgtacggcccacgcgtccgcgcatgcgcgcgtgacggcttctgttccccgccccctctttgggggagcaaaaggcagccgcttttccatggcggagcaggccgtcgacatggtgctcacggactactgcatgcccgagatgaccggctacgacctcctcaaggccatcaaggcactgaaccccctggagccgatcccggtcgtcgtcatgtcgtcagaagacgagccccagaggatcagccgatgcctgagcgccggcgccgaggacttcatcgtgaagcccctgcagagcaaggacgtgcagcgcctccggaactgctccgccgccgcgaggcccagcaagggcgccgcgccgtgcgaggccgccgtcgtggccaagaggaatcaaaagccgccgcatcctgccggcgccgcgtcgccgtctggacggcgagcgagcctcgccggagtcgccatggtgctgcactcgtcgggcgtggagtacctgccgctcctgctcaagctcgtcgtgctggcgtacgcggcgctgtgcctgggagagctcctgcacaggtgggcgtcgtcggacggccgctgctcgctctccccgtggtgcgcctgagcagcggtgcgtgtcctgggcaccagcaggagactggtgatgcaaatgcagagtttttcagctgctgaaccaaaaaaaaaaacctccaacagccgtggaggtctagcttagcctttaatttaggcactgtagaagattgactgctttgggattgggtacgctcgcgtctgccgtctgcgtggcgtttgtttcttgatttgagggagacgtatgtatgtacgtacgatacgaggccacggggggtacgctcccctgtatcctctcctctgtatagaatccactgaatcagaatgcaacgcgtgacccgagccaagtacctggcgtcctcttcggcctggatccgggctgatatgcttcacgcgacggacggcgatggcgattgctcaccagctcggatgatcagatccgatattcccatccgatcccaggggaaagacgacaacgcaggttgttgacttgtcgtagcatcggaccctcccgactcgatgattgcgatgtttaccactaccagtttgttcatgtaagccttgagctgcgcaatctcaaccactggaggcatgggaatgggatcacgatcatcaccgaactcaaccgttgcataaaaaggaaagaaagattctactgctatg

SEQ ID NO: 17124 - DNA, 2386 bp, Zea Mays
ctgcctgcctgcctcagtcctgacaccatccatactaggagccgtccctgtcctgcgagccgtcagaggattgcctcctcctctctctctctctctctctctctctctctctctctctctctctctctctctctctctctctctctctctctctctctctctctctctctctctctctctctctctctctctctctctctctctctctctctctctctctctctctctctctctctctctctctctctctctctctctctctctctctctctctctctctctctctctctctctctctctctctctctctctctctctctctctctcttcgtcctggacctggcctcctgtggcgtcacgctcacgcttataagagcacgcggccggcaacactcttccttgccgcgctttataaactttcgccgctgccgctgccccccgctctggttggcgagaaagagcagagggacaccgaaacagagaggagcagaggggagcgacgacaggtcagcggagatggaagcagcggcaggaggagtggaggcggagggggtgatgagggtgctggtggtggacgactcccccgtcgaccgccgggtggcgcagctgcttctcagcagcgactcctgcgccggctcattccacggtcagccacccctctggtgtctaccacagaaccacctgcccacctcctcccagtttctctttcctaccattcgattcttcttcttccgtccgcgtcgctcgcaccgcgagagctcgcaggctggctcccccctgtttttcaactctggaagagcaccacgcgtgcgtgcatgcatttccagagctgatctgcctctgcttttcatcggctgtcaccgtttccagtttgtccgtgccacttctgctctgttttttttatatatatatacatactatcaggctagaccggtagagtatattaattctaaacagctcgtgtgatgtttcacccagtcatcgccgtcgacagcgcgaggaaggcgatggagttcctcggcctcaaggacggcggcgaggagcaggccgtcgacatggtgctcacggactactgcatgcccgagatgaccggctacgacctcctcaaggccatcaaggcactgaaccccctggagccgatcccggtcgtcgtcatgtcgtcagaagacgagccccagaggatcagccggtgagccagccggctctgttctttcctctttttgagcaccgtttcctttggtccctatcccgtcccctgtgaatgcatgctgaatcatcccgtgagatagaatagcagacggggccaaaagccctggcccgtgtgtactgacggggtaacatttattcattcatccactcgacccgtgtgtactgacggcctcgttattctccggagcagatgcctgagcgccggcgccgaggacttcatcgtgaagcccctgcagagcaaggacgtgcagcgcctccggaactgctccgccgccgcgaggcccagcaagggcgccgcgccgtgcgaggccgccgtcgtggccaagaggaatcaaaagccgccgcatcctgccggcgccgcgtcgccgtctggacggcgagcgagcctcgccggagtcgccatggtgctgcactcgtcgggcgtggagtacctgccgctcctgctcaagctcgtcgtgctggcgtacgcggcgctgtgcctgggagagctcctgcacaggtgggcgtcgtcggacggccgctgctcgctctccccgtggtgcgcctgagcagcggtgcgtgtcctgggcaccagcaggagactggtgatgcaaatgcagagtttttcagctgctgaaccaaaaaaaaaaacctccaacagccgtggaggtctagcttagcctttaatttaggcactgtagaagattgactgctttgggattgggtacgctcgcgtctgccgtctgcgtggcgtttgtttcttgatttgagggagacgtatgtatgtacgtacgatacgaggccacggggggtacgctcccctgtatcctctcctctgtatagaatccactgaatcagaatgcaacgcgtgacccgagccaagtacctggcgtcctcttcggcctggatccgggctgatatgcttcacgcgacggacggcgatggcgattgctcaccagctcggatgatcagatccgatattcccatccgatcccaggggaaagacgacaacgcaggttgttgacttgtcgtagcatcggaccctcccgactcgatgattgcgatgtttaccactaccagtttgttcatgtaagccttgagctgcgcaatctcaaccactggaggcatgggaatgggatcacgatcatcaccgaactcaaccgttgcataaaaaggaaagaaagattctactgctatg

SEQ ID NO: 17125 - DNA, 2190 bp, Zea Mays
aaagagacgaagaaggtggaggggagcgcggtgtggagagattccccgacagcaaaatctagagaggaaaagcgattcccgtgccggcgagccaccctcctctcctccttcatcagtcgtcacgcacgcctgcggcctgcctgcctgcctcagtcctgacaccatccatactaggagccgtccctgtcctgcgagccgtcagaggattgcctcctcctctctctctctctctctctctctctctctctctctctctctctctctctctctctctctctctctctctctctctctctctctctctctctctctctctctctctctctctctctctctctctctctctctctctctctctctctctctctctctctctctctctctctctctctctctctctctctctctctctctctctctctctctctctctctctctctctctctctctctctctctctctcttcgtcctggacctggcctcctgtggcgtcacgctcacgcttataagagcacgcggccggcaacactcttccttgccgcgctttataaactttcgccgctgccgctgccccccgctctggttggcgagaaagagcagagggacaccgaaacagagaggagcagaggggagcgacgacaggtcagcggagatggaagcagcggcaggaggagtggaggcggagggggtgatgagggtgctggtggtggacgactcccccgtcgaccgccgggtggcgcagctgcttctcagcagcgactcctgcgccggctcattccacgtcatcgccgtcgacagcgcgaggaaggcgatggagttcctcggcctcaaggacggcggcgaggagcaggccgtcgacatggtgctcacggactactgcatgcccgagatgaccggctacgacctcctcaaggccatcaaggcactgaaccccctggagccgatcccggtcgtcgtcatgtcgtcagaagacgagccccagaggatcagccggtgagccagccggctctgttctttcctctttttgagcaccgtttcctttggtccctatcccgtcccctgtgaatgcatgctgaatcatcccgtgagatagaatagcagacggggccaaaagccctggcccgtgtgtactgacggggtaacatttattcattcatccactcgacccgtgtgtactgacggcctcgttattctccggagcagatgcctgagcgccggcgccgaggacttcatcgtgaagcccctgcagagcaaggacgtgcagcgcctccggaactgctccgccgccgcgaggcccagcaagggcgccgcgccgtgcgaggccgccgtcgtggccaagaggaatcaaaagccgccgcatcctgccggcgccgcgtcgccgtctggacggcgagcgagcctcgccggagtcgccatggtgctgcactcgtcgggcgtggagtacctgccgctcctgctcaagctcgtcgtgctggcgtacgcggcgctgtgcctgggagagctcctgcacaggtgggcgtcgtcggacggccgctgctcgctctccccgtggtgcgcctgagcagcggtgcgtgtcctgggcaccagcaggagactggtgatgcaaatgcagagtttttcagctgctgaaccaaaaaaaaaaacctccaacagccgtggaggtctagcttagcctttaatttaggcactgtagaagattgactgctttgggattgggtacgctcgcgtctgccgtctgcgtggcgtttgtttcttgatttgagggagacgtatgtatgtacgtacgatacgaggccacggggggtacgctcccctgtatcctctcctctgtatagaatccactgaatcagaatgcaacgcgtgacccgagccaagtacctggcgtcctcttcggcctggatccgggctgatatgcttcacgcgacggacggcgatggcgattgctcaccagctcggatgatcagatccgatattcccatccgatcccaggggaaagacgacaacgcaggttgttgacttgtcgtagcatcggaccctcccgactcgatgattgcgatgtttaccactaccagtttgttcatgtaagccttgagctgcgcaatctcaaccactggaggcatgggaatgggatcacgatcatcaccgaactcaaccgttgcataaaaaggaaagaaagattctactgctatg

SEQ ID NO: 17126 - DNA, 2230 bp, Zea Mays
ccagatcgcagggagagtgagagagtgtgttttgctctataaaaatatttggttcaatacttggagtttcagctggatttgtccttggaaaggaaggtcccatggtacatacaggagcatgcattgccaacttacttggtcaaggggggtcacgcaagtaccatctgacatgtaactggctcagatactttaagaatgatagagataggcgggatttgattacttgtggctctgctgctggagttgcagcagcattccgtgcgcctgttggtggtgtgctctttgctcttgaagaagcagcatcatggtggcgaagtgctctcctgtggagaacattctttacaactgctgttgttgctgttgtactgaggggtctgatccagttctgtcgtagcggaaaatgtggtctttttggtcagggagggttgattatgtttgatcttagctcaaccgtaccgagttacagtacccaggatatcattgcaattattgtccttggaataattggtggggtcttcgggggcctgttcaactttctcttggataggattctccgagcttatagttttatcaacgagagaggtgctccatacaagatccttctcaccgtcacaatatcaatcatcacatcagcatgctcctatgggctaccttggctcgccccatgcactccgtgccctgctgatgctgtggaggaatgccctaccattggccgctctgggaattttaagaactttcagtgcccgccgggctattacaatggtcttgcgtcgttgttcttcaacacaaatgatgacgccatccgcaatctattcagcagtggcaccgagaatgagttccacatgtccactcttttcgtgttcttcactgcgatttactgccttggccttgtgacatacggtattgctgttccatctggtctcttcatccctgttatacttgctggggctacgtacgggcgcatagtggggacccttcttggtccaatttcagaccttgatcctggactattcgcacttcttggcgcggcatctttcctcggtggaacaatgaggatgactgtgtcagtctgcgtgatacttctggagctcaccaatgacctccttatgctcccgttagtcatgctcgttcttctgatatcaaagaccatagccgacagctttaacaaaggggtttatgatcagattgtggtgatgaaaggcttgccattcctggaagctcatgccgaaccatacatgacgcacttggttgctagcgatgttgtgtctgggccactgatctccttttcaggcgtcgagagagtggggaatatcgttcaggcgttgaggatcacaggccacaacggatttccagtggtcgatgagccacctctatcagaggctccagaacttgttgggcttgtgctcagatcccatctgctggtcctgctgaaaggtaagggcttcatgaaagagaagatgaaaaccagcggtagcttcgtgctggaaagatttggtgccttcgattttgccaagccaggctcagggaaaggcctgaagattgaggacctggatttcactgatgaggaaatggacttgtatgtcgatctccatccaattacaaatacatcaccgtacacggtggtagagaccatgtcacttgcgaaggctgccgtccttttccgggcactgggactcaggcacatgctcgttgtgccaaagaccccagggagacctccaattgttggaatcctgacgaggcacgatttcataccggagcatattcatgggctgtttccaaatatacacaagtcacactaatggaacactcaatcagtccatatcttttcttttcttttttgccgtcgccttgtaggttgtagctagctgtacgaaaacgaagctacttttgtccaatatttgctatcggccatctggccttttcttttccattttgtttcttcaggagtactccagaatcatataatcactggataatattgtatttgttcaagagctggttccctggcagaacactccataagtgatatttctgtctttttctcaaatacgcagaagatctacgtatcaatatattatataggaaaacgaccaaattactaccatcacatatggacagagtttacctaatcttttgatttatttggctctcccgctcctttcttttttccttttttgttatgtattatggttattcccatatctttttttttgtaatgagcctatcctct

SEQ ID NO: 17127 - DNA, 2884 bp, Zea Mays
gctgaattttaagtgattcactactacgcagcagaagcgcaggacggggcagcggcagcgtgagcgacgccaccacccaagcggacggcaataatggacgctaaccactcgccgccggcgcagccggagaggaatcatggcagcttaaactacgacatcgagagcacggacggcacgtggcgcggcgcgggggcgtggcaggagcaggacccatcgtcggaggccctgatgcggtacgacgacgacgggccccgggagccgctgctgcgaaggcgcaccatgaacaccacctcccagattgccatcgtcggcgccaacatctgccccatcgagagcctcgactacgagattggcgatcaagaaagaagcagcagatattccagtatattgttctgaaatggtcattagttcttcttattggcctgtgtactggacttgttggcttcttcaataaccttgcagttgaaaacattgctgggttcaagttgttgcttacaagtgatctgatgctcaagcaaaggtacttcacagcatttctggcatatggaggttgcaatctagtcttggcagctgctgctgcagcgatctgcgcttacatagcacctgctgctgctgggtctggtatccctgaagttaaagcataccttaatggagttgatgcttatgctatattagctccaagcacactgtttgtgaagatatttggttcaatacttggagtttcagctggatttgtccttggaaaggaaggtcccatggtacatacaggagcatgcattgccaacttacttggtcaaggggggtcacgcaagtaccatctgacatgtaactggctcagatactttaagaatgatagagataggcgggatttgattacttgtggctctgctgctggagttgcagcagcattccgtgcgcctgttggtggtgtgctctttgctcttgaagaagcagcatcatggtggcgaagtgctctcctgtggagaacattctttacaactgctgttgttgctgttgtactgaggggtctgatccagttctgtcgtagcggaaaatgtggtctttttggtcagggagggttgattatgtttgatcttagctcaaccgtaccgagttacagtacccaggatatcattgcaattattgtccttggaataattggtggggtcttcgggggcctgttcaactttctcttggataggattctccgagcttatagttttatcaacgagagaggtgctccatacaagatccttctcaccgtcacaatatcaatcatcacatcagcatgctcctatgggctaccttggctcgccccatgcactccgtgccctgctgatgctgtggaggaatgccctaccattggccgctctgggaattttaagaactttcagtgcccgccgggctattacaatggtcttgcgtcgttgttcttcaacacaaatgatgacgccatccgcaatctattcagcagtggcaccgagaatgagttccacatgtccactcttttcgtgttcttcactgcgatttactgccttggccttgtgacatacggtattgctgttccatctggtctcttcatccctgttatacttgctggggctacgtacgggcgcatagtggggacccttcttggtccaatttcagaccttgatcctggactattcgcacttcttggcgcggcatctttcctcggtggaacaatgaggatgactgtgtcagtctgcgtgatacttctggagctcaccaatgacctccttatgctcccgttagtcatgctcgttcttctgatatcaaagaccatagccgacagctttaacaaaggggtttatgatcagattgtggtgatgaaaggcttgccattcctggaagctcatgccgaaccatacatgacgcacttggttgctagcgatgttgtgtctgggccactgatctccttttcaggcgtcgagagagtggggaatatcgttcaggcgttgaggatcacaggccacaacggatttccagtggtcgatgagccacctctatcagaggctccagaacttgttgggcttgtgctcagatcccatctgctggtcctgctgaaaggtaagggcttcatgaaagagaagatgaaaaccagcggtagcttcgtgctggaaagatttggtgccttcgattttgccaagccaggctcagggaaaggcctgaagattgaggacctggatttcactgatgaggaaatggacttgtatgtcgatctccatccaattacaaatacatcaccgtacacggtggtagagaccatgtcacttgcgaaggctgccgtccttttccgggcactgggactcaggcacatgctcgttgtgccaaagaccccagggagacctccaattgttggaatcctgacgaggcacgatttcataccggagcatattcatgggctgtttccaaatatacacaagtcacactaatggaacactcaatcagtccatatcttttcttttcttttttgccgtcgccttgtaggttgtagctagctgtacgaaaacgaagctacttttgtccaatatttgctatcggccatctggccttttcttttccattttgtttcttcaggagtactccagaatcatataatcactggataatattgtatttgttcaagagctggttccctggcagaacactccataagtgatatttctgtctttttctcaaatacgcagaagatctacgtatcaatatattatataggaaaacgaccaaattactaccatcacatatggacagagtttacctaatcttttgatttatttggctctcccgctcctttcttttttccttttttgttatgtattatggttattcccatatctttttttttgtaatgagcctatcctct

SEQ ID NO: 17128 - DNA, 2926 bp, Zea Mays
gcttttttggctgaattttaagtgattcactactacgcatccaggcagaagcgcaggacggggcagcggcagcgtgagcgacgccaccacccaagcggacggcaataatggacgctaaccactcgccgccggcgcagccggagaggaatcatggcagcttaaactacgacatcgagagcacggacggcacgtggcgcggcgcgggggcgtggcaggagcaggacccatcgtcggaggccctgatgcggtacgacgacgacgggccccgggagccgctgctgcgaaggcgcaccatgaacaccacctcccagattgccatcgtcggcgccaacatctgccccatcgagagcctcgactacgaaattgtggaaaatgaccttttcaagcaggattggcgatcaagaaagaagcagcagatattccagtatattgttctgaaatggtcattagttcttcttattggcctgtgtactggacttgttggcttcttcaataaccttgcagttgaaaacattgctgggttcaagttgttgcttacaagtgatctgatgctcaagcaaaggtacttcacagcatttctggcatatggaggttgcaatctagtcttggcagctgctgctgcagcgatctgcgcttacatagcacctgctgctgctgggtctggtatccctgaagttaaagcataccttaatggagttgatgcttatgctatattagctccaagcacactgtttgtgaagatatttggttcaatacttggagtttcagctggatttgtccttggaaaggaaggtcccatggtacatacaggagcatgcattgccaacttacttggtcaaggggggtcacgcaagtaccatctgacatgtaactggctcagatactttaagaatgatagagataggcgggatttgattacttgtggctctgctgctggagttgcagcagcattccgtgcgcctgttggtggtgtgctctttgctcttgaagaagcagcatcatggtggcgaagtgctctcctgtggagaacattctttacaactgctgttgttgctgttgtactgaggggtctgatccagttctgtcgtagcggaaaatgtggtctttttggtcagggagggttgattatgtttgatcttagctcaaccgtaccgagttacagtacccaggatatcattgcaattattgtccttggaataattggtggggtcttcgggggcctgttcaactttctcttggataggattctccgagcttatagttttatcaacgagagaggtgctccatacaagatccttctcaccgtcacaatatcaatcatcacatcagcatgctcctatgggctaccttggctcgccccatgcactccgtgccctgctgatgctgtggaggaatgccctaccattggccgctctgggaattttaagaactttcagtgcccgccgggctattacaatggtcttgcgtcgttgttcttcaacacaaatgatgacgccatccgcaatctattcagcagtggcaccgagaatgagttccacatgtccactcttttcgtgttcttcactgcgatttactgccttggccttgtgacatacggtattgctgttccatctggtctcttcatccctgttatacttgctggggctacgtacgggcgcatagtggggacccttcttggtccaatttcagaccttgatcctggactattcgcacttcttggcgcggcatctttcctcggtggaacaatgaggatgactgtgtcagtctgcgtgatacttctggagctcaccaatgacctccttatgctcccgttagtcatgctcgttcttctgatatcaaagaccatagccgacagctttaacaaaggggtttatgatcagattgtggtgatgaaaggcttgccattcctggaagctcatgccgaaccatacatgacgcacttggttgctagcgatgttgtgtctgggccactgatctccttttcaggcgtcgagagagtggggaatatcgttcaggcgttgaggatcacaggccacaacggatttccagtggtcgatgagccacctctatcagaggctccagaacttgttgggcttgtgctcagatcccatctgctggtcctgctgaaaggtaagggcttcatgaaagagaagatgaaaaccagcggtagcttcgtgctggaaagatttggtgccttcgattttgccaagccaggctcagggaaaggcctgaagattgaggacctggatttcactgatgaggaaatggacttgtatgtcgatctccatccaattacaaatacatcaccgtacacggtggtagagaccatgtcacttgcgaaggctgccgtccttttccgggcactgggactcaggcacatgctcgttgtgccaaagaccccagggagacctccaattgttggaatcctgacgaggcacgatttcataccggagcatattcatgggctgtttccaaatatacacaagtcacactaatggaacactcaatcagtccatatcttttcttttcttttttgccgtcgccttgtaggttgtagctagctgtacgaaaacgaagctacttttgtccaatatttgctatcggccatctggccttttcttttccattttgtttcttcaggagtactccagaatcatataatcactggataatattgtatttgttcaagagctggttccctggcagaacactccataagtgatatttctgtctttttctcaaatacgcagaagatctacgtatcaatatattatataggaaaacgaccaaattactaccatcacatatggacagagtttacctaatcttttgatttatttggctctcccgctcctttcttttttccttttttgttatgtattatggttattcccatatctttttttttgtaatgagcctatcctct

SEQ ID NO: 17129 - DNA, 3003 bp, Zea Mays
cgccgatttagcagttctttttttattcgtactaggttacttgcattatgatgagttataaagattactagtgctagaaagggcttttttggctgaattttaagtgattcactactacgcagcagaagcgcaggacggggcagcggcagcgtgagcgacgccaccacccaagcggacggcaataatggacgctaaccactcgccgccggcgcagccggagaggaatcatggcagcttaaactacgacatcgagagcacggacggcacgtggcgcggcgcgggggcgtggcaggagcaggacccatcgtcggaggccctgatgcggtacgacgacgacgggccccgggagccgctgctgcgaaggcgcaccatgaacaccacctcccagattgccatcgtcggcgccaacatctgccccatcgagagcctcgactacgaaattgtggaaaatgaccttttcaagcaggattggcgatcaagaaagaagcagcagatattccagtatattgttctgaaatggtcattagttcttcttattggcctgtgtactggacttgttggcttcttcaataaccttgcagttgaaaacattgctgggttcaagttgttgcttacaagtgatctgatgctcaagcaaaggtacttcacagcatttctggcatatggaggttgcaatctagtcttggcagctgctgctgcagcgatctgcgcttacatagcacctgctgctgctgggtctggtatccctgaagttaaagcataccttaatggagttgatgcttatgctatattagctccaagcacactgtttgtgaagatatttggttcaatacttggagtttcagctggatttgtccttggaaaggaaggtcccatggtacatacaggagcatgcattgccaacttacttggtcaaggggggtcacgcaagtaccatctgacatgtaactggctcagatactttaagaatgatagagataggcgggatttgattacttgtggctctgctgctggagttgcagcagcattccgtgcgcctgttggtggtgtgctctttgctcttgaagaagcagcatcatggtggcgaagtgctctcctgtggagaacattctttacaactgctgttgttgctgttgtactgaggggtctgatccagttctgtcgtagcggaaaatgtggtctttttggtcagggagggttgattatgtttgatcttagctcaaccgtaccgagttacagtacccaggatatcattgcaattattgtccttggaataattggtggggtcttcgggggcctgttcaactttctcttggataggattctccgagcttatagttttatcaacgagagaggtgctccatacaagatccttctcaccgtcacaatatcaatcatcacatcagcatgctcctatgggctaccttggctcgccccatgcactccgtgccctgctgatgctgtggaggaatgccctaccattggccgctctgggaattttaagaactttcagtgcccgccgggctattacaatggtcttgcgtcgttgttcttcaacacaaatgatgacgccatccgcaatctattcagcagtggcaccgagaatgagttccacatgtccactcttttcgtgttcttcactgcgatttactgccttggccttgtgacatacggtattgctgttccatctggtctcttcatccctgttatacttgctggggctacgtacgggcgcatagtggggacccttcttggtccaatttcagaccttgatcctggactattcgcacttcttggcgcggcatctttcctcggtggaacaatgaggatgactgtgtcagtctgcgtgatacttctggagctcaccaatgacctccttatgctcccgttagtcatgctcgttcttctgatatcaaagaccatagccgacagctttaacaaaggggtttatgatcagattgtggtgatgaaaggcttgccattcctggaagctcatgccgaaccatacatgacgcacttggttgctagcgatgttgtgtctgggccactgatctccttttcaggcgtcgagagagtggggaatatcgttcaggcgttgaggatcacaggccacaacggatttccagtggtcgatgagccacctctatcagaggctccagaacttgttgggcttgtgctcagatcccatctgctggtcctgctgaaaggtaagggcttcatgaaagagaagatgaaaaccagcggtagcttcgtgctggaaagatttggtgccttcgattttgccaagccaggctcagggaaaggcctgaagattgaggacctggatttcactgatgaggaaatggacttgtatgtcgatctccatccaattacaaatacatcaccgtacacggtggtagagaccatgtcacttgcgaaggctgccgtccttttccgggcactgggactcaggcacatgctcgttgtgccaaagaccccagggagacctccaattgttggaatcctgacgaggcacgatttcataccggagcatattcatgggctgtttccaaatatacacaagtcacactaatggaacactcaatcagtccatatcttttcttttcttttttgccgtcgccttgtaggttgtagctagctgtacgaaaacgaagctacttttgtccaatatttgctatcggccatctggccttttcttttccattttgtttcttcaggagtactccagaatcatataatcactggataatattgtatttgttcaagagctggttccctggcagaacactccataagtgatatttctgtctttttctcaaatacgcagaagatctacgtatcaatatattatataggaaaacgaccaaattactaccatcacatatggacagagtttacctaatcttttgatttatttggctctcccgctcctttcttttttccttttttgttatgtattatggttattcccatatctttttttttgtaatgagcctatcctct

SEQ ID NO: 17130 - DNA, 2874 bp, Zea Mays
gtgtctgaatgaatgtccaggcagaagcgcaggacggggcagcggcagcgtgagcgacgccaccacccaagcggacggcaataatggacgctaaccactcgccgccggcgcagccggagaggaatcatggcagcttaaactacgacatcgagagcacggacggcacgtggcgcggcgcgggggcgtggcaggagcaggacccatcgtcggaggccctgatgcggtacgacgacgacgggccccgggagccgctgctgcgaaggcgcaccatgaacaccacctcccagattgccatcgtcggcgccaacatctgccccatcgagagcctcgactacgagattggcgatcaagaaagaagcagcagatattccagtatattgttctgaaatggtcattagttcttcttattggcctgtgtactggacttgttggcttcttcaataaccttgcagttgaaaacattgctgggttcaagttgttgcttacaagtgatctgatgctcaagcaaaggtacttcacagcatttctggcatatggaggttgcaatctagtcttggcagctgctgctgcagcgatctgcgcttacatagcacctgctgctgctgggtctggtatccctgaagttaaagcataccttaatggagttgatgcttatgctatattagctccaagcacactgtttgtgaagatatttggttcaatacttggagtttcagctggatttgtccttggaaaggaaggtcccatggtacatacaggagcatgcattgccaacttacttggtcaaggggggtcacgcaagtaccatctgacatgtaactggctcagatactttaagaatgatagagataggcgggatttgattacttgtggctctgctgctggagttgcagcagcattccgtgcgcctgttggtggtgtgctctttgctcttgaagaagcagcatcatggtggcgaagtgctctcctgtggagaacattctttacaactgctgttgttgctgttgtactgaggggtctgatccagttctgtcgtagcggaaaatgtggtctttttggtcagggagggttgattatgtttgatcttagctcaaccgtaccgagttacagtacccaggatatcattgcaattattgtccttggaataattggtggggtcttcgggggcctgttcaactttctcttggataggattctccgagcttatagttttatcaacgagagaggtgctccatacaagatccttctcaccgtcacaatatcaatcatcacatcagcatgctcctatgggctaccttggctcgccccatgcactccgtgccctgctgatgctgtggaggaatgccctaccattggccgctctgggaattttaagaactttcagtgcccgccgggctattacaatggtcttgcgtcgttgttcttcaacacaaatgatgacgccatccgcaatctattcagcagtggcaccgagaatgagttccacatgtccactcttttcgtgttcttcactgcgatttactgccttggccttgtgacatacggtattgctgttccatctggtctcttcatccctgttatacttgctggggctacgtacgggcgcatagtggggacccttcttggtccaatttcagaccttgatcctggactattcgcacttcttggcgcggcatctttcctcggtggaacaatgaggatgactgtgtcagtctgcgtgatacttctggagctcaccaatgacctccttatgctcccgttagtcatgctcgttcttctgatatcaaagaccatagccgacagctttaacaaaggggtttatgatcagattgtggtgatgaaaggcttgccattcctggaagctcatgccgaaccatacatgacgcacttggttgctagcgatgttgtgtctgggccactgatctccttttcaggcgtcgagagagtggggaatatcgttcaggcgttgaggatcacaggccacaacggatttccagtggtcgatgagccacctctatcagaggctccagaacttgttgggcttgtgctcagatcccatctgctggtcctgctgaaaggtaagggcttcatgaaagagaagatgaaaaccagcggtagcttcgtgctggaaagatttggtgccttcgattttgccaagccaggctcagggaaaggcctgaagattgaggacctggatttcactgatgaggaaatggacttgtatgtcgatctccatccaattacaaatacatcaccgtacacggtggtagagaccatgtcacttgcgaaggctgccgtccttttccgggcactgggactcaggcacatgctcgttgtgccaaagaccccagggagacctccaattgttggaatcctgacgaggcacgatttcataccggagcatattcatgggctgtttccaaatatacacaagtcacactaatggaacactcaatcagtccatatcttttcttttcttttttgccgtcgccttgtaggttgtagctagctgtacgaaaacgaagctacttttgtccaatatttgctatcggccatctggccttttcttttccattttgtttcttcaggagtactccagaatcatataatcactggataatattgtatttgttcaagagctggttccctggcagaacactccataagtgatatttctgtctttttctcaaatacgcagaagatctacgtatcaatatattatataggaaaacgaccaaattactaccatcacatatggacagagtttacctaatcttttgatttatttggctctcccgctcctttcttttttccttttttgttatgtattatggttattcccatatctttttttttgtaatgagcctatcctct

SEQ ID NO: 17131 - DNA, 3060 bp, Zea Mays
aggaagcaaagttccacgccagtcgctcgcctgccgtgacaagtggcggcacacggtaggccggaaccggagccgaccctgcatagtgcgctctgattgtcgcgtcgctgaatcgatctcccagctcagagaccgactcccagtttcctccttctggcgtgtctgaatgaatgtccaggcagaagcgcaggacggggcagcggcagcgtgagcgacgccaccacccaagcggacggcaataatggacgctaaccactcgccgccggcgcagccggagaggaatcatggcagcttaaactacgacatcgagagcacggacggcacgtggcgcggcgcgggggcgtggcaggagcaggacccatcgtcggaggccctgatgcggtacgacgacgacgggccccgggagccgctgctgcgaaggcgcaccatgaacaccacctcccagattgccatcgtcggcgccaacatctgccccatcgagagcctcgactacgaaattgtggaaaatgaccttttcaagcaggattggcgatcaagaaagaagcagcagatattccagtatattgttctgaaatggtcattagttcttcttattggcctgtgtactggacttgttggcttcttcaataaccttgcagttgaaaacattgctgggttcaagttgttgcttacaagtgatctgatgctcaagcaaaggtacttcacagcatttctggcatatggaggttgcaatctagtcttggcagctgctgctgcagcgatctgcgcttacatagcacctgctgctgctgggtctggtatccctgaagttaaagcataccttaatggagttgatgcttatgctatattagctccaagcacactgtttgtgaagatatttggttcaatacttggagtttcagctggatttgtccttggaaaggaaggtcccatggtacatacaggagcatgcattgccaacttacttggtcaaggggggtcacgcaagtaccatctgacatgtaactggctcagatactttaagaatgatagagataggcgggatttgattacttgtggctctgctgctggagttgcagcagcattccgtgcgcctgttggtggtgtgctctttgctcttgaagaagcagcatcatggtggcgaagtgctctcctgtggagaacattctttacaactgctgttgttgctgttgtactgaggggtctgatccagttctgtcgtagcggaaaatgtggtctttttggtcagggagggttgattatgtttgatcttagctcaaccgtaccgagttacagtacccaggatatcattgcaattattgtccttggaataattggtggggtcttcgggggcctgttcaactttctcttggataggattctccgagcttatagttttatcaacgagagaggtgctccatacaagatccttctcaccgtcacaatatcaatcatcacatcagcatgctcctatgggctaccttggctcgccccatgcactccgtgccctgctgatgctgtggaggaatgccctaccattggccgctctgggaattttaagaactttcagtgcccgccgggctattacaatggtcttgcgtcgttgttcttcaacacaaatgatgacgccatccgcaatctattcagcagtggcaccgagaatgagttccacatgtccactcttttcgtgttcttcactgcgatttactgccttggccttgtgacatacggtattgctgttccatctggtctcttcatccctgttatacttgctggggctacgtacgggcgcatagtggggacccttcttggtccaatttcagaccttgatcctggactattcgcacttcttggcgcggcatctttcctcggtggaacaatgaggatgactgtgtcagtctgcgtgatacttctggagctcaccaatgacctccttatgctcccgttagtcatgctcgttcttctgatatcaaagaccatagccgacagctttaacaaaggggtttatgatcagattgtggtgatgaaaggcttgccattcctggaagctcatgccgaaccatacatgacgcacttggttgctagcgatgttgtgtctgggccactgatctccttttcaggcgtcgagagagtggggaatatcgttcaggcgttgaggatcacaggccacaacggatttccagtggtcgatgagccacctctatcagaggctccagaacttgttgggcttgtgctcagatcccatctgctggtcctgctgaaaggtaagggcttcatgaaagagaagatgaaaaccagcggtagcttcgtgctggaaagatttggtgccttcgattttgccaagccaggctcagggaaaggcctgaagattgaggacctggatttcactgatgaggaaatggacttgtatgtcgatctccatccaattacaaatacatcaccgtacacggtggtagagaccatgtcacttgcgaaggctgccgtccttttccgggcactgggactcaggcacatgctcgttgtgccaaagaccccagggagacctccaattgttggaatcctgacgaggcacgatttcataccggagcatattcatgggctgtttccaaatatacacaagtcacactaatggaacactcaatcagtccatatcttttcttttcttttttgccgtcgccttgtaggttgtagctagctgtacgaaaacgaagctacttttgtccaatatttgctatcggccatctggccttttcttttccattttgtttcttcaggagtactccagaatcatataatcactggataatattgtatttgttcaagagctggttccctggcagaacactccataagtgatatttctgtctttttctcaaatacgcagaagatctacgtatcaatatattatataggaaaacgaccaaattactaccatcacatatggacagagtttacctaatcttttgatttatttggctctcccgctcctttcttttttccttttttgttatgtattatggttattcccatatctttttttttgtaatgagcctatcctct

SEQ ID NO: 17132 - DNA, 3081 bp, Zea Mays
gaagtgtcccgccgctttgcgaccataggaagcaaagttccacgccagtcgctcgcctgccgtgacaagtggcggcacacggtaggccggaaccggagccgaccctgcatagtgcgctctgattgtcgcgtcgctgaatcgatctcccagctcagagaccgactcccagtttcctccttctggcgtgtctgaatgaatggcagaagcgcaggacggggcagcggcagcgtgagcgacgccaccacccaagcggacggcaataatggacgctaaccactcgccgccggcgcagccggagaggaatcatggcagcttaaactacgacatcgagagcacggacggcacgtggcgcggcgcgggggcgtggcaggagcaggacccatcgtcggaggccctgatgcggtacgacgacgacgggccccgggagccgctgctgcgaaggcgcaccatgaacaccacctcccagattgccatcgtcggcgccaacatctgccccatcgagagcctcgactacgaaattgtggaaaatgaccttttcaagcaggattggcgatcaagaaagaagcagcagatattccagtatattgttctgaaatggtcattagttcttcttattggcctgtgtactggacttgttggcttcttcaataaccttgcagttgaaaacattgctgggttcaagttgttgcttacaagtgatctgatgctcaagcaaaggtacttcacagcatttctggcatatggaggttgcaatctagtcttggcagctgctgctgcagcgatctgcgcttacatagcacctgctgctgctgggtctggtatccctgaagttaaagcataccttaatggagttgatgcttatgctatattagctccaagcacactgtttgtgaagatatttggttcaatacttggagtttcagctggatttgtccttggaaaggaaggtcccatggtacatacaggagcatgcattgccaacttacttggtcaaggggggtcacgcaagtaccatctgacatgtaactggctcagatactttaagaatgatagagataggcgggatttgattacttgtggctctgctgctggagttgcagcagcattccgtgcgcctgttggtggtgtgctctttgctcttgaagaagcagcatcatggtggcgaagtgctctcctgtggagaacattctttacaactgctgttgttgctgttgtactgaggggtctgatccagttctgtcgtagcggaaaatgtggtctttttggtcagggagggttgattatgtttgatcttagctcaaccgtaccgagttacagtacccaggatatcattgcaattattgtccttggaataattggtggggtcttcgggggcctgttcaactttctcttggataggattctccgagcttatagttttatcaacgagagaggtgctccatacaagatccttctcaccgtcacaatatcaatcatcacatcagcatgctcctatgggctaccttggctcgccccatgcactccgtgccctgctgatgctgtggaggaatgccctaccattggccgctctgggaattttaagaactttcagtgcccgccgggctattacaatggtcttgcgtcgttgttcttcaacacaaatgatgacgccatccgcaatctattcagcagtggcaccgagaatgagttccacatgtccactcttttcgtgttcttcactgcgatttactgccttggccttgtgacatacggtattgctgttccatctggtctcttcatccctgttatacttgctggggctacgtacgggcgcatagtggggacccttcttggtccaatttcagaccttgatcctggactattcgcacttcttggcgcggcatctttcctcggtggaacaatgaggatgactgtgtcagtctgcgtgatacttctggagctcaccaatgacctccttatgctcccgttagtcatgctcgttcttctgatatcaaagaccatagccgacagctttaacaaaggggtttatgatcagattgtggtgatgaaaggcttgccattcctggaagctcatgccgaaccatacatgacgcacttggttgctagcgatgttgtgtctgggccactgatctccttttcaggcgtcgagagagtggggaatatcgttcaggcgttgaggatcacaggccacaacggatttccagtggtcgatgagccacctctatcagaggctccagaacttgttgggcttgtgctcagatcccatctgctggtcctgctgaaaggtaagggcttcatgaaagagaagatgaaaaccagcggtagcttcgtgctggaaagatttggtgccttcgattttgccaagccaggctcagggaaaggcctgaagattgaggacctggatttcactgatgaggaaatggacttgtatgtcgatctccatccaattacaaatacatcaccgtacacggtggtagagaccatgtcacttgcgaaggctgccgtccttttccgggcactgggactcaggcacatgctcgttgtgccaaagaccccagggagacctccaattgttggaatcctgacgaggcacgatttcataccggagcatattcatgggctgtttccaaatatacacaagtcacactaatggaacactcaatcagtccatatcttttcttttcttttttgccgtcgccttgtaggttgtagctagctgtacgaaaacgaagctacttttgtccaatatttgctatcggccatctggccttttcttttccattttgtttcttcaggagtactccagaatcatataatcactggataatattgtatttgttcaagagctggttccctggcagaacactccataagtgatatttctgtctttttctcaaatacgcagaagatctacgtatcaatatattatataggaaaacgaccaaattactaccatcacatatggacagagtttacctaatcttttgatttatttggctctcccgctcctttcttttttccttttttgttatgtattatggttattcccatatctttttttttgtaatgagcctatcctct

SEQ ID NO: 17133 - DNA, 3198 bp, Zea Mays
cctcgcacgcccacatcctctcttcttttctccccctcccgcttccttgtttcccctcgttctatttggattggaagcttctccgcggccaaggtcacgcacacccacccacctggacctggtgcccgccgtgtaggcctctcggccttcgtcgtcctccagccccaggcggaacacgaggcggcggacgtacgggctcgacggaggcgagctgccggccgagcgaccaggaagacgcattcagaagaggacatcgatcgatcgcggagagttccccgggtagctgacgacgatccatgcttgtggcggccggatcagttcgcccgtccaaccgggattgctaggcagaagcgcaggacggggcagcggcagcgtgagcgacgccaccacccaagcggacggcaataatggacgctaaccactcgccgccggcgcagccggagaggaatcatggcagcttaaactacgacatcgagagcacggacggcacgtggcgcggcgcgggggcgtggcaggagcaggacccatcgtcggaggccctgatgcggtacgacgacgacgggccccgggagccgctgctgcgaaggcgcaccatgaacaccacctcccagattgccatcgtcggcgccaacatctgccccatcgagagcctcgactacgagattggcgatcaagaaagaagcagcagatattccagtatattgttctgaaatggtcattagttcttcttattggcctgtgtactggacttgttggcttcttcaataaccttgcagttgaaaacattgctgggttcaagttgttgcttacaagtgatctgatgctcaagcaaaggtacttcacagcatttctggcatatggaggttgcaatctagtcttggcagctgctgctgcagcgatctgcgcttacatagcacctgctgctgctgggtctggtatccctgaagttaaagcataccttaatggagttgatgcttatgctatattagctccaagcacactgtttgtgaagatatttggttcaatacttggagtttcagctggatttgtccttggaaaggaaggtcccatggtacatacaggagcatgcattgccaacttacttggtcaaggggggtcacgcaagtaccatctgacatgtaactggctcagatactttaagaatgatagagataggcgggatttgattacttgtggctctgctgctggagttgcagcagcattccgtgcgcctgttggtggtgtgctctttgctcttgaagaagcagcatcatggtggcgaagtgctctcctgtggagaacattctttacaactgctgttgttgctgttgtactgaggggtctgatccagttctgtcgtagcggaaaatgtggtctttttggtcagggagggttgattatgtttgatcttagctcaaccgtaccgagttacagtacccaggatatcattgcaattattgtccttggaataattggtggggtcttcgggggcctgttcaactttctcttggataggattctccgagcttatagttttatcaacgagagaggtgctccatacaagatccttctcaccgtcacaatatcaatcatcacatcagcatgctcctatgggctaccttggctcgccccatgcactccgtgccctgctgatgctgtggaggaatgccctaccattggccgctctgggaattttaagaactttcagtgcccgccgggctattacaatggtcttgcgtcgttgttcttcaacacaaatgatgacgccatccgcaatctattcagcagtggcaccgagaatgagttccacatgtccactcttttcgtgttcttcactgcgatttactgccttggccttgtgacatacggtattgctgttccatctggtctcttcatccctgttatacttgctggggctacgtacgggcgcatagtggggacccttcttggtccaatttcagaccttgatcctggactattcgcacttcttggcgcggcatctttcctcggtggaacaatgaggatgactgtgtcagtctgcgtgatacttctggagctcaccaatgacctccttatgctcccgttagtcatgctcgttcttctgatatcaaagaccatagccgacagctttaacaaaggggtttatgatcagattgtggtgatgaaaggcttgccattcctggaagctcatgccgaaccatacatgacgcacttggttgctagcgatgttgtgtctgggccactgatctccttttcaggcgtcgagagagtggggaatatcgttcaggcgttgaggatcacaggccacaacggatttccagtggtcgatgagccacctctatcagaggctccagaacttgttgggcttgtgctcagatcccatctgctggtcctgctgaaaggtaagggcttcatgaaagagaagatgaaaaccagcggtagcttcgtgctggaaagatttggtgccttcgattttgccaagccaggctcagggaaaggcctgaagattgaggacctggatttcactgatgaggaaatggacttgtatgtcgatctccatccaattacaaatacatcaccgtacacggtggtagagaccatgtcacttgcgaaggctgccgtccttttccgggcactgggactcaggcacatgctcgttgtgccaaagaccccagggagacctccaattgttggaatcctgacgaggcacgatttcataccggagcatattcatgggctgtttccaaatatacacaagtcacactaatggaacactcaatcagtccatatcttttcttttcttttttgccgtcgccttgtaggttgtagctagctgtacgaaaacgaagctacttttgtccaatatttgctatcggccatctggccttttcttttccattttgtttcttcaggagtactccagaatcatataatcactggataatattgtatttgttcaagagctggttccctggcagaacactccataagtgatatttctgtctttttctcaaatacgcagaagatctacgtatcaatatattatataggaaaacgaccaaattactaccatcacatatggacagagtttacctaatcttttgatttatttggctctcccgctcctttcttttttccttttttgttatgtattatggttattcccatatctttttttttgtaatgagcctatcctct

SEQ ID NO: 17134 - DNA, 1517 bp, Zea Mays
gtctccttttccgttcgacttccatcgagccttacgagtggagaagaacacaaaccaatcccagtggccacacgagatagtgcacccacgcgacacgcgccctatcgttgatagccgacacgccggcgccgtgggactcgctagcgcgccgttggcatcccgctggcctgcctcagcgctccggtttcctctcgtagtattccgttcagtttctaggatgtgagagcagcttttgcgttgatgataaaagtgaggatgcttggttatctggatttgtggtgctttatgtgatgcacgtgatcacatatttcaccaacatcattggtgtagtaaccattgctctggtctccatagtatccatcttgggcctaatatgcctctgctgcttagtgtacttccaactgtggatcagaagaagaggctaccggtggcttagctacttcaacgagtcatggctgactcgaataacattgatgctcgttgcattttggtggggtattggcgaggtactcaggctcacctttgtgaacggggaggggaggctgatctctgaccgggcatggcaagagaacgtgtgcaaattctacatcatttcaaatatgggatttgcagaaccagggctgttcctcttgctctctttcctcagcgtagctttgcagaagcaagagcttggtacctagaataggaaatggaaccagaagaccatatgcgcagtattcatcctctgctcgccttgtttgatctgggaagcttgtgttgtttttgttggtggtcttgttgccttagatgacggtcagcgatcaaaggtttcgaagtactggtattctgcctctgcaatccacaacggcgagattacatgcacgtatccattgttgagcagcacatttcttggagcattctacatcgttttgattgtctacgtcatgtttgtcggacatcagatgctatctttggtgatcaacaagggactccgatgaaggatatatgctcatctttgccaccaaaatattactttcccgagcgatacttctcgggttatctgttcttccttggcctggtgaagtagaacatgaggttcttgtgtttgtttccttccttgtgttgatgcttgctgccatggtcggtatcgttattctggtttattttctagacgctgacactttttccattggtgaccaagagcacattgagatgcaaacaagttgtgacatgatcttatgatagcccaacttttgacttgatgttctgctttttgttcaagggctaactgagggggattcccatgctacttcccctggctctagccatattttagtcttgcaactctggttgtgactttgtctccaaagttttgtgaatatagaacagattgaagtagggataacattctcgtgtttactttttcctctccatcttagctcatgtggcatgagaagtcctataaaatagttccttagatagtgaactttactttgtacattgaggcaaagcttttagtatcaaccttttggatgagc

SEQ ID NO: 17135 - DNA, 635 bp, Zea Mays
ccactaggttggatatgacacatatgtttccaagggaaggtgcctcatctagctcaacctcaatgagcagccagaggagtgaaactcatgatgataggatgattgcaatggttctctccgaagaatatgccaagttagatggtgctatggccaagcatcttattaatttaacatcaattcctcatgttccccgtattaacacatagtttccaacatatagtgatgccactatggaccattatcgcctccttgataggctaaatgcatacggcttgtttgaggtgagagtatctggtgatggaaattgtcagctcaagaaatgtaacaccttatatgaaggttatgttccaatgaaatataaaaaatattgcaagaaaatgaagaagtctggtgaatggggtgaccatgtcacgctacaagcagctgctgacaagtttgctgcaaagatatgtctcctaacatcattcagagatacatgttttgttgaaattgttccgcaatatcaagctccacagagagagatttggctgagtttctggtctgaaattcactataactcactgtacgatgctcgagtacagcagttgtggtacaacctgccaagtggtggaaaccctgagtggctgagtgactga

SEQ ID NO: 17136 - DNA, 470 bp, Zea Mays
ggtacatacaacaagtagcatccctacacatcatggatccctataacgataaacgatgctccataaatcatgaagcagatgcccccgccacctaaggatttggagattgctatagttcggagctcgagctgcccttcgatcgaaccaagaataaccctgctgccctcacaacatcaaagtttggtatcagcaagatggagcttctcaaggcatgcttttgtagggagtgactgctgatgaagaggaactcatggatgaagatcattgatccctttcatgtcatggtctattcaaaaggaaaatccacttctgagattaacagttgagaactgtgagttgtccagtattggtgtgattatacttctggactgcctcacaaatgcgaagcaactccttgatgtgttatctattgcagacaatcatctagggagtcctgtggcagctgcattggccagattcttgggttcaca

SEQ ID NO: 17137 - DNA, 610 bp, Zea Mays
atgcttacttccatcctaatgttgaaagatggatggagaagctggaagaatctgagactaaggttggctttctatggtatgaacatatatacaagctagacaaagaagccccgtgcaggtcggctcaggcttcttatgtttcagattctcctgcaaccatttggtgttgtttttggctgagttagaagctccgtccaggataaacgatgctccataaatcatgaagcagatgcccccgccacctaaggatttggagattgctatagttcggagctcgagctgcccttcgatcgaaccaagaataaccctgctgccctcacaacatcaaagtttggtatcagcaagatggagcttctcaaggcatgcttttgtagggagtgactgctgatgaagaggaactcatggatgaagatcattgatccctttcatgtcatggtctattcaaaaggaaaatccacttctgagattaacagttgagaactgtgagttgtccagtattggtgtgattatacttctggactgcctcacaaatgcgaagcaactccttgatgtgttatctattgcagacaatcatctagggagctgcattggccagattcttgggttcaca

SEQ ID NO: 17138 - DNA, 662 bp, Zea Mays
aatgatttatgcttacttccatcctaatgttgaaagatggatggagaagctggaagaatctgagactaaggttggctttctatggtatgaacatatatacaagctagacaaaggtacatacaacaagtagcatccctacacatcatggatccctataacgtcggctcaggcttcttatgtttcagattctcctgcaaccatttggtgttgtttttggctgagttagaagctccgtccaggataaacgatgctccataaatcatgaagcagatgcccccgccacctaaggatttggagattgctatagttcggagctcgagctgcccttcgatcgaaccaagaataaccctgctgccctcacaacatcaaagtttggtatcagcaagatggagcttctcaaggcatgcttttgtagggagtgactgctgatgaagaggaactcatggatgaagatcattgatccctttcatgtcatggtctattcaaaaggaaaatccacttctgagattaacagttgagaactgtgagttgtccagtattggtgtgattatacttctggactgcctcacaaatgcgaagcaactccttgatgtgttatctattgcagacaatcatctagggagtcctgtggcagctgcattggccagattcttgggttcaca

SEQ ID NO: 17139 - DNA, 680 bp, Zea Mays
attggaatgatttatgcttacttccatcctaatgttgaaagatggatggagaagctggaagaatctgagactaaggttggctttctatggtatgaacatatatacaagctagacaaaggtacatacaacaagtagcatccctacacatcatggatccctataacaagccccgtgcaggtcggctcaggcttcttatgtttcagattctcctgcaaccatttggtgttgtttttggctgagttagaagctccgtccaggataaacgatgctccataaatcatgaagcagatgcccccgccacctaaggatttggagattgctatagttcggagctcgagctgcccttcgatcgaaccaagaataaccctgctgccctcacaacatcaaagtttggtatcagcaagatggagcttctcaaggcatgcttttgtagggagtgactgctgatgaagaggaactcatggatgaagatcattgatccctttcatgtcatggtctattcaaaaggaaaatccacttctgagattaacagttgagaactgtgagttgtccagtattggtgtgattatacttctggactgcctcacaaatgcgaagcaactccttgatgtgttatctattgcagacaatcatctagggagtcctgtggcagctgcattggccagattcttgggttcaca

SEQ ID NO: 17140 - DNA, 674 bp, Zea Mays
cctgcgtttatcacgtcagattggtcatggtacgctagctgaaaaatcgtgcgaagcgaagggtgtggatcaaaacaacccacaatacgatgtcagccgatgagcccgaagatggatggactaagcagatgtcagaacgaaagctgatcatcaagtggccttcatctaacaacactaacctagtgttatcccaggcaagccccggtgcatttgccacccccttgttataaaacttttatcacttatatgttgcattaggtgataggagttgtgtgaataaacaattgatgcattatcattccttggaatttgattactattccttgattcctgtttataaaagagaactaaagatgcttagtcctgcttagataattaaaagttgtttttttaaaaaagatgatgtgttacacgggatatgggaaattgttgtgaaaaagaaattgggatggtgaatccatatggccatgatggattcaacatccagaaaaagtacctctgtaaggtaccaaggattgggaaatggtttaactaaaatgagaccagacgttgagcaggaaaggtcgcccgtctgtgtcgcttaaggaccgttccgattgttggcctgctgatctagaaccctttaactggccacatgcctcatcatgggtaagcttagcctcggtcggaccaat

SEQ ID NO: 17141 - DNA, 1193 bp, Zea Mays
ctaatttcaagagcctatatttattcatatacttttaaaagaaagagaaaagtctgaattttcttctctatccttatctctatgctatttcctctcttatttggattacgttcaatactctggaaaggctcatctccttgtacgtctctccatcgtgatctctagaatctgccagcgatgtctctcgcttatcctctccacacactcatctctccctcacggtgccctccctccattttctgccgccgctgctgctttgctttccatggcggcgacctccctttctgctgcaaggaagtttttccctgccctggtgctcgtggctgctatttctctggccatgtcgagccctctcccttggatgccagcgcccccttcctgttgcggccaacaccccaaccctagcgcttggcttccatcccagccgcaccctgctcggcttctccggtgccggccgccgttccaagtcgtcgttccagccgacctcattactcgttgctcctgatggctgattggaccttgtaatgttgcgacaacgacacgcaatggtacgctagctgaaaaatcgtgcgaagcgaagggtgtggatcaaaacaacccacaatacgatgtcagccgatgagcccgaagatggatggactaagcagatgtcagaacgaaagctgatcatcaagtggccttcatctaacaacactaacctagtgttatcccaggcaagccccggtgcatttgccacccccttgttataaaacttttatcacttatatgttgcattaggtgataggagttgtgtgaataaacaattgatgcattatcattccttggaatttgattactattccttgattcctgtttataaaagagaactaaagatgcttagtcctgcttagataattaaaagttgtttttttaaaaaagatgatgtgttacacgggatatgggaaattgttgtgaaaaagaaattgggatggtgaatccatatggccatgatggattcaacatccagaaaaagtacctctgtaaggtaccaaggattgggaaatggtttaactaaaatgagaccagacgttgagcaggaaaggtcgcccgtctgtgtcgcttaaggaccgttccgattgttggcctgctgatctagaaccctttaactggccacatgcctcatcatgggtaagcttagcctcggtcggaccaat

SEQ ID NO: 17142 - DNA, 1216 bp, Zea Mays
tcatagaagatctcaggaaacaggatttgaatgtactatcacaatagcagaaataccagctgaacacaaatggtggtttccatcttgcacaaaatgcaataaagcaacaatccctcacactacaggttatcactgtgaatcatgcaattgggatggatacaaatttaaatacaagctcaaattcctggcatctgatgaaacagatattgcagaaatgttttgttttgacactgtagcaaggcacatcgttggtaaatcctgtgagattgttttacgaagtgtcactgaacagtctcctatcccacctgatctagcacaaatcatatctctgaaatttacattcagagtcacaattgacaatcaatctcttttccaacaaaccagttgcccaaacgtgttccgcattaattctattgttgctgcacatgggagacaacgttctttaccaatgcaaataggaatttctgatcaacaaggaccatcaacacctcaaaacaaatcaaaaccgatgttattggaagactctccatctacaactttggaaaaattatctactacaactcctacaactgtagtaaggaagcttctatattccgaaactgacaacacgccgaaaacgcactcaatttcttttactcaattatcttttattcattttaagatttatgcaaacaagagtaatatcaatagcccagaaaaagatgatggcgataaggaaaccgcacagaacttcgatatatgcagcttgatacaatacccactaacaaaggaaaaggaccagcagatacaattgaatcgccacctaaaaggttcaaacaagggacgatacgcatcggaaaagaaatggacatcaaatcctccgagaactaaagtttcactcagatcttcgtcgaccttttgagttgcacaatgtctattttgcaacatatgtataattatatatgatgacctactcagctctttgaaaacaatttatgtaaatataacagcctaattctacgtagtggacaaaaatgttgactctgattacagctaaggtaactctatttcatataaacatataacatctgcagtaatcaaattagaaaaaatttctaacgcgcgcagggcacgcgccagtgactagtgtataagtattccctctattctaaatttaagttattttggctctctagatacaaaactcttatcggacatttaggtatacatctaggta

SEQ ID NO: 17143 - DNA, 1036 bp, Zea Mays
ccattatcatagaagatctcaggaaacaggatttgaatgtactatcacaatagcagaaataccagctgaacacaaatggtggtttccatcttgcacaaaatgcaataaagcaacaatccctcacactacaggttatcactgtgaatcatgcaattgggatggatacaaatttaattgcccaaacgtgttccgcattaattctattgttgctgcacatgggagacaacgttctttaccaatgcaaataggaatttctgatcaacaaggaccatcaacacctcaaaacaaatcaaaaccgatgttattggaagactctccatctacaactttggaaaaattatctactacaactcctacaactgtagtaaggaagcttctatattccgaaactgacaacacgccgaaaacgcactcaatttcttttactcaattatcttttattcattttaagatttagtgagtattgacagttaaaaatacttatatttgttccatgttgacagtgcaaacaagagtaatatcaatagcccagaaaaagatgatggcgataaggaaaccgcacagcttgatacaatacccactaacaaaggaaaaggaccagcagatacaattgaatcgccacctaaaaggttcaaacaagggacgatacgcatcggaaaagaaatggacatcaaatcctccgagaactaaagtttcactcagatcttcgtcgaccttttgagttgcacaatgtctattttgcaacatatgtataattatatatgatgacctactcagctctttgaaaacaatttatgtaaatataacagcctaattctacgtagtggacaaaaatgttgactctgattacagctaaggtaactctatttcatataaacatataacatctgcagtaatcaaattagaaaaaatttctaacgcgcgcagggcacgcgccagtgactagtgtataagtattccctctattctaaatttaagttattttggctctctagatacaaaactcttatcggacatttaggtatacatctaggta

SEQ ID NO: 17144 - DNA, 906 bp, Zea Mays
ctaacaccaacagtgacaaggaccattatcatagaagatctcagttgcccaaacgtgttccgcattaattctattgttgctgcacatgggagacaacgttctttaccaatgcaaataggaatttctgatcaacaaggaccatcaacacctcaaaacaaatcaaaaccgatgttattggaagactctccatctacaactttggaaaaattatctactacaactcctacaactgtagtaaggaagcttctatattccgaaactgacaacacgccgaaaacgcactcaatttcttttactcaattatcttttattcattttaagatttagtgagtattgacagttaaaaatacttatatttgttccatgttgacagtgcaaacaagagtaatatcaatagcccagaaaaagatgatggcgataaggaaaccgcacagcttgatacaatacccactaacaaaggaaaaggaccagcagatacaattgaatcgccacctaaaaggttcaaacaagggacgatacgcatcggaaaagaaatggacatcaaatcctccgagaactaaagtttcactcagatcttcgtcgaccttttgagttgcacaatgtctattttgcaacatatgtataattatatatgatgacctactcagctctttgaaaacaatttatgtaaatataacagcctaattctacgtagtggacaaaaatgttgactctgattacagctaaggtaactctatttcatataaacatataacatctgcagtaatcaaattagaaaaaatttctaacgcgcgcagggcacgcgccagtgactagtgtataagtattccctctattctaaatttaagttattttggctctctagatacaaaactcttatcggacatttaggtatacatctaggta

SEQ ID NO: 17145 - DNA, 597 bp, Zea Mays
caactaacaccaacagtgacaaggaccattatcatagaagatctcagtgcaaacaagagtaatatcaatagcccagaaaaagatgatggcgataaggaaaccgcacagaacttcgatatatgcagcttgatacaatacccactaacaaaggaaaaggaccagcagatacaattgaatcgccacctaaaaggttcaaacaagggacgatacgcatcggaaaagaaatggacatcaaatcctccgagaactaaagtttcactcagatcttcgtcgaccttttgagttgcacaatgtctattttgcaacatatgtataattatatatgatgacctactcagctctttgaaaacaatttatgtaaatataacagcctaattctacgtagtggacaaaaatgttgactctgattacagctaaggtaactctatttcatataaacatataacatctgcagtaatcaaattagaaaaaatttctaacgcgcgcagggcacgcgccagtgactagtgtataagtattccctctattctaaatttaagttattttggctctctagatacaaaactcttatcggacatttaggtatacatctaggta

SEQ ID NO: 17146 - DNA, 1106 bp, Zea Mays
ctgtgcatgtccgaagtcaactaacaccaacagtgacaaggaccattatcatagaagatctcagcgacaaaacaatgaagatcactttatgggcagattaggcgataatgttcaatcttcatgacgtgtacgatgcaaatacaaataaaccgattcttgtgctattcgtcgggtgcttaccaaaatttttcaaaggtgtctacctaagtggtggtcctgcctgtagatggtacttcaatccaacaattccagaggcagaaccttatcttaccagccagtctacaaaaagaattgtgttacagcttccccaaaatttacaacatcctccagcgatggaaacgaagccaattgtcgaacataaatccctctatgaacttcttacagttaacccatatgatttcccggaaacaggatttgaatgtactatcacaatagcagaaataccagctgaacacaaatggtggtttccatcttgcacaaaatgcaataaagcaacaatccctcacactacaggttatcactgtgaatcatgcaattgggatggatacaaatttaatgcaaacaagagtaatatcaatagcccagaaaaagatgatggcgataaggaaaccgcacagaacttcgatatatgcagcttgatacaatacccactaacaaaggaaaaggaccagcagatacaattgaatcgccacctaaaaggttcaaacaagggacgatacgcatcggaaaagaaatggacatcaaatcctccgagaactaaagtttcactcagatcttcgtcgaccttttgagttgcacaatgtctattttgcaacatatgtataattatatatgatgacctactcagctctttgaaaacaatttatgtaaatataacagcctaattctacgtagtggacaaaaatgttgactctgattacagctaaggtaactctatttcatataaacatataacatctgcagtaatcaaattagaaaaaatttctaacgcgcgcagggcacgcgccagtgactagtgtataagtattccctctattctaaatttaagttattttggctctctagatacaaaactcttatcggacatttaggtatacatctaggta

SEQ ID NO: 17147 - DNA, 1468 bp, Zea Mays
cacctgtgcatgtccgaagtcaactaacaccaacagtgacaaggaccattatcatagaagatctcagattaggcgataatgttcaatcttcatgacgtgtacgatgcaaatacaaataaaccgattcttgtgctattcgtcgggtgcttaccaaaatttttcaaaggtgtctacctaagtggtggtcctgcctgtagatggtacttcaatccaacaattccagaggcagaaccttatcttaccagtctacaaaaagaattgtgttacagcttccccaaaatttacaacatcctccagcgatggaaacgaagccaattgtcgaacataaatccctctatgaacttcttacagttaacccatatgatttcccggaaacaggatttgaatgtactatcacaatagcagaaataccagctgaacacaaatggtggtttccatcttgcacaaaatgcaataaagcaacaatccctcacactacaggttatcactgtgaatcatgcaattgggatggatacaaatttaaatacaagctcaaattcctggcatctgatgaaacagatattgcagaaatgttttgttttgacactgtagcaaggcacatcgttgttgcccaaacgtgttccgcattaattctattgttgctgcacatgggagacaacgttctttaccaatgcaaataggaatttctgatcaacaaggaccatcaacacctcaaaacaaatcaaaaccgatgttattggaagactctccatctacaactttggaaaaattatctactacaactcctacaactgtagtaaggaagcttctatattccgaaactgacaacacgccgaaaacgcactcaatttcttttactcaattatcttttattcattttaagatttagtgagtattgacagttaaaaatacttatatttgttccatgttgacagtgcaaacaagagtaatatcaatagcccagaaaaagatgatggcgataaggaaaccgcacagcttgatacaatacccactaacaaaggaaaaggaccagcagatacaattgaatcgccacctaaaaggttcaaacaagggacgatacgcatcggaaaagaaatggacatcaaatcctccgagaactaaagtttcactcagatcttcgtcgaccttttgagttgcacaatgtctattttgcaacatatgtataattatatatgatgacctactcagctctttgaaaacaatttatgtaaatataacagcctaattctacgtagtggacaaaaatgttgactctgattacagctaaggtaactctatttcatataaacatataacatctgcagtaatcaaattagaaaaaatttctaacgcgcgcagggcacgcgccagtgactagtgtataagtattccctctattctaaatttaagttattttggctctctagatacaaaactcttatcggacatttaggtatacatctaggta

SEQ ID NO: 17148 - DNA, 1300 bp, Zea Mays
catgaactgacacctgtgcatgtccgaagtcaactaacaccaacagtgacaaggaccattatcatagaagatctcaggtgtctacctaagtggtggtcctgcctgtagatggtacttcaatccaacaattccagaggcagaaccttatcttaccagccagtctacaaaaagaattgtgttacagcttccccaaaatttacaacatcctccagcgatggaaacgaagccaattgtcgaacataaatccctctatgaacttcttacagttaacccatatgatttcccggaaacaggatttgaatgtactatcacaatagcagaaataccagctgaacacaaatggtggtttccatcttgcacaaaatgcaataaagcaacaatccctcacactacaggttatcactgtgaatcatgcaattgggatggatacaaatttaattgcccaaacgtgttccgcattaattctattgttgctgcacatgggagacaacgttctttaccaatgcaaataggaatttctgatcaacaaggaccatcaacacctcaaaacaaatcaaaaccgatgttattggaagactctccatctacaactttggaaaaattatctactacaactcctacaactgtagtaaggaagcttctatattccgaaactgacaacacgccgaaaacgcactcaatttcttttactcaattatcttttattcattttaagatttagtgagtattgacagttaaaaatacttatatttgttccatgttgacagtgcaaacaagagtaatatcaatagcccagaaaaagatgatggcgataaggaaaccgcacagcttgatacaatacccactaacaaaggaaaaggaccagcagatacaattgaatcgccacctaaaaggttcaaacaagggacgatacgcatcggaaaagaaatggacatcaaatcctccgagaactaaagtttcactcagatcttcgtcgaccttttgagttgcacaatgtctattttgcaacatatgtataattatatatgatgacctactcagctctttgaaaacaatttatgtaaatataacagcctaattctacgtagtggacaaaaatgttgactctgattacagctaaggtaactctatttcatataaacatataacatctgcagtaatcaaattagaaaaaatttctaacgcgcgcagggcacgcgccagtgactagtgtataagtattccctctattctaaatttaagttattttggctctctagatacaaaactcttatcggacatttaggtatacatctaggta

SEQ ID NO: 17149 - DNA, 1234 bp, Zea Mays
ctgaaattcatgaactgacacctgtgcatgtccgaagtcaactaacaccaacagtgacaaggaccattatcatagaagatctcaggtgtctacctaagtggtggtcctgcctgtagatggtacttcaatccaacaattccagaggcagaaccttatcttaccagccagtctacaaaaagaattgtgttacagcttccccaaaatttacaacatcctccagcgatggaaacgaagccaattgtcgaacataaatccctctatgaacttcttacagttaacccatatgatttcccggaaacaggatttgaatgtactatcacaatagcagaaataccagctgaacacaaatggtggtttccatcttgcacaaaatgcaataaagcaacaatccctcacactacaggttatcactgtgaatcatgcaattgggatggatacaaatttaagaatttctgatcaacaaggaccatcaacacctcaaaacaaatcaaaaccgatgttattggaagactctccatctacaactttggaaaaattatctactacaactcctacaactgtagtaaggaagcttctatattccgaaactgacaacacgccgaaaacgcactcaatttcttttactcaattatcttttattcattttaagatttagtgagtattgacagttaaaaatacttatatttgttccatgttgacagtgcaaacaagagtaatatcaatagcccagaaaaagatgatggcgataaggaaaccgcacagcttgatacaatacccactaacaaaggaaaaggaccagcagatacaattgaatcgccacctaaaaggttcaaacaagggacgatacgcatcggaaaagaaatggacatcaaatcctccgagaactaaagtttcactcagatcttcgtcgaccttttgagttgcacaatgtctattttgcaacatatgtataattatatatgatgacctactcagctctttgaaaacaatttatgtaaatataacagcctaattctacgtagtggacaaaaatgttgactctgattacagctaaggtaactctatttcatataaacatataacatctgcagtaatcaaattagaaaaaatttctaacgcgcgcagggcacgcgccagtgactagtgtataagtattccctctattctaaatttaagttattttggctctctagatacaaaactcttatcggacatttaggtatacatctaggta

SEQ ID NO: 17150 - DNA, 1497 bp, Zea Mays
gtcataactgaaattcatgaactgacacctgtgcatgtccgaagtcaactaacaccaacagtgacaaggaccattatcatagaagatctcagattaggcgataatgttcaatcttcatgacgtgtacgatgcaaatacaaataaaccgattcttgtgctattcgtcgggtgcttaccaaaatttttcaaaggtgtctacctaagtggtggtcctgcctgtagatggtacttcaatccaacaattccagaggcagaaccttatcttaccagccagtctacaaaaagaattgtgttacagcttccccaaaatttacaacatcctccagcgatggaaacgaagccaattgtcgaacataaatccctctatgaacttcttacagttaacccatatgatttcccggaaacaggatttgaatgtactatcacaatagcagaaataccagctgaacacaaatggtggtttccatcttgcacaaaatgcaataaagcaacaatccctcacactacaggttatcactgtgaatcatgcaattgggatggatacaaatttaaatacaagctcaaattcctggcatctgatgaaacagatattgcagaaatgttttgttttgacactgtagcaaggcacatcgttgttgcccaaacgtgttccgcattaattctattgttgctgcacatgggagacaacgttctttaccaatgcaaataggaatttctgatcaacaaggaccatcaacacctcaaaacaaatcaaaaccgatgttattggaagactctccatctacaactttggaaaaattatctactacaactcctacaactgtagtaaggaagcttctatattccgaaactgacaacacgccgaaaacgcactcaatttcttttactcaattatcttttattcattttaagatttagtgagtattgacagttaaaaatacttatatttgttccatgttgacagtgcaaacaagagtaatatcaatagcccagaaaaagatgatggcgataaggaaaccgcacagcttgatacaatacccactaacaaaggaaaaggaccagcagatacaattgaatcgccacctaaaaggttcaaacaagggacgatacgcatcggaaaagaaatggacatcaaatcctccgagaactaaagtttcactcagatcttcgtcgaccttttgagttgcacaatgtctattttgcaacatatgtataattatatatgatgacctactcagctctttgaaaacaatttatgtaaatataacagcctaattctacgtagtggacaaaaatgttgactctgattacagctaaggtaactctatttcatataaacatataacatctgcagtaatcaaattagaaaaaatttctaacgcgcgcagggcacgcgccagtgactagtgtataagtattccctctattctaaatttaagttattttggctctctagatacaaaactcttatcggacatttaggtatacatctaggta

SEQ ID NO: 17151 - DNA, 1120 bp, Zea Mays
ggtgtcataactgaaattcatgaactgacacctgtgcatgtccgaagtcaactaacaccaacagtgacaaggaccattatcatagaagatctcagcgacaaaacaatgaagatcactttatgggcagattaggcgataatgttcaatcttcatgacgtgtacgatgcaaatacaaataaaccgattcttgtgctattcgtcgggtgcttaccaaaatttttcaaaggtgtctacctaagtggtggtcctgcctgtagatggtacttcaatccaacaattccagaggcagaaccttatcttaccagccagtctacaaaaagaattgtgttacagcttccccaaaatttacaacatcctccagcgatggaaacgaagccaattgtcgaacataaatccctctatgaacttcttacagttaacccatatgatttcccggaaacaggatttgaatgtactatcacaatagcagaaataccagctgaacacaaatggtggtttccatcttgcacaaaatgcaataaagcaacaatccctcacactacaggttatcactgtgaatcatgcaattgggatggatacaaatttaatgcaaacaagagtaatatcaatagcccagaaaaagatgatggcgataaggaaaccgcacagcttgatacaatacccactaacaaaggaaaaggaccagcagatacaattgaatcgccacctaaaaggttcaaacaagggacgatacgcatcggaaaagaaatggacatcaaatcctccgagaactaaagtttcactcagatcttcgtcgaccttttgagttgcacaatgtctattttgcaacatatgtataattatatatgatgacctactcagctctttgaaaacaatttatgtaaatataacagcctaattctacgtagtggacaaaaatgttgactctgattacagctaaggtaactctatttcatataaacatataacatctgcagtaatcaaattagaaaaaatttctaacgcgcgcagggcacgcgccagtgactagtgtataagtattccctctattctaaatttaagttattttggctctctagatacaaaactcttatcggacatttaggtatacatctaggta

SEQ ID NO: 17152 - DNA, 1454 bp, Zea Mays
ggtgtcataactgaaattcatgaactgacacctgtgcatgtccgaagtcaactaacaccaacagtgacaaggaccattatcatagaagatctcagcgacaaaacaatgaagatcactttatgggcagattaggcgataatgttcaatcttcatgacgtgtacgatgcaaatacaaataaaccgattcttgtgctattcgtcgggtgcttaccaaaatttttcaaaggtgtctacctaagtggtggtcctgcctgtagatggtacttcaatccaacaattccagaggcagaaccttatcttaccagccagtctacaaaaagaattgtgttacagcttccccaaaatttacaacatcctccagcgatggaaacgaagccaattgtcgaacataaatccctctatgaacttcttacagttaacccatatgatttcccggaaacaggatttgaatgtactatcacaatagcagaaataccagctgaacacaaatggtggtttccatcttgcacaaaatgcaataaagcaacaatccctcacactacagatattgcagaaatgttttgttttgacactgtagcaaggcacatcgttgttgcccaaacgtgttccgcattaattctattgttgctgcacatgggagacaacgttctttaccaatgcaaataggaatttctgatcaacaaggaccatcaacacctcaaaacaaatcaaaaccgatgttattggaagactctccatctacaactttggaaaaattatctactacaactcctacaactgtagtaaggaagcttctatattccgaaactgacaacacgccgaaaacgcactcaatttcttttactcaattatcttttattcattttaagatttagtgagtattgacagttaaaaatacttatatttgttccatgttgacagtgcaaacaagagtaatatcaatagcccagaaaaagatgatggcgataaggaaaccgcacagcttgatacaatacccactaacaaaggaaaaggaccagcagatacaattgaatcgccacctaaaaggttcaaacaagggacgatacgcatcggaaaagaaatggacatcaaatcctccgagaactaaagtttcactcagatcttcgtcgaccttttgagttgcacaatgtctattttgcaacatatgtataattatatatgatgacctactcagctctttgaaaacaatttatgtaaatataacagcctaattctacgtagtggacaaaaatgttgactctgattacagctaaggtaactctatttcatataaacatataacatctgcagtaatcaaattagaaaaaatttctaacgcgcgcagggcacgcgccagtgactagtgtataagtattccctctattctaaatttaagttattttggctctctagatacaaaactcttatcggacatttaggtatacatctaggta

SEQ ID NO: 17153 - DNA, 2434 bp, Zea Mays
atatcggtcagtttgccatcagaacaaggagaaaaaaaggttccggtcttcatcccttccatttccaaaggacgacgctctcaccattcacgaacggcgactgcggatcgatcgtgcgtcgtctcctgcgccggcctctcttcaagtcagcgcgcggtgtcctgtgttggacgcgctcccacgacaacgcctaccccctccccctgcgcccaacggagccatcagtttcagatagtgtctttagtgccatggcgccgctacgccagggagcaagtcggtccgccatggctgggtggggcatataccacagactgaagcataaaccaacgcaaatccaatgattgtaaaacagcagtttcgatggttcccaagcagcccacagattctattgattgtgggtgtctttcagcatctgagggtttctaccagtccaggttacacacaagcttcaaattatcgcaaaattcctcttacatatctacatctcataccggaccaggtctcataccggaccagtttgcttggacttattacgaaacttcttttactcagctggagcttccatcaaaacataaaaatggaatacactttattacctgatttagcaccgcataagatacatgcaaagattcaagtacatgtatctagaaagtggcttttccgaggtgctactgatagtggaccactacaacatgttgatatggttttgtctgatcgagagggtaatgctatttatgctgaaatccctggaaatttagctgaacaaaaagcaacaaatattgaagaaggaggagtttatgatatcaacagattcagagtgtgcgcagcaaaaactgttttcaaaatagtggatggggacaaaatgatccaattcacatttcataccatagtaaaatgtgccacaagccctccaacaacatttccattatatgtttatcggctaacatcatttgatctaattgagcctcatgttcaaactacaaataactttgttggtgtctacctaagtggtggtcctgcctgtagatggtacttcaatccaacaattccagaggcagaaccttatcttaccagccagtctacaaaaagaattgtgttacagcttccccaaaatttacaacatcctccagcgatggaaacgaagccaattgtcgaacataaatccctctatgaacttcttacagttaacccatatgatttcccggaaacaggatttgaatgtactatcacaatagcagaaataccagctgaacacaaatggtggtttccatcttgcacaaaatgcaataaagcaacaatccctcacactacaggttatcactgtgaatcatgcaattgggatggatacaaatttaaatacaagctcaaattcctggcatctgatgaaacagatattgcagaaatgttttgttttgacactgtagcaaggcacatcgttggtaaatcctgtgagattgttttacgaagtgtcactgaacagtctcctatcccacctgatctagcacaaatcatatctctgaaatttacattcagagtcacaattgacaatcaatctcttttccaacaaaccagttgcccaaacgtgttccgcattaattctattgttgctgcacatgggagacaacgttctttaccaatgcaaataggaatttctgatcaacaaggaccatcaacacctcaaaacaaatcaaaaccgatgttattggaagactctccatctacaactttggaaaaattatctactacaactcctacaactgtagtaaggaagcttctatattccgaaactgacaacacgccgaaaacgcactcaatttcttttactcaattatcttttattcattttaagatttagtgagtattgacagttaaaaatacttatatttgttccatgttgacagtgcaaacaagagtaatatcaatagcccagaaaaagatgatggcgataaggaaaccgcacagcttgatacaatacccactaacaaaggaaaaggaccagcagatacaattgaatcgccacctaaaaggttcaaacaagggacgatacgcatcggaaaagaaatggacatcaaatcctccgagaactaaagtttcactcagatcttcgtcgaccttttgagttgcacaatgtctattttgcaacatatgtataattatatatgatgacctactcagctctttgaaaacaatttatgtaaatataacagcctaattctacgtagtggacaaaaatgttgactctgattacagctaaggtaactctatttcatataaacatataacatctgcagtaatcaaattagaaaaaatttctaacgcgcgcagggcacgcgccagtgactagtgtataagtattccctctattctaaatttaagttattttggctctctagatacaaaactcttatcggacatttaggtatacatctaggta

SEQ ID NO: 17154 - DNA, 2199 bp, Zea Mays
atatcggtcagtttgccatcagaacaaggagaaaaaaaggttccggtcttcatcccttccatttccaaaggacgacgctctcaccattcacgaacggcgactgcggatcgatcgtgcgtcgtctcctgcgccggcctctcttcaagtcagtaacgactataatctgattgtgaccactctccatgagttgcttcacccaaaacagccaagggtcgttttcctcgcttcactgagtctctcacaaacactaatcgaaatttgatttattaacacacatggcgtcattttcaagttcccaagcagcccacagattctattgattgtgggtgtctttcagcatctgagggtttctaccagtccaggttacacacaagcttcaaattatcgcaaaattcctcttacatatctacatctcataccggaccaggtctcataccggaccagtttgcttggacttattacgaaacttcttttactcagctggagcttccatcaaaacataaaaatggaatacactttattacctgatttagcaccgcataagatacatgcaaagattcaagtacatgtatctagaaagtggcttttccgaggtgctactgatagtggaccactacaacatgttgatatggttttgtctgatcgagagggtaatgctatttatgctgaaatccctggaaatttagctgaacaaaaagcaacaaatattgaagaaggaggagtttatgatatcaacagattcagagtgtgcgcagcaaaaactgttttcaaaatagtggatggggacaaaatgatccaattcacatttcataccatagtaaaatgtgccacaagccctccaacaacatttccattatatgtttatcggctaacatcatttgatctaattgagcctcatgttcaaactacaaataactttgttggtgtctacctaagtggtggtcctgcctgtagatggtacttcaatccaacaattccagaggcagaaccttatcttaccagccagtctacaaaaagaattgtgttacagcttccccaaaatttacaacatcctccagcgatggaaacgaagccaattgtcgaacataaatccctctatgaacttcttacagttaacccatatgatttcccggaaacaggatttgaatgtactatcacaatagcagaaataccagctgaacacaaatggtggtttccatcttgcacaaaatgcaataaagcaacaatccctcacactacaggttatcactgtgaatcatgcaattgggatggatacaaatttaaatacaagctcaaattcctggcatctgatgaaacagatattgcagaaatgttttgttttgacactgtagcaaggcacatcgttgttgcccaaacgtgttccgcattaattctattgttgctgcacatgggagacaacgttctttaccaatgcaaataggaatttctgatcaacaaggaccatcaacacctcaaaacaaatcaaaaccgatgttattggaagactctccatctacaactttggaaaaattatctactacaactcctacaactgtagtaaggaagcttctatattccgaaactgacaacacgccgaaaacgcactcaatttcttttactcaattatcttttattcattttaagatttatgcaaacaagagtaatatcaatagcccagaaaaagatgatggcgataaggaaaccgcacagaacttcgatatatgcagcttgatacaatacccactaacaaaggaaaaggaccagcagatacaattgaatcgccacctaaaaggttcaaacaagggacgatacgcatcggaaaagaaatggacatcaaatcctccgagaactaaagtttcactcagatcttcgtcgaccttttgagttgcacaatgtctattttgcaacatatgtataattatatatgatgacctactcagctctttgaaaacaatttatgtaaatataacagcctaattctacgtagtggacaaaaatgttgactctgattacagctaaggtaactctatttcatataaacatataacatctgcagtaatcaaattagaaaaaatttctaacgcgcgcagggcacgcgccagtgactagtgtataagtattccctctattctaaatttaagttattttggctctctagatacaaaactcttatcggacatttaggtatacatctaggta

SEQ ID NO: 17155 - DNA, 1770 bp, Zea Mays
atatcggtcagtttgccatcagaacaaggagaaaaaaaggttccggtcttcatcccttccatttccaaaggacgacgctctcaccattcacgaacggcgactgcggatcgatcgtgcgtcgtctcctgcgccggcctctcttcaagtcaggttacacacaagcttcaaattatcgcaaaattcctcttacatatctacatctcataccggaccaggtctcataccggaccagatgttcttggtgtcataactgaaattcatgaactgacacctgtgcatgtccgaagtcaactaacaccaacagtgacaaggaccattatcatagaagatctcaggtgtctacctaagtggtggtcctgcctgtagatggtacttcaatccaacaattccagaggcagaaccttatcttaccagtctacaaaaagaattgtgttacagcttccccaaaatttacaacatcctccagcgatggaaacgaagccaattgtcgaacataaatccctctatgaacttcttacagttaacccatatgatttcccggaaacaggatttgaatgtactatcacaatagcagaaataccagctgaacacaaatggtggtttccatcttgcacaaaatgcaataaagcaacaatccctcacactacaggttatcactgtgaatcatgcaattgggatggatacaaatttaaatacaagctcaaattcctggcatctgatgaaacagatattgcagaaatgttttgttttgacactgtagcaaggcacatcgttggtaaatcctgtgagattgttttacgaagtgtcactgaacagtctcctatcccacctgatctagcacaaatcatatctctgaaatttacattcagagtcacaattgacaatcaatctcttttccaacaaaccagttgcccaaacgtgttccgcattaattctattgttgctgcacatgggagacaacgttctttaccaatgcaaataggaatttctgatcaacaaggaccatcaacacctcaaaacaaatcaaaaccgatgttattggaagactctccatctacaactttggaaaaattatctactacaactcctacaactgtagtaaggaagcttctatattccgaaactgacaacacgccgaaaacgcactcaatttcttttactcaattatcttttattcattttaagatttagtgagtattgacagttaaaaatacttatatttgttccatgttgacagtgcaaacaagagtaatatcaatagcccagaaaaagatgatggcgataaggaaaccgcacagcttgatacaatacccactaacaaaggaaaaggaccagcagatacaattgaatcgccacctaaaaggttcaaacaagggacgatacgcatcggaaaagaaatggacatcaaatcctccgagaactaaagtttcactcagatcttcgtcgaccttttgagttgcacaatgtctattttgcaacatatgtataattatatatgatgacctactcagctctttgaaaacaatttatgtaaatataacagcctaattctacgtagtggacaaaaatgttgactctgattacagctaaggtaactctatttcatataaacatataacatctgcagtaatcaaattagaaaaaatttctaacgcgcgcagggcacgcgccagtgactagtgtataagtattccctctattctaaatttaagttattttggctctctagatacaaaactcttatcggacatttaggtatacatctaggta

SEQ ID NO: 17156 - DNA, 2086 bp, Zea Mays
atatcggtcagtttgccatcagaacaaggagaaaaaaaggttccggtcttcatcccttccatttccaaaggacgacgctctcaccattcacgaacggcgactgcggatcgatcgtgcgtcgtctcctgcgccggcctctcttcaagtcagccaagggtcgttttcctcgcttcactgagtctctcacaaacactaatcgaaatttgatttattaacacacatggcgtcattttcaagttcccaagcagcccacagattctattgattgtgggtgtctttcagcatctgagggtttctaccagtccaggttacacacaagcttcaaattatcgcaaaattcctcttacatatctacatctcataccggaccaggtctcataccggaccagaaaaatggaatacactttattacctgatttagcaccgcataagatacatgcaaagattcaagtacatgtatctagaaagtggcttttccgaggtgctactgatagtggaccactacaacatgttgatatggttttgtctgatcgagagatgttcttggtgtcataactgaaattcatgaactgacacctgtgcatgtccgaagtcaactaacaccaacagtgacaaggaccattatcatagaagatctcagcgacaaaacaatgaagatcactttatgggcagattaggcgataatgttcaatcttcatgacgtgtacgatgcaaatacaaataaaccgattcttgtgctattcgtcgggtgcttaccaaaatttttcaaaggtgtctacctaagtggtggtcctgcctgtagatggtacttcaatccaacaattccagaggcagaaccttatcttaccagccagtctacaaaaagaattgtgttacagcttccccaaaatttacaacatcctccagcgatggaaacgaagccaattgtcgaacataaatccctctatgaacttcttacagttaacccatatgatttcccggaaacaggatttgaatgtactatcacaatagcagaaataccagctgaacacaaatggtggtttccatcttgcacaaaatgcaataaagcaacaatccctcacactacaggttatcactgtgaatcatgcaattgggatggatacaaatttaaatacaagctcaaattcctggcatctgatgaaacagatattgcagaaatgttttgttttgacactgtagcaaggcacatcgttggtaaatcctttgcccaaacgtgttccgcattaattctattgttgctgcacatgggagacaacgttctttaccaatgcaaataggaatttctgatcaacaaggaccatcaacacctcaaaacaaatcaaaaccgatgttattggaagactctccatctacaactttggaaaaattatctactacaactcctacaactgtagtaaggaagcttctatattccgaaactgacaacacgccgaaaacgcactcaatttcttttactcaattatcttttattcattttaagatttagtgagtattgacagttaaaaatacttatatttgttccatgttgacagtgcaaacaagagtaatatcaatagcccagaaaaagatgatggcgataaggaaaccgcacagcttgatacaatacccactaacaaaggaaaaggaccagcagatacaattgaatcgccacctaaaaggttcaaacaagggacgatacgcatcggaaaagaaatggacatcaaatcctccgagaactaaagtttcactcagatcttcgtcgaccttttgagttgcacaatgtctattttgcaacatatgtataattatatatgatgacctactcagctctttgaaaacaatttatgtaaatataacagcctaattctacgtagtggacaaaaatgttgactctgattacagctaaggtaactctatttcatataaacatataacatctgcagtaatcaaattagaaaaaatttctaacgcgcgcagggcacgcgccagtgactagtgtataagtattccctctattctaaatttaagttattttggctctctagatacaaaactcttatcggacatttaggtatacatctaggta

SEQ ID NO: 17157 - DNA, 1859 bp, Zea Mays
atatcggtcagtttgccatcagaacaaggagaaaaaaaggttccggtcttcatcccttccatttccaaaggacgacgctctcaccattcacgaacggcgactgcggatcgatcgtgcgtcgtctcctgcgccggcctctcttcaagtcagttcccaagcagcccacagattctattgattgtgggtgtctttcagcatctgagggtttctaccagtccaggttacacacaagcttcaaattatcgcaaaattcctcttacatatctacatctcataccggaccaggtctcataccggaccagaaaaatggaatacactttattacctgatttagcaccgcataagatacatgcaaagattcaagtacatgtatctagaaagtggcttttccgaggtgctactgatagtggaccactacaacatgttgatatggttttgtctgatcgagagatgttcttggtgtcataactgaaattcatgaactgacacctgtgcatgtccgaagtcaactaacaccaacagtgacaaggaccattatcatagaagatctcaggtgtctacctaagtggtggtcctgcctgtagatggtacttcaatccaacaattccagaggcagaaccttatcttaccagccagtctacaaaaagaattgtgttacagcttccccaaaatttacaacatcctccagcgatggaaacgaagccaattgtcgaacataaatccctctatgaacttcttacagttaacccatatgatttcccggaaacaggatttgaatgtactatcacaatagcagaaataccagctgaacacaaatggtggtttccatcttgcacaaaatgcaataaagcaacaatccctcacactacaggttatcactgtgaatcatgcaattgggatggatacaaatttaaatacaagctcaaattcctggcatctgatgaaacagatattgcagaaatgttttgttttgacactgtagcaaggcacatcgttgttgcccaaacgtgttccgcattaattctattgttgctgcacatgggagacaacgttctttaccaatgcaaataggaatttctgatcaacaaggaccatcaacacctcaaaacaaatcaaaaccgatgttattggaagactctccatctacaactttggaaaaattatctactacaactcctacaactgtagtaaggaagcttctatattccgaaactgacaacacgccgaaaacgcactcaatttcttttactcaattatcttttattcattttaagatttagtgagtattgacagttaaaaatacttatatttgttccatgttgacagtgcaaacaagagtaatatcaatagcccagaaaaagatgatggcgataaggaaaccgcacagcttgatacaatacccactaacaaaggaaaaggaccagcagatacaattgaatcgccacctaaaaggttcaaacaagggacgatacgcatcggaaaagaaatggacatcaaatcctccgagaactaaagtttcactcagatcttcgtcgaccttttgagttgcacaatgtctattttgcaacatatgtataattatatatgatgacctactcagctctttgaaaacaatttatgtaaatataacagcctaattctacgtagtggacaaaaatgttgactctgattacagctaaggtaactctatttcatataaacatataacatctgcagtaatcaaattagaaaaaatttctaacgcgcgcagggcacgcgccagtgactagtgtataagtattccctctattctaaatttaagttattttggctctctagatacaaaactcttatcggacatttaggtatacatctaggta

SEQ ID NO: 17158 - DNA, 2087 bp, Zea Mays
atatcggtcagtttgccatcagaacaaggagaaaaaaaggttccggtcttcatcccttccatttccaaaggacgacgctctcaccattcacgaacggcgactgcggatcgatcgtgcgtcgtctcctgcgccggcctctcttcaagtcagttcccaagcagcccacagattctattgattgtgggtgtctttcagcatctgagggtttctaccagtccaggttacacacaagcttcaaattatcgcaaaattcctcttacatatctacatctcataccggaccaggtctcataccggaccagtttgcttggacttattacgaaacttcttttactcagctggagcttccatcaaaacataaaaatggaatacactttattacctgatttagcaccgcataagatacatgcaaagattcaagtacatgtatctagaaagtggcttttccgaggtgctactgatagtggaccactacaacatgttgatatggttttgtctgatcgagagggtaatgctatttatgctgaaatccctggaaatttagctgaacaaaaagcaacaaatattgaagaaggaggagtttatgatatcaacagattcagagtgtgcgcagcaaaaactgttttcaaaatagtggatggggacaaaatgatccaattcacatttcataccatagtaaaatgtgccacaagccctccaacaacatttccattatatgtttatcggctaacatcatttgatctaattgagcctcatgttcaaactacaaataactttgttggtgtctacctaagtggtggtcctgcctgtagatggtacttcaatccaacaattccagaggcagaaccttatcttaccagccagtctacaaaaagaattgtgttacagcttccccaaaatttacaacatcctccagcgatggaaacgaagccaattgtcgaacataaatccctctatgaacttcttacagttaacccatatgatttcccggaaacaggatttgaatgtactatcacaatagcagaaataccagctgaacacaaatggtggtttccatcttgcacaaaatgcaataaagcaacaatccctcacactacaggttatcactgtgaatcatgcaattgggatggatacaaatttaaatacaagctcaaattcctggcatctgatgaaacagatattgcagaaatgttttgttttgacactgtagcaaggcacatcgttgttgcccaaacgtgttccgcattaattctattgttgctgcacatgggagacaacgttctttaccaatgcaaataggaatttctgatcaacaaggaccatcaacacctcaaaacaaatcaaaaccgatgttattggaagactctccatctacaactttggaaaaattatctactacaactcctacaactgtagtaaggaagcttctatattccgaaactgacaacacgccgaaaacgcactcaatttcttttactcaattatcttttattcattttaagatttagtgagtattgacagttaaaaatacttatatttgttccatgttgacagtgcaaacaagagtaatatcaatagcccagaaaaagatgatggcgataaggaaaccgcacagcttgatacaatacccactaacaaaggaaaaggaccagcagatacaattgaatcgccacctaaaaggttcaaacaagggacgatacgcatcggaaaagaaatggacatcaaatcctccgagaactaaagtttcactcagatcttcgtcgaccttttgagttgcacaatgtctattttgcaacatatgtataattatatatgatgacctactcagctctttgaaaacaatttatgtaaatataacagcctaattctacgtagtggacaaaaatgttgactctgattacagctaaggtaactctatttcatataaacatataacatctgcagtaatcaaattagaaaaaatttctaacgcgcgcagggcacgcgccagtgactagtgtataagtattccctctattctaaatttaagttattttggctctctagatacaaaactcttatcggacatttaggtatacatctaggta

SEQ ID NO: 17159 - DNA, 2117 bp, Zea Mays
atatcggtcagtttgccatcagaacaaggagaaaaaaaggttccggtcttcatcccttccatttccaaaggacgacgctctcaccattcacgaacggcgactgcggatcgatcgtgcgtcgtctcctgcgccggcctctcttcaagtcagccaagggtcgttttcctcgcttcactgagtctctcacaaacactaatcgaaatttgatttattaacacacatggcgtcattttcaagttcccaagcagcccacagattctattgattgtgggtgtctttcagcatctgagggtttctaccagtccaggttacacacaagcttcaaattatcgcaaaattcctcttacatatctacatctcataccggaccaggtctcataccggaccagaaaaatggaatacactttattacctgatttagcaccgcataagatacatgcaaagattcaagtacatgtatctagaaagtggcttttccgaggtgctactgatagtggaccactacaacatgttgatatggttttgtctgatcgagagggtaatgctatttatgctgaaatccctggaaatttagctgaacaaaaagcaacaaatattgaagaaggaggagtttatgatatcaacagattcagagtgtgcgcagcaaaaactgttttcaaaatagtggatggggacaaaatgatccaattcacatttcataccatagtaaaatgtgccacaagccctccaacaacatttccattatatgtttatcggctaacatcatttgatctaattgagcctcatgttcaaactacaaataactttgttggtgtctacctaagtggtggtcctgcctgtagatggtacttcaatccaacaattccagaggcagaaccttatcttaccagccagtctacaaaaagaattgtgttacagcttccccaaaatttacaacatcctccagcgatggaaacgaagccaattgtcgaacataaatccctctatgaacttcttacagttaacccatatgatttcccggaaacaggatttgaatgtactatcacaatagcagaaataccagctgaacacaaatggtggtttccatcttgcacaaaatgcaataaagcaacaatccctcacactacaggttatcactgtgaatcatgcaattgggatggatacaaatttaaatacaagctcaaattcctggcatctgatgaaacagatattgcagaaatgttttgttttgacactgtagcaaggcacatcgttgttgcccaaacgtgttccgcattaattctattgttgctgcacatgggagacaacgttctttaccaatgcaaataggaatttctgatcaacaaggaccatcaacacctcaaaacaaatcaaaaccgatgttattggaagactctccatctacaactttggaaaaattatctactacaactcctacaactgtagtaaggaagcttctatattccgaaactgacaacacgccgaaaacgcactcaatttcttttactcaattatcttttattcattttaagatttagtgagtattgacagttaaaaatacttatatttgttccatgttgacagtgcaaacaagagtaatatcaatagcccagaaaaagatgatggcgataaggaaaccgcacagcttgatacaatacccactaacaaaggaaaaggaccagcagatacaattgaatcgccacctaaaaggttcaaacaagggacgatacgcatcggaaaagaaatggacatcaaatcctccgagaactaaagtttcactcagatcttcgtcgaccttttgagttgcacaatgtctattttgcaacatatgtataattatatatgatgacctactcagctctttgaaaacaatttatgtaaatataacagcctaattctacgtagtggacaaaaatgttgactctgattacagctaaggtaactctatttcatataaacatataacatctgcagtaatcaaattagaaaaaatttctaacgcgcgcagggcacgcgccagtgactagtgtataagtattccctctattctaaatttaagttattttggctctctagatacaaaactcttatcggacatttaggtatacatctaggta

SEQ ID NO: 17160 - DNA, 2053 bp, Zea Mays
atatcggtcagtttgccatcagaacaaggagaaaaaaaggttccggtcttcatcccttccatttccaaaggacgacgctctcaccattcacgaacggcgactgcggatcgatcgtgcgtcgtctcctgcgccggcctctcttcaagtcaggttacacacaagcttcaaattatcgcaaaattcctcttacatatctacatctcataccggaccaggtctcataccggaccagaaaaatggaatacactttattacctgatttagcaccgcataagatacatgcaaagattcaagtacatgtatctagaaagtggcttttccgaggtgctactgatagtggaccactacaacatgttgatatggttttgtctgatcgagagatgttcttggtgtcataactgaaattcatgaactgacacctgtgcatgtccgaagtcaactaacaccaacagtgacaaggaccattatcatagaagatctcagcgacaaaacaatgaagatcactttatgggcagattaggcgataatgttcaatcttcatgacgtgtacgatgcaaatacaaataaaccgattcttgtgctattcgtcgggtgcttaccaaaatttttcaaaggtgtctacctaagtggtggtcctgcctgtagatggtacttcaatccaacaattccagaggcagaaccttatcttaccagccagtctacaaaaagaattgtgttacagcttccccaaaatttacaacatcctccagcgatggaaacgaagccaattgtcgaacataaatccctctatgaacttcttacagttaacccatatgatttcccggaaacaggatttgaatgtactatcacaatagcagaaataccagctgaacacaaatggtggtttccatcttgcacaaaatgcaataaagcaacaatccctcacactacaggttatcactgtgaatcatgcaattgggatggatacaaatttaaatacaagctcaaattcctggcatctgatgaaacagatattgcagaaatgttttgttttgacactgtagcaaggcacatcgttggtaaatcctgtgagattgttttacgaagtgtcactgaacagtctcctatcccacctgatctagcacaaatcatatctctgaaatttacattcagagtcacaattgacaatcaatctcttttccaacaaaccagttgcccaaacgtgttccgcattaattctattgttgctgcacatgggagacaacgttctttaccaatgcaaataggaatttctgatcaacaaggaccatcaacacctcaaaacaaatcaaaaccgatgttattggaagactctccatctacaactttggaaaaattatctactacaactcctacaactgtagtaaggaagcttctatattccgaaactgacaacacgccgaaaacgcactcaatttcttttactcaattatcttttattcattttaagatttagtgagtattgacagttaaaaatacttatatttgttccatgttgacagtgcaaacaagagtaatatcaatagcccagaaaaagatgatggcgataaggaaaccgcacagcttgatacaatacccactaacaaaggaaaaggaccagcagatacaattgaatcgccacctaaaaggttcaaacaagggacgatacgcatcggaaaagaaatggacatcaaatcctccgagaactaaagtttcactcagatcttcgtcgaccttttgagttgcacaatgtctattttgcaacatatgtataattatatatgatgacctactcagctctttgaaaacaatttatgtaaatataacagcctaattctacgtagtggacaaaaatgttgactctgattacagctaaggtaactctatttcatataaacatataacatctgcagtaatcaaattagaaaaaatttctaacgcgcgcagggcacgcgccagtgactagtgtataagtattccctctattctaaatttaagttattttggctctctagatacaaaactcttatcggacatttaggtatacatctaggta

SEQ ID NO: 17161 - DNA, 1962 bp, Zea Mays
atatcggtcagtttgccatcagaacaaggagaaaaaaaggttccggtcttcatcccttccatttccaaaggacgacgctctcaccattcacgaacggcgactgcggatcgatcgtgcgtcgtctcctgcgccggcctctcttcaagtcaggttacacacaagcttcaaattatcgcaaaattcctcttacatatctacatctcataccggaccaggtctcataccggaccagtttgcttggacttattacgaaacttcttttactcagctggagcttccatcaaaacatatgttcttggtgtcataactgaaattcatgaactgacacctgtgcatgtccgaagtcaactaacaccaacagtgacaaggaccattatcatagaagatctcagcgacaaaacaatgaagatcactttatgggcagattaggcgataatgttcaatcttcatgacgtgtacgatgcaaatacaaataaaccgattcttgtgctattcgtcgggtgcttaccaaaatttttcaaaggtgtctacctaagtggtggtcctgcctgtagatggtacttcaatccaacaattccagaggcagaaccttatcttaccagccagtctacaaaaagaattgtgttacagcttccccaaaatttacaacatcctccagcgatggaaacgaagccaattgtcgaacataaatccctctatgaacttcttacagttaacccatatgatttcccggaaacaggatttgaatgtactatcacaatagcagaaataccagctgaacacaaatggtggtttccatcttgcacaaaatgcaataaagcaacaatccctcacactacaggttatcactgtgaatcatgcaattgggatggatacaaatttaaatacaagctcaaattcctggcatctgatgaaacagatattgcagaaatgttttgttttgacactgtagcaaggcacatcgttggtaaatcctgtgagattgttttacgaagtgtcactgaacagtctcctatcccacctgatctagcacaaatcatatctctgaaatttacattcagagtcacaattgacaatcaatctcttttccaacaaaccagttgcccaaacgtgttccgcattaattctattgttgctgcacatgggagacaacgttctttaccaatgcaaataggaatttctgatcaacaaggaccatcaacacctcaaaacaaatcaaaaccgatgttattggaagactctccatctacaactttggaaaaattatctactacaactcctacaactgtagtaaggaagcttctatattccgaaactgacaacacgccgaaaacgcactcaatttcttttactcaattatcttttattcattttaagatttagtgagtattgacagttaaaaatacttatatttgttccatgttgacagtgcaaacaagagtaatatcaatagcccagaaaaagatgatggcgataaggaaaccgcacagcttgatacaatacccactaacaaaggaaaaggaccagcagatacaattgaatcgccacctaaaaggttcaaacaagggacgatacgcatcggaaaagaaatggacatcaaatcctccgagaactaaagtttcactcagatcttcgtcgaccttttgagttgcacaatgtctattttgcaacatatgtataattatatatgatgacctactcagctctttgaaaacaatttatgtaaatataacagcctaattctacgtagtggacaaaaatgttgactctgattacagctaaggtaactctatttcatataaacatataacatctgcagtaatcaaattagaaaaaatttctaacgcgcgcagggcacgcgccagtgactagtgtataagtattccctctattctaaatttaagttattttggctctctagatacaaaactcttatcggacatttaggtatacatctaggta

SEQ ID NO: 17162 - DNA, 2247 bp, Zea Mays
atatcggtcagtttgccatcagaacaaggagaaaaaaaggttccggtcttcatcccttccatttccaaaggacgacgctctcaccattcacgaacggcgactgcggatcgatcgtgcgtcgtctcctgcgccggcctctcttcaagtcaggttacacacaagcttcaaattatcgcaaaattcctcttacatatctacatctcataccggaccaggtctcataccggaccagtttgcttggacttattacgaaacttcttttactcagctggagcttccatcaaaacataaaaatggaatacactttattacctgatttagcaccgcataagatacatgcaaagattcaagtacatgtatctagaaagtggcttttccgaggtgctactgatagtggaccactacaacatgttgatatggttttgtctgatcgagagggtaatgctatttatgctgaaatccctggaaatttagctgaacaaaaagcaacaaatattgaagaaggaggagtttatgatatcaacagattcagagtgtgcgcagcaaaaactgttttcaaaatagtggatggggacaaaatgatccaattcacatttcataccatagtaaaatgtgccacaagccctccaacaacatttccattatatgtttatcggctaacatcatttgatctaattgagcctcatgttcaaactacaaataactttatgttcttggtgtcataactgaaattcatgaactgacacctgtgcatgtccgaagtcaactaacaccaacagtgacaaggaccattatcatagaagatctcagcgacaaaacaatgaagatcactttatgggcagattaggcgataatgttcaatcttcatgacgtgtacgatgcaaatacaaataaaccgattcttgtgctattcgtcgggtgcttaccaaaatttttcaaaggtgtctacctaagtggtggtcctgcctgtagatggtacttcaatccaacaattccagaggcagaaccttatcttaccagccagtctacaaaaagaattgtgttacagcttccccaaaatttacaacatcctccagcgatggaaacgaagccaattgtcgaacataaatccctctatgaacttcttacagttaacccatatgatttcccggaaacaggatttgaatgtactatcacaatagcagaaataccagctgaacacaaatggtggtttccatcttgcacaaaatgcaataaagcaacaatccctcacactacaggttatcactgtgaatcatgcaattgggatggatacaaatttaaatacaagctcaaattcctggcatctgatgaaacagatattgcagaaatgttttgttttgacactgtagcaaggcacatcgttgttgcccaaacgtgttccgcattaattctattgttgctgcacatgggagacaacgttctttaccaatgcaaataggaatttctgatcaacaaggaccatcaacacctcaaaacaaatcaaaaccgatgttattggaagactctccatctacaactttggaaaaattatctactacaactcctacaactgtagtaaggaagcttctatattccgaaactgacaacacgccgaaaacgcactcaatttcttttactcaattatcttttattcattttaagatttagtgagtattgacagttaaaaatacttatatttgttccatgttgacagtgcaaacaagagtaatatcaatagcccagaaaaagatgatggcgataaggaaaccgcacagcttgatacaatacccactaacaaaggaaaaggaccagcagatacaattgaatcgccacctaaaaggttcaaacaagggacgatacgcatcggaaaagaaatggacatcaaatcctccgagaactaaagtttcactcagatcttcgtcgaccttttgagttgcacaatgtctattttgcaacatatgtataattatatatgatgacctactcagctctttgaaaacaatttatgtaaatataacagcctaattctacgtagtggacaaaaatgttgactctgattacagctaaggtaactctatttcatataaacatataacatctgcagtaatcaaattagaaaaaatttctaacgcgcgcagggcacgcgccagtgactagtgtataagtattccctctattctaaatttaagttattttggctctctagatacaaaactcttatcggacatttaggtatacatctaggta

SEQ ID NO: 17163 - DNA, 1611 bp, Zea Mays
atatcggtcagtttgccatcagaacaaggagaaaaaaaggttccggtcttcatcccttccatttccaaaggacgacgctctcaccattcacgaacggcgactgcggatcgatcgtgcgtcgtctcctgcgccggcctctcttcaagtcaggttacacacaagcttcaaattatcgcaaaattcctcttacatatctacatctcataccggaccaggtctcataccggaccagatgttcttggtgtcataactgaaattcatgaactgacacctgtgcatgtccgaagtcaactaacaccaacagtgacaaggaccattatcatagaagatctcagcgacaaaacaatgaagatcactttatgggcagattaggcgataatgttcaatcttcatgacgtgtacgatgcaaatacaaataaaccgattcttgtgctattcgtcgggtgcttaccaaaatttttcaaaggtgtctacctaagtggtggtcctgcctgtagatggtacttcaatccaacaattccagaggcagaaccttatcttaccagtctacaaaaagaattgtgttacagcttccccaaaatttacaacatcctccagcgatggaaacgaagccaattgtcgaacataaatccctctatgaacttcttacagttaacccatatgatttcccggaaacaggatttgaatgtactatcacaatagcagaaataccagctgaacacaaatggtggtttccatcttgcacaaaatgcaataaagcaacaatccctcacactacaggttatcactgtgaatcatgcaattgggatggatacaaatttaagaatttctgatcaacaaggaccatcaacacctcaaaacaaatcaaaaccgatgttattggaagactctccatctacaactttggaaaaattatctactacaactcctacaactgtagtaaggaagcttctatattccgaaactgacaacacgccgaaaacgcactcaatttcttttactcaattatcttttattcattttaagatttagtgagtattgacagttaaaaatacttatatttgttccatgttgacagtgcaaacaagagtaatatcaatagcccagaaaaagatgatggcgataaggaaaccgcacagcttgatacaatacccactaacaaaggaaaaggaccagcagatacaattgaatcgccacctaaaaggttcaaacaagggacgatacgcatcggaaaagaaatggacatcaaatcctccgagaactaaagtttcactcagatcttcgtcgaccttttgagttgcacaatgtctattttgcaacatatgtataattatatatgatgacctactcagctctttgaaaacaatttatgtaaatataacagcctaattctacgtagtggacaaaaatgttgactctgattacagctaaggtaactctatttcatataaacatataacatctgcagtaatcaaattagaaaaaatttctaacgcgcgcagggcacgcgccagtgactagtgtataagtattccctctattctaaatttaagttattttggctctctagatacaaaactcttatcggacatttaggtatacatctaggta

SEQ ID NO: 17164 - DNA, 2275 bp, Zea Mays
atatcggtcagtttgccatcagaacaaggagaaaaaaaggttccggtcttcatcccttccatttccaaaggacgacgctctcaccattcacgaacggcgactgcggatcgatcgtgcgtcgtctcctgcgccggcctctcttcaagtcagtaacgactataatctgattgtgaccactctccatgagttgcttcacccaaaacagccaagggtcgttttcctcgcttcactgagtctctcacaaacactaatcgaaatttgatttattaacacacatggcgtcattttcaagttcccaagcagcccacagattctattgattgtgggtgtctttcagcatctgagggtttctaccagtccaggttacacacaagcttcaaattatcgcaaaattcctcttacatatctacatctcataccggaccaggtctcataccggaccagtttgcttggacttattacgaaacttcttttactcagctggagcttccatcaaaacatgtgtgtatttaacttcctttacaaaaaaatattatattttaaattgaaaaatggaatacactttattacctgatttagcaccgcataagatacatgcaaagattcaagtacatgtatctagaaagtggcttttccgaggtgctactgatagtggaccactacaacatgttgatatggttttgtctgatcgagagggtaatgctatttatgctgaaatccctggaaatttagctgaacaaaaagcaacaaatattgaagaaggaggagtttatgatatcaacagattcagagtgtgcgcagcaaaaactgttttcaaaatagtggatggggacaaaatgatccaattcacatttcataccatagtaaaatgtgccacaagccctccaacaacatttccattatatgtttatcggctaacatcatttgatctaattgagcctcatgttcaaactacaaataactttgttggtgtctacctaagtggtggtcctgcctgtagatggtacttcaatccaacaattccagaggcagaaccttatcttaccagccagtctacaaaaagaattgtgttacagcttccccaaaatttacaacatcctccagcgatggaaacgaagccaattgtcgaacataaatccctctatgaacttcttacagttaacccatatgatttcccggaaacaggatttgaatgtactatcacaatagcagaaataccagctgaacacaaatggtggtttccatcttgcacaaaatgcaataaagcaacaatccctcacactacaggttatcactgtgaatcatgcaattgggatggatacaaatttaaatacaagctcaaattcctggcatctgatgaaacagatattgcagaaatgttttgttttgacactgtagcaaggcacatcgttgttgcccaaacgtgttccgcattaattctattgttgctgcacatgggagacaacgttctttaccaatgcaaataggaatttctgatcaacaaggaccatcaacacctcaaaacaaatcaaaaccgatgttattggaagactctccatctacaactttggaaaaattatctactacaactcctacaactgtagtaaggaagcttctatattccgaaactgacaacacgccgaaaacgcactcaatttcttttactcaattatcttttattcattttaagatttagtgagtattgacagttaaaaatacttatatttgttccatgttgacagtgcaaacaagagtaatatcaatagcccagaaaaagatgatggcgataaggaaaccgcacagcttgatacaatacccactaacaaaggaaaaggaccagcagatacaattgaatcgccacctaaaaggttcaaacaagggacgatacgcatcggaaaagaaatggacatcaaatcctccgagaactaaagtttcactcagatcttcgtcgaccttttgagttgcacaatgtctattttgcaacatatgtataattatatatgatgacctactcagctctttgaaaacaatttatgtaaatataacagcctaattctacgtagtggacaaaaatgttgactctgattacagctaaggtaactctatttcatataaacatataacatctgcagtaatcaaattagaaaaaatttctaacgcgcgcagggcacgcgccagtgactagtgtataagtattccctctattctaaatttaagttattttggctctctagatacaaaactcttatcggacatttaggtatacatctaggta

SEQ ID NO: 17165 - DNA, 1823 bp, Zea Mays
atatcggtcagtttgccatcagaacaaggagaaaaaaaggttccggtcttcatcccttccatttccaaaggacgacgctctcaccattcacgaacggcgactgcggatcgatcgtgcgtcgtctcctgcgccggcctctcttcaagtcagatgttcttggtgtcataactgaaattcatgaactgacacctgtgcatgtccgaagtcaactaacaccaacagtgacaaggaccattatcatagaagatctcagcgacaaaacaatgaagatcactttatgggcagattaggcgataatgttcaatcttcatgacgtgtacgatgcaaatacaaataaaccgattcttgtgctattcgtcgggtgcttaccaaaatttttcaaaggtgtctacctaagtggtggtcctgcctgtagatggtacttcaatccaacaattccagaggcagaaccttatcttaccagccagtctacaaaaagaattgtgttacagcttccccaaaatttacaacatcctccagcgatggaaacgaagccaattgtcgaacataaatccctctatgaacttcttacagttaacccatatgatttcccggaaacaggatttgaatgtactatcacaatagcagaaataccagctgaacacaaatggtggtttccatcttgcacaaaatgcaataaagcaacaatccctcacactacaggttatcactgtgaatcatgcaattgggatggatacaaatttaaatacaagctcaaattcctggcatctgatgaaacagatattgcagaaatgttttgttttgacactgtagcaaggcacatcgttggtaaatcctgtgagattgttttacgaagtgtcactgaacagtctcctatcccacctgatctagcacaaatcatatctctgaaatttacattcagagtcacaattgacaatcaatctcttttccaacaaaccagttgcccaaacgtgttccgcattaattctattgttgctgcacatgggagacaacgttctttaccaatgcaaataggaatttctgatcaacaaggaccatcaacacctcaaaacaaatcaaaaccgatgttattggaagactctccatctacaactttggaaaaattatctactacaactcctacaactgtagtaaggaagcttctatattccgaaactgacaacacgccgaaaacgcactcaatttcttttactcaattatcttttattcattttaagatttagtgagtattgacagttaaaaatacttatatttgttccatgttgacagtgcaaacaagagtaatatcaatagcccagaaaaagatgatggcgataaggaaaccgcacagcttgatacaatacccactaacaaaggaaaaggaccagcagatacaattgaatcgccacctaaaaggttcaaacaagggacgatacgcatcggaaaagaaatggacatcaaatcctccgagaactaaagtttcactcagatcttcgtcgaccttttgagttgcacaatgtctattttgcaacatatgtataattatatatgatgacctactcagctctttgaaaacaatttatgtaaatataacagcctaattctacgtagtggacaaaaatgttgactctgattacagctaaggtaactctatttcatataaacatataacatctgcagtaatcaaattagaaaaaatttctaacgcgcgcagggcacgcgccagtgactagtgtataagtattccctctattctaaatttaagttattttggctctctagatacaaaactcttatcggacatttaggtatacatctaggta

SEQ ID NO: 17166 - DNA, 2281 bp, Zea Mays
atatcggtcagtttgccatcagaacaaggagaaaaaaaggttccggtcttcatcccttccatttccaaaggacgacgctctcaccattcacgaacggcgactgcggatcgatcgtgcgtcgtctcctgcgccggcctctcttcaagtcaggttacacacaagcttcaaattatcgcaaaattcctcttacatatctacatctcataccggaccaggtctcataccggaccagaaaaatggaatacactttattacctgatttagcaccgcataagatacatgcaaagattcaagtacatgtatctagaaagtggcttttccgaggtgctactgatagtggaccactacaacatgttgatatggttttgtctgatcgagagggtaatgctatttatgctgaaatccctggaaatttagctgaacaaaaagcaacaaatattgaagaaggaggagtttatgatatcaacagattcagagtgtgcgcagcaaaaactgttttcaaaatagtggatggggacaaaatgatccaattcacatttcataccatagtaaaatgtgccacaagccctccaacaacatttccattatatgtttatcggctaacatcatttgatctaattgagcctcatgttcaaactacaaataactttgttggtacgatatataacttgaaatatatttttataccctgttaaaactaacagaatatctaatatattttatcttcaaaattgattacagatgttcttggtgtcataactgaaattcatgaactgacacctgtgcatgtccgaagtcaactaacaccaacagtgacaaggaccattatcatagaagatctcagcgacaaaacaatgaagatcactttatgggcagattaggcgataatgttcaatcttcatgacgtgtacgatgcaaatacaaataaaccgattcttgtgctattcgtcgggtgcttaccaaaatttttcaaaggtgtctacctaagtggtggtcctgcctgtagatggtacttcaatccaacaattccagaggcagaaccttatcttaccagccagtctacaaaaagaattgtgttacagcttccccaaaatttacaacatcctccagcgatggaaacgaagccaattgtcgaacataaatccctctatgaacttcttacagttaacccatatgatttcccggaaacaggatttgaatgtactatcacaatagcagaaataccagctgaacacaaatggtggtttccatcttgcacaaaatgcaataaagcaacaatccctcacactacaggttatcactgtgaatcatgcaattgggatggatacaaatttaaatacaagctcaaattcctggcatctgatgaaacagatattgcagaaatgttttgttttgacactgtagcaaggcacatcgttgttgcccaaacgtgttccgcattaattctattgttgctgcacatgggagacaacgttctttaccaatgcaaataggaatttctgatcaacaaggaccatcaacacctcaaaacaaatcaaaaccgatgttattggaagactctccatctacaactttggaaaaattatctactacaactcctacaactgtagtaaggaagcttctatattccgaaactgacaacacgccgaaaacgcactcaatttcttttactcaattatcttttattcattttaagatttagtgagtattgacagttaaaaatacttatatttgttccatgttgacagtgcaaacaagagtaatatcaatagcccagaaaaagatgatggcgataaggaaaccgcacagcttgatacaatacccactaacaaaggaaaaggaccagcagatacaattgaatcgccacctaaaaggttcaaacaagggacgatacgcatcggaaaagaaatggacatcaaatcctccgagaactaaagtttcactcagatcttcgtcgaccttttgagttgcacaatgtctattttgcaacatatgtataattatatatgatgacctactcagctctttgaaaacaatttatgtaaatataacagcctaattctacgtagtggacaaaaatgttgactctgattacagctaaggtaactctatttcatataaacatataacatctgcagtaatcaaattagaaaaaatttctaacgcgcgcagggcacgcgccagtgactagtgtataagtattccctctattctaaatttaagttattttggctctctagatacaaaactcttatcggacatttaggtatacatctaggta

SEQ ID NO: 17167 - DNA, 1906 bp, Zea Mays
atatcggtcagtttgccatcagaacaaggagaaaaaaaggttccggtcttcatcccttccatttccaaaggacgacgctctcaccattcacgaacggcgactgcggatcgatcgtgcgtcgtctcctgcgccggcctctcttcaagtcagtaacgactataatctgattgtgaccactctccatgagttgcttcacccaaaacagccaagggtcgttttcctcgcttcactgagtctctcacaaacactaatcgaaatttgatttattaacacacatggcgtcattttcaagttcccaagcagcccacagattctattgattgtgggtgtctttcagcatctgagggtttctaccagtccaggttacacacaagcttcaaattatcgcaaaattcctcttacatatctacatctcataccggaccaggtctcataccggaccagaaaaatggaatacactttattacctgatttagcaccgcataagatacatgcaaagattcaagtacatgtatctagaaagtggcttttccgaggtgctactgatagtggaccactacaacatgttgatatggttttgtctgatcgagagatgttcttggtgtcataactgaaattcatgaactgacacctgtgcatgtccgaagtcaactaacaccaacagtgacaaggaccattatcatagaagatctcaggtgtctacctaagtggtggtcctgcctgtagatggtacttcaatccaacaattccagaggcagaaccttatcttaccagccagtctacaaaaagaattgtgttacagcttccccaaaatttacaacatcctccagcgatggaaacgaagccaattgtcgaacataaatccctctatgaacttcttacagttaacccatatgatttcccggaaacaggatttgaatgtactatcacaatagcagaaataccagctgaacacaaatggtggtttccatcttgcacaaaatgcaataaagcaacaatccctcacactacaggttatcactgtgaatcatgcaattgggatggatacaaatttaaatacaagctcaaattcctggcatctgatgaaacagatattgcagaaatgttttgttttgacactgtagcaaggcacatcgttgttgcccaaacgtgttccgcattaattctattgttgctgcacatgggagacaacgttctttaccaatgcaaataggaatttctgatcaacaaggaccatcaacacctcaaaacaaatcaaaaccgatgttattggaagactctccatctacaactttggaaaaattatctactacaactcctacaactgtagtaaggaagcttctatattccgaaactgacaacacgccgaaaactgcaaacaagagtaatatcaatagcccagaaaaagatgatggcgataaggaaaccgcacagcttgatacaatacccactaacaaaggaaaaggaccagcagatacaattgaatcgccacctaaaaggttcaaacaagggacgatacgcatcggaaaagaaatggacatcaaatcctccgagaactaaagtttcactcagatcttcgtcgaccttttgagttgcacaatgtctattttgcaacatatgtataattatatatgatgacctactcagctctttgaaaacaatttatgtaaatataacagcctaattctacgtagtggacaaaaatgttgactctgattacagctaaggtaactctatttcatataaacatataacatctgcagtaatcaaattagaaaaaatttctaacgcgcgcagggcacgcgccagtgactagtgtataagtattccctctattctaaatttaagttattttggctctctagatacaaaactcttatcggacatttaggtatacatctaggta

SEQ ID NO: 17168 - DNA, 2474 bp, Zea Mays
atatcggtcagtttgccatcagaacaaggagaaaaaaaggttccggtcttcatcccttccatttccaaaggacgacgctctcaccattcacgaacggcgactgcggatcgatcgtgcgtcgtctcctgcgccggcctctcttcaagtcagcgcgcggtgtcctgtgttggacgcgctcccacgacaacgcctaccccctccccctgcgcccaacggagccatcagtttcagatagtgtctttagtgccatggcgccgctacgccagggagcaagtcggtccgccatggctgggtggggcatataccacagactgaagcataaaccaacgcaaatccaatgattgtaaaacagcagtttcgatggttcccaagcagcccacagattctattgattgtgggtgtctttcagcatctgagggtttctaccagtccaggttacacacaagcttcaaattatcgcaaaattcctcttacatatctacatctcataccggaccaggtctcataccggaccagaaaaatggaatacactttattacctgatttagcaccgcataagatacatgcaaagattcaagtacatgtatctagaaagtggcttttccgaggtgctactgatagtggaccactacaacatgttgatatggttttgtctgatcgagagggtaatgctatttatgctgaaatccctggaaatttagctgaacaaaaagcaacaaatattgaagaaggaggagtttatgatatcaacagattcagagtgtgcgcagcaaaaactgttttcaaaatagtggatggggacaaaatgatccaattcacatttcataccatagtaaaatgtgccacaagccctccaacaacatttccattatatgtttatcggctaacatcatttgatctaattgagcctcatgttcaaactacaaataactttatgttcttggtgtcataactgaaattcatgaactgacacctgtgcatgtccgaagtcaactaacaccaacagtgacaaggaccattatcatagaagatctcagcgacaaaacaatgaagatcactttatgggcagattaggcgataatgttcaatcttcatgacgtgtacgatgcaaatacaaataaaccgattcttgtgctattcgtcgggtgcttaccaaaatttttcaaaggtgtctacctaagtggtggtcctgcctgtagatggtacttcaatccaacaattccagaggcagaaccttatcttaccagccagtctacaaaaagaattgtgttacagcttccccaaaatttacaacatcctccagcgatggaaacgaagccaattgtcgaacataaatccctctatgaacttcttacagttaacccatatgatttcccggaaacaggatttgaatgtactatcacaatagcagaaataccagctgaacacaaatggtggtttccatcttgcacaaaatgcaataaagcaacaatccctcacactacaggttatcactgtgaatcatgcaattgggatggatacaaatttaaatacaagctcaaattcctggcatctgatgaaacagatattgcagaaatgttttgttttgacactgtagcaaggcacatcgttgttgcccaaacgtgttccgcattaattctattgttgctgcacatgggagacaacgttctttaccaatgcaaataggaatttctgatcaacaaggaccatcaacacctcaaaacaaatcaaaaccgatgttattggaagactctccatctacaactttggaaaaattatctactacaactcctacaactgtagtaaggaagcttctatattccgaaactgacaacacgccgaaaacgcactcaatttcttttactcaattatcttttattcattttaagatttagtgagtattgacagttaaaaatacttatatttgttccatgttgacagtgcaaacaagagtaatatcaatagcccagaaaaagatgatggcgataaggaaaccgcacagcttgatacaatacccactaacaaaggaaaaggaccagcagatacaattgaatcgccacctaaaaggttcaaacaagggacgatacgcatcggaaaagaaatggacatcaaatcctccgagaactaaagtttcactcagatcttcgtcgaccttttgagttgcacaatgtctattttgcaacatatgtataattatatatgatgacctactcagctctttgaaaacaatttatgtaaatataacagcctaattctacgtagtggacaaaaatgttgactctgattacagctaaggtaactctatttcatataaacatataacatctgcagtaatcaaattagaaaaaatttctaacgcgcgcagggcacgcgccagtgactagtgtataagtattccctctattctaaatttaagttattttggctctctagatacaaaactcttatcggacatttaggtatacatctaggta

SEQ ID NO: 17169 - DNA, 1956 bp, Zea Mays
atatcggtcagtttgccatcagaacaaggagaaaaaaaggttccggtcttcatcccttccatttccaaaggacgacgctctcaccattcacgaacggcgactgcggatcgatcgtgcgtcgtctcctgcgccggcctctcttcaagtcaggttacacacaagcttcaaattatcgcaaaattcctcttacatatctacatctcataccggaccaggtctcataccggaccagaaaaatggaatacactttattacctgatttagcaccgcataagatacatgcaaagattcaagtacatgtatctagaaagtggcttttccgaggtgctactgatagtggaccactacaacatgttgatatggttttgtctgatcgagagggtaatgctatttatgctgaaatccctggaaatttagctgaacaaaaagcaacaaatattgaagaaggaggagtttatgatatcaacagattcagagtgtgcgcagcaaaaactgttttcaaaatagtggatggggacaaaatgatccaattcacatttcataccatagtaaaatgtgccacaagccctccaacaacatttccattatatgtttatcggctaacatcatttgatctaattgagcctcatgttcaaactacaaataactttgttggtgtctacctaagtggtggtcctgcctgtagatggtacttcaatccaacaattccagaggcagaaccttatcttaccagccagtctacaaaaagaattgtgttacagcttccccaaaatttacaacatcctccagcgatggaaacgaagccaattgtcgaacataaatccctctatgaacttcttacagttaacccatatgatttcccggaaacaggatttgaatgtactatcacaatagcagaaataccagctgaacacaaatggtggtttccatcttgcacaaaatgcaataaagcaacaatccctcacactacaggttatcactgtgaatcatgcaattgggatggatacaaatttaaatacaagctcaaattcctggcatctgatgaaacagatattgcagaaatgttttgttttgacactgtagcaaggcacatcgttgttgcccaaacgtgttccgcattaattctattgttgctgcacatgggagacaacgttctttaccaatgcaaataggaatttctgatcaacaaggaccatcaacacctcaaaacaaatcaaaaccgatgttattggaagactctccatctacaactttggaaaaattatctactacaactcctacaacttaaggaagcttctatattccgaaactgacaacacgccgaaaacgcactcaatttcttttactcaattatcttttattcattttaagatttagtgagtattgacagttaaaaatacttatatttgttccatgttgacagtgcaaacaagagtaatatcaatagcccagaaaaagatgatggcgataaggaaaccgcacagcttgatacaatacccactaacaaaggaaaaggaccagcagatacaattgaatcgccacctaaaaggttcaaacaagggacgatacgcatcggaaaagaaatggacatcaaatcctccgagaactaaagtttcactcagatcttcgtcgaccttttgagttgcacaatgtctattttgcaacatatgtataattatatatgatgacctactcagctctttgaaaacaatttatgtaaatataacagcctaattctacgtagtggacaaaaatgttgactctgattacagctaaggtaactctatttcatataaacatataacatctgcagtaatcaaattagaaaaaatttctaacgcgcgcagggcacgcgccagtgactagtgtataagtattccctctattctaaatttaagttattttggctctctagatacaaaactcttatcggacatttaggtatacatctaggta

SEQ ID NO: 17170 - DNA, 1827 bp, Zea Mays
atatcggtcagtttgccatcagaacaaggagaaaaaaaggttccggtcttcatcccttccatttccaaaggacgacgctctcaccattcacgaacggcgactgcggatcgatcgtgcgtcgtctcctgcgccggcctctcttcaagtcaggttacacacaagcttcaaattatcgcaaaattcctcttacatatctacatctcataccggaccaggtctcataccggaccagtttgcttggacttattacgaaacttcttttactcagctggagcttccatcaaaacatatgttcttggtgtcataactgaaattcatgaactgacacctgtgcatgtccgaagtcaactaacaccaacagtgacaaggaccattatcatagaagatctcagcgacaaaacaatgaagatcactttatgggcagattaggcgataatgttcaatcttcatgacgtgtacgatgcaaatacaaataaaccgattcttgtgctattcgtcgggtgcttaccaaaatttttcaaaggtgtctacctaagtggtggtcctgcctgtagatggtacttcaatccaacaattccagaggcagaaccttatcttaccagtctacaaaaagaattgtgttacagcttccccaaaatttacaacatcctccagcgatggaaacgaagccaattgtcgaacataaatccctctatgaacttcttacagttaacccatatgatttcccggatttgaatgtactatcacaatagcagaaataccagctgaacacaaatggtggtttccatcttgcacaaaatgcaataaagcaacaatccctcacactacaggttatcactgtgaatcatgcaattgggatggatacaaatttaaatacaagctcaaattcctggcatctgatgaaacagatattgcagaaatgttttgttttgacactgtagcaaggcacatcgttggtaaatcctttgcccaaacgtgttccgcattaattctattgttgctgcacatgggagacaacgttctttaccaatgcaaataggaatttctgatcaacaaggaccatcaacacctcaaaacaaatcaaaaccgatgttattggaagactctccatctacaactttggaaaaattatctactacaactcctacaactgtagtaaggaagcttctatattccgaaactgacaacacgccgaaaacgcactcaatttcttttactcaattatcttttattcattttaagatttagtgagtattgacagttaaaaatacttatatttgttccatgttgacagtgcaaacaagagtaatatcaatagcccagaaaaagatgatggcgataaggaaaccgcacagcttgatacaatacccactaacaaaggaaaaggaccagcagatacaattgaatcgccacctaaaaggttcaaacaagggacgatacgcatcggaaaagaaatggacatcaaatcctccgagaactaaagtttcactcagatcttcgtcgaccttttgagttgcacaatgtctattttgcaacatatgtataattatatatgatgacctactcagctctttgaaaacaatttatgtaaatataacagcctaattctacgtagtggacaaaaatgttgactctgattacagctaaggtaactctatttcatataaacatataacatctgcagtaatcaaattagaaaaaatttctaacgcgcgcagggcacgcgccagtgactagtgtataagtattccctctattctaaatttaagttattttggctctctagatacaaaactcttatcggacatttaggtatacatctaggta

SEQ ID NO: 17171 - DNA, 2159 bp, Zea Mays
atatcggtcagtttgccatcagaacaaggagaaaaaaaggttccggtcttcatcccttccatttccaaaggacgacgctctcaccattcacgaacggcgactgcggatcgatcgtgcgtcgtctcctgcgccggcctctcttcaagtcagttcccaagcagcccacagattctattgattgtgggtgtctttcagcatctgagggtttctaccagtccaggttacacacaagcttcaaattatcgcaaaattcctcttacatatctacatctcataccggaccaggtctcataccggaccagaaaaatggaatacactttattacctgatttagcaccgcataagatacatgcaaagattcaagtacatgtatctagaaagtggcttttccgaggtgctactgatagtggaccactacaacatgttgatatggttttgtctgatcgagagggtaatgctatttatgctgaaatccctggaaatttagctgaacaaaaagcaacaaatattgaagaaggaggagtttatgatatcaacagattcagagtgtgcgcagcaaaaactgttttcaaaatagtggatggggacaaaatgatccaattcacatttcataccatagtaaaatgtgccacaagccctccaacaacatttccattatatgtttatcggctaacatcatttgatctaattgagcctcatgttcaaactacaaataactttgttggtgtctacctaagtggtggtcctgcctgtagatggtacttcaatccaacaattccagaggcagaaccttatcttaccagtctacaaaaagaattgtgttacagcttccccaaaatttacaacatcctccagcgatggaaacgaagccaattgtcgaacataaatccctctatgaacttcttacagttaacccatatgatttcccggaaacaggatttgaatgtactatcacaatagcagaaataccagctgaacacaaatggtggtttccatcttgcacaaaatgcaataaagcaacaatccctcacactacaggttatcactgtgaatcatgcaattgggatggatacaaatttaaatacaagctcaaattcctggcatctgatgaaacagatattgcagaaatgttttgttttgacactgtagcaaggcacatcgttggtaaatcctgtgagattgttttacgaagtgtcactgaacagtctcctatcccacctgatctagcacaaatcatatctctgaaatttacattcagagtcacaattgacaatcaatctcttttccaacaaaccagttgcccaaacgtgttccgcattaattctattgttgctgcacatgggagacaacgttctttaccaatgcaaataggaatttctgatcaacaaggaccatcaacacctcaaaacaaatcaaaaccgatgttattggaagactctccatctacaactttggaaaaattatctactacaactcctacaactgtagtaaggaagcttctatattccgaaactgacaacacgccgaaaacgcactcaatttcttttactcaattatcttttattcattttaagatttagtgagtattgacagttaaaaatacttatatttgttccatgttgacagtgcaaacaagagtaatatcaatagcccagaaaaagatgatggcgataaggaaaccgcacagcttgatacaatacccactaacaaaggaaaaggaccagcagatacaattgaatcgccacctaaaaggttcaaacaagggacgatacgcatcggaaaagaaatggacatcaaatcctccgagaactaaagtttcactcagatcttcgtcgaccttttgagttgcacaatgtctattttgcaacatatgtataattatatatgatgacctactcagctctttgaaaacaatttatgtaaatataacagcctaattctacgtagtggacaaaaatgttgactctgattacagctaaggtaactctatttcatataaacatataacatctgcagtaatcaaattagaaaaaatttctaacgcgcgcagggcacgcgccagtgactagtgtataagtattccctctattctaaatttaagttattttggctctctagatacaaaactcttatcggacatttaggtatacatctaggta

SEQ ID NO: 17172 - DNA, 2035 bp, Zea Mays
cttgcatatcggtcagtttgccatcagaacaaggagaaaaaaaggttccggtcttcatcccttccatttccaaaggacgacgctctcaccattcacgaacggcgactgcggatcgatcgtgcgtcgtctcctgcgccggcctctcttcaagtcagttcccaagcagcccacagattctattgattgtgggtgtctttcagcatctgagggtttctaccagtccaggttacacacaagcttcaaattatcgcaaaattcctcttacatatctacatctcataccggaccaggtctcataccggaccagaaaaatggaatacactttattacctgatttagcaccgcataagatacatgcaaagattcaagtacatgtatctagaaagtggcttttccgaggtgctactgatagtggaccactacaacatgttgatatggttttgtctgatcgagagggtaatgctatttatgctgaaatccctggaaatttagctgaacaaaaagcaacaaatattgaagaaggaggagtttatgatatcaacagattcagagtgtgcgcagcaaaaactgttttcaaaatagtggatggggacaaaatgatccaattcacatttcataccatagtaaaatgtgccacaagccctccaacaacatttccattatatgtttatcggctaacatcatttgatctaattgagcctcatgttcaaactacaaataactttgttggtgtctacctaagtggtggtcctgcctgtagatggtacttcaatccaacaattccagaggcagaaccttatcttaccagccagtctacaaaaagaattgtgttacagcttccccaaaatttacaacatcctccagcgatggaaacgaagccaattgtcgaacataaatccctctatgaacttcttacagttaacccatatgatttcccggaaacaggatttgaatgtactatcacaatagcagaaataccagctgaacacaaatggtggtttccatcttgcacaaaatgcaataaagcaacaatccctcacactacaggttatcactgtgaatcatgcaattgggatggatacaaatttaaatacaagctcaaattcctggcatctgatgaaacagatattgcagaaatgttttgttttgacactgtagcaaggcacatcgttgttgcccaaacgtgttccgcattaattctattgttgctgcacatgggagacaacgttctttaccaatgcaaataggaatttctgatcaacaaggaccatcaacacctcaaaacaaatcaaaaccgatgttattggaagactctccatctacaactttggaaaaattatctactacaactcctacaactgtagtaaggaagcttctatattccgaaactgacaacacgccgaaaacgcactcaatttcttttactcaattatcttttattcattttaagatttagtgagtattgacagttaaaaatacttatatttgttccatgttgacagtgcaaacaagagtaatatcaatagcccagaaaaagatgatggcgataaggaaaccgcacagcttgatacaatacccactaacaaaggaaaaggaccagcagatacaattgaatcgccacctaaaaggttcaaacaagggacgatacgcatcggaaaagaaatggacatcaaatcctccgagaactaaagtttcactcagatcttcgtcgaccttttgagttgcacaatgtctattttgcaacatatgtataattatatatgatgacctactcagctctttgaaaacaatttatgtaaatataacagcctaattctacgtagtggacaaaaatgttgactctgattacagctaaggtaactctatttcatataaacatataacatctgcagtaatcaaattagaaaaaatttctaacgcgcgcagggcacgcgccagtgactagtgtataagtattccctctattctaaatttaagttattttggctctctagatacaaaactcttatcggacatttaggtatacatctaggta

SEQ ID NO: 17173 - DNA, 2031 bp, Zea Mays
cttggactccttgcatatcggtcagtttgccatcagaacaaggagaaaaaaaggttccggtcttcatcccttccatttccaaaggacgacgctctcaccattcacgaacggcgactgcggatcgatcgtgcgtcgtctcctgcgccggcctctcttcaagtcaggttacacacaagcttcaaattatcgcaaaattcctcttacatatctacatctcataccggaccaggtctcataccggaccagtttgcttggacttattacgaaacttcttttactcagctggagcttccatcaaaacataaaaatggaatacactttattacctgatttagcaccgcataagatacatgcaaagattcaagtacatgtatctagaaagtggcttttccgaggtgctactgatagtggaccactacaacatgttgatatggttttgtctgatcgagagggtaatgctatttatgctgaaatccctggaaatttagctgaacaaaaagcaacaaatattgaagaaggaggagtttatgatatcaacagattcagagtgtgcgcagcaaaaactgttttcaaaatagtggatggggacaaaatgatccaattcacatttcataccatagtaaaatgtgccacaagccctccaacaacatttccattatatgtttatcggctaacatcatttgatctaattgagcctcatgttcaaactacaaataactttgttggtgtctacctaagtggtggtcctgcctgtagatggtacttcaatccaacaattccagaggcagaaccttatcttaccagccagtctacaaaaagaattgtgttacagcttccccaaaatttacaacatcctccagcgatggaaacgaagccaattgtcgaacataaatccctctatgaacttcttacagttaacccatatgatttcccggaaacaggatttgaatgtactatcacaatagcagaaataccagctgaacacaaatggtggtttccatcttgcacaaaatgcaataaagcaacaatccctcacactacaggttatcactgtgaatcatgcaattgggatggatacaaatttaaatacaagctcaaattcctggcatctgatgaaacagatattgcagaaatgttttgttttgacactgtagcaaggcacatcgttgttgcccaaacgtgttccgcattaattctattgttgctgcacatgggagacaacgttctttaccaatgcaaataggaatttctgatcaacaaggaccatcaacacctcaaaacaaatcaaaaccgatgttattggaagactctccatctacaactttggaaaaattatctactacaactcctacaactgtagtaaggaagcttctatattccgaaactgacaacacgccgaaaacgcactcaatttcttttactcaattatcttttattcattttaagatttagtgagtattgacagttaaaaatacttatatttgttccatgttgacagtgcaaacaagagtaatatcaatagcccagaaaaagatgatggcgataaggaaaccgcacagcttgatacaatacccactaacaaaggaaaaggaccagcagatacaattgaatcgccacctaaaaggttcaaacaagggacgatacgcatcggaaaagaaatggacatcaaatcctccgagaactaaagtttcactcagatcttcgtcgaccttttgagttgcacaatgtctattttgcaacatatgtataattatatatgatgacctactcagctctttgaaaacaatttatgtaaatataacagcctaattctacgtagtggacaaaaatgttgactctgattacagctaaggtaactctatttcatataaacatataacatctgcagtaatcaaattagaaaaaatttctaacgcgcgcagggcacgcgccagtgactagtgtataagtattccctctattctaaatttaagttattttggctctctagatacaaaactcttatcggacatttaggtatacatctaggta

SEQ ID NO: 17174 - DNA, 2023 bp, Zea Mays
cttccaggtccttggactccttgcatatcggtcagtttgccatcagaacaaggagaaaaaaaggttccggtcttcatcccttccatttccaaaggacgacgctctcaccattcacgaacggcgactgcggatcgatcgtgcgtcgtctcctgcgccggcctctcttcaagtcaggttacacacaagcttcaaattatcgcaaaattcctcttacatatctacatctcataccggaccaggtctcataccggaccagaaaaatggaatacactttattacctgatttagcaccgcataagatacatgcaaagattcaagtacatgtatctagaaagtggcttttccgaggtgctactgatagtggaccactacaacatgttgatatggttttgtctgatcgagagggtaatgctatttatgctgaaatccctggaaatttagctgaacaaaaagcaacaaatattgaagaaggaggagtttatgatatcaacagattcagagtgtgcgcagcaaaaactgttttcaaaatagtggatggggacaaaatgatccaattcacatttcataccatagtaaaatgtgccacaagccctccaacaacatttccattatatgtttatcggctaacatcatttgatctaattgagcctcatgttcaaactacaaataactttgttggtgtctacctaagtggtggtcctgcctgtagatggtacttcaatccaacaattccagaggcagaaccttatcttaccagccagtctacaaaaagaattgtgttacagcttccccaaaatttacaacatcctccagcgatggaaacgaagccaattgtcgaacataaatccctctatgaacttcttacagttaacccatatgatttcccggaaacaggatttgaatgtactatcacaatagcagaaataccagctgaacacaaatggtggtttccatcttgcacaaaatgcaataaagcaacaatccctcacactacaggttatcactgtgaatcatgcaattgggatggatacaaatttaaatacaagctcaaattcctggcatctgatgaaacagatattgcagaaatgttttgttttgacactgtagcaaggcacatcgttgagtcacaattgacaatcaatctcttttccaacaaaccagttgcccaaacgtgttccgcattaattctattgttgctgcacatgggagacaacgttctttaccaatgcaaataggaatttctgatcaacaaggaccatcaacacctcaaaacaaatcaaaaccgatgttattggaagactctccatctacaactttggaaaaattatctactacaactcctacaactgtagtaaggaagcttctatattccgaaactgacaacacgccgaaaacgcactcaatttcttttactcaattatcttttattcattttaagatttagtgagtattgacagttaaaaatacttatatttgttccatgttgacagtgcaaacaagagtaatatcaatagcccagaaaaagatgatggcgataaggaaaccgcacagcttgatacaatacccactaacaaaggaaaaggaccagcagatacaattgaatcgccacctaaaaggttcaaacaagggacgatacgcatcggaaaagaaatggacatcaaatcctccgagaactaaagtttcactcagatcttcgtcgaccttttgagttgcacaatgtctattttgcaacatatgtataattatatatgatgacctactcagctctttgaaaacaatttatgtaaatataacagcctaattctacgtagtggacaaaaatgttgactctgattacagctaaggtaactctatttcatataaacatataacatctgcagtaatcaaattagaaaaaatttctaacgcgcgcagggcacgcgccagtgactagtgtataagtattccctctattctaaatttaagttattttggctctctagatacaaaactcttatcggacatttaggtatacatctaggta

SEQ ID NO: 17175 - DNA, 741 bp, Zea Mays
atatcggtcagtttgccatcagaacaaggagaaaaaaaggttccggtcttcatcccttccatttccaaaggacgacgctctcaccattcacgaacggcgactgcggatcgatcgtgcgtcgtctcctgcgccggcctctcttcaagtcaggttacacacaagcttcaaattatcgcaaaattcctcttacatatctacatctcataccggaccaggtctcataccggaccagaaaaatggaatacactttattacctgatttagcaccgcataagatacatgcaaagattcaagtacatgtatctagaaagtggcttttccgaggtgctactgatagtggaccactacaacatgttgatatggttttgtctgatcgagagggtaatgctatttatgctgaaatccctggaaatttagctgaacaaaaagcaacaaatattgaagaaggaggagtttatgatatcaacagattcagagtgtgcgcagcaaaaactgttttcaaaatagtggatggggacaaaatgatccaattcacatttcataccatagtaaaatgtgccacaagccctccaacaacatttccattatatgtttatcggctaacatcatttgatctaattgagcctcatgttcaaactacaaataactttgttggtgtctacctaagtggtggtcctgcctgtagatggtacttcaatccaacaattccagaggcagaaccttatcttaccaccagtctac

SEQ ID NO: 17176 - DNA, 1008 bp, Zea Mays
tgtgttttgaattgaagggatagtgctgtaggtttttatttctcagtcaagatcgcacactttctctgcctctccatacaatacaggtggagataccggatacgtcgtggaacatacagaacatacccaaaaaaaaaaaacgcgaacacccctcgtttgactgttcagagctccaccttcttggtctgatgatgaccatccccggcgccgccgccaatactcttcttcgcgtcgccgtcaccgtctcccccggcaatcccaacgacgcgcgggcccttgacctgctcgggggccagcttccggaaccgcacggtgaggacgccgttgtcgaggctggcgccgacggagtcgaggtcggcgttctcggggaggcggaactggcgccagaacctgccgtgggagcgctcctcgcggtgccagtggtcgcccctgtgctcctccgcgcgccgccgctcgccgctgactcgcagcacccggctgtagtcctccacctcgatcttgaggtcctccctgcgcatcccgggcacgtccaccacgatctcgtgcgcgtcgggagtctcgcgccagtccgcgcgcgccatggagaccatggccacgtcgtcccggtcgaagcccaaggggacgtgctccaggatccggaacgggtcggccaggaggcccaccccgggcccggacagcggagacgccgccgccgccgcggcctcgtcgcccccgcgcctcccttcgccgaaccacgggagcagcgcgccgtccgccagtgccgccgccatcacggcgaggcacgcgagcgcgagcgctgctgcggctctcctcgacatcgtcacggacccgaaggcttcagggcagtgcgtgcgcactttaaagttcaatctaacagaactcgctgatcagtgagcaaaaaactacgcccgattgattaaaggtcgacactcgcgccaagatttcaacttcaagacaagaatcgacgcgcaagccagttgaccgaggcggggtatatttatagcgtgg

SEQ ID NO: 17177 - DNA, 823 bp, Zea Mays
ttaaaaagaagaagaaaacatcgtgtgtggagcagaaagctccggctccgtgcgaagaggatggatagataagcaacgggtgggcctcgatgaggagaagcctgggccactaaccgccgccgcatcgggagccttcgtttggccacggttcagctagctatcacgcgcgaaggcccacccagacccagggaggcggcgattcgcggcggtgagggcgtccgcggagacgatggcgacggagaagctgggcatcaaggtggagcgcaacccgcccgagtcccgtctctccgagctcggcgtccgccagtggcccaagtgggggtgcgagaagagcaagttcccgtggacctactccgccaaggagacgtgctacctgctgcaggggaaggtgaaggtgtaccccgaaggccacggggaggagttcgtggagatcggcgcgggagaccttgtcgtcttccccaagggcatgagctgcacctgggacgtcgccgaggccgtcgacaagcactacaacttcgagtagccgccgccgccgactagccctgcggcgctcgatgtagacttgctgtgctcttgtactctgaacctatgatgctccactccagagttaacagaccgtgtaataaagctccggattaggggactacaatgctgtactatctgtttcagatcccgttcggttagctgtgataagacctgaaactattccagctgatcagttttaatacaaataaaactatggaacagttttagaggatccgttccgaacaaaacgaaacaatccctaacgactaacactgacgttctcttatgcgagcttgtt

SEQ ID NO: 17178 - DNA, 850 bp, Zea Mays
cgcacgggcatatacctagttaaaaagaagaagaaaacatcgtgtgtggagcagaaagctccggctccgtgcgaagaggatggatagataagcaacgggtgggcctcgatgaggagaagcctgggccactaaccgccgccgcatcgggagccttcgtttggccacggttcagctagctatcacgcgcgaaggcccacccagacccagcgcatcagggaggcggcgattcgcggcggtgagggcgtccgcggagacgatggcgacggagaagctgggcatcaaggtggagcgcaacccgcccgagtcccgtctctccgagctcggcgtccgccagtggcccaagtgggggtgcgagaagagcaagttcccgtggacctactccgccaaggagacgtgctacctgctgcaggggaaggtgaaggtgtaccccgaaggccacggggaggagttcgtggagatcggcgcgggagaccttgtcgtcttccccaagggcatgagctgcacctgggacgtcgccgaggccgtcgacaagcactacaacttcgagtagccgccgccgccgactagccctgcggcgctcgatgtagacttgctgtgctcttgtactctgaacctatgatgctccactccagagttaacagaccgtgtaataaagctccggattaggggactacaatgctgtactatctgtttcagatcccgttcggttagctgtgataagacctgaaactattccagctgatcagttttaatacaaataaaactatggaacagttttagaggatccgttccgaacaaaacgaaacaatccctaacgactaacactgacgttctcttatgcgagcttgtt

SEQ ID NO: 17179 - DNA, 351 bp, Zea Mays
atggccaaggccagcttcgaccacaactactccatcgccagcagtcgtggcgagctcgaccgagtcttgacgcaccagccgccgtggcactccatcttcggcattggcaacgacaaccatggcagtgagggcaagaagaaggcggaaacttgcaacgaggactgtgcctgcgcggcatcagtgagggcggcggccgtgggtcgtcgtgctcatgggagaaaagctaaagaggatacgtaccagcagtggcagcagcaaggaacaggtgcgccgaggcccaaggccgagccaccgaggcttctccgacttgacgacagccgctgcgtcgggtggggaagagtggaagactga

SEQ ID NO: 17180 - DNA, 2159 bp, Zea Mays
atcacttgtccacagtccacactgcatccacggaccctcctccacgctgccacgcacacgctccgacacggcgacaccccatcctccgcattcccccatgtccccccgccacgatacgctccgcctcctccgcctccgcttacctcctcaccaccccctacgccgcctcctccactacgcgtgcagccccgacgcccacccgccgccgcaacacccggccccggcagcgccgcacgccgctgagctctggatagccaaggcgctcgcgtcagcggccctccttcgtccgcactgcctcccggccttctgccgcctcgcgccctccccgcttgctgccgcggcctctgtccggctcgcgccgtgcgccggctctgccctccgcctcttctccgcctgcactcccagccgctctctgtacctccttctgagcagtcctacatccacgttatcgcgtcgctgtgccgatcaggtcgccacagggacgcactcaagctgttcgaccaaatgacggatcagtcagggtacgtacctgacgcagggttcttctcgttcgtggccggctcctgcaccaacgccggccttcttgatgctgcggcgaatttgctcacaaagggctcctggtttggttgccgcattgagtggtatgcatataacaacctcttgaacacgttaattgcccatggccgtgcgcaggatgctgttgctttgtttgagagttggattcaggatgggctgtattctcccgatgtctggagttttaatgttgtcattaagggggtgtgtcgggtggggaatttgcagaaggcacttgagttagttgaaaggatgactgagtttgggtgttccccggataccatcacacaaaatattcttgttgatgggctatgcagggtgaagcaggtgaacaagggccatgaggtattgaggaggctccagagggatggtgtttgcatgcccaatgttgtgacatacacctcagtaatatcaggttattgtaaggctggcaggatgaaggatgcattttcagtgtataatgacatgcttcaatctggaacaagacccaacacggtcacatacaacgtgcttattaatggatatggaaaggctttggacatggaatctgcagtgagaatgtattggcagctgattctccatagttgccctcccgatgttgtgacatttaattctttgattgatggatattgtcgatgtggacagcttgatgatgccatgaggatttggatggagatgggtcagcatcatattcaaccaaatgtatacaccttctccatcataatacactcactttgtacgcagaacagatcagcagaagctctcagtcttctaagggaattgaatatgcgagccgacattgttccacagacatttatatataacccgatcattgatatactgtgcaagggaggaaaggtggatgaagcaaacttgattgttacagacatggaagagaaagggtgtcatcctgataagtatacatacactattctaataattgggcactgtatgaagggtaggataccagaggcagtcactctttttcacaaaatggtggaaactgggtgtcgccctgacaatattacaattaattcttttattagttgtgttttgaaggctgggatgcctaatgaggtacatcaaataatgcttattgcttcaggtcatgcttcagctagtcagaaagttcattctcaccagtgccaaagactagatatgtcagttgctgtatagttgaattctgctaacataaagaatgtagggaagaacacctgagctgtctcagatgcttattgcagcatagaactgggactgggacttctctagatgagaacaatgaggcatggacattcatccaaagaaactcagatgtgaatattgaaatgttggttgcacaaggctacataacaataaaaaattagtcaaaccaagttgatgtcgtgtaacaatacaaaggtatgaagattcattgcttgaagaattggatggaagtaaatttacaccctagcagtggtacttcagttgtattctttctttagcagcctgcctcaatgcttgaagaattggatggaagttttttttgtaggaaaagagtacgcagtatgcacattggcgtgcattcttcatgtctacacaagcctgac

SEQ ID NO: 17181 - DNA, 2193 bp, Zea Mays
atcacttgtccacagtccacactgcatccacggaccctcctccacgctgccacgcacacgctccgacacggcgacaccccatcctccgcattcccccatgtccccccgccacgatacgctccgcctcctccgcctccgcttacctcctcaccaccccctacgccgcctcctccactacgcgtgcagccccgacgcccacccgccgccgcaacacccggccccggcagcgccgcacgccgctgagctctggatagccaaggcgctcgcgtcagcggccctccttcgtccgcactgcctcccggccttctgccgcctcgcgccctccccgcttgctgccgcggcctctgtccggctcgcgccgtgcgccggctctgccctccgcctcttctccgcctgcactcccagccgctctctgtacctccttctgagcagtcctacatccacgttatcgcgtcgctgtgccgatcaggtcgccacagggacgcactcaagctgttcgaccaaatgacggatcagtcagggtacgtacctgacgcagggttcttctcgttcgtggccggctcctgcaccaacgccggccttcttgatgctgcggcgaatttgctcacaaagggctcctggtttggttgccgcattgagtggtatgcatataacaacctcttgaacacgttaattgcccatggccgtgcgcaggatgctgttgctttgtttgagagttggattcaggatgggctgtattctcccgatgtctggagttttaatgttgtcattaagggggtgtgtcgggtggggaatttgcagaaggcacttgagttagttgaaaggatgactgagtttgggtgttccccggataccatcacacaaaatattcttgttgatgggctatgcagggtgaagcaggtgaacaagggccatgaggtattgaggaggctccagagggatggtgtttgcatgcccaatgttgtgacatacacctcagtaatatcaggttattgtaaggctggcaggatgaaggatgcattttcagtgtataatgacatgcttcaatctggaacaagacccaacacggtcacatacaacgtgcttattaatggatatggaaaggctttggacatggaatctgcagtgagaatgtattggcagctgattctccatagttgccctcccgatgttgtgacatttaattctttgattgatggatattgtcgatgtggacagcttgatgatgccatgaggatttggatggagatgggtcagcatcatattcaaccaaatgtatacaccttctccatcataatacactcactttgtacgcagaacagatcagcagaagctctcagtcttctaagggaattgaatatgcgagccgacattgttccacagacatttatatataacccgatcattgatatactgtgcaagggaggaaaggtggatgaagcaaacttgattgttacagacatggaagagaaagggtgtcatcctgataagtatacatacactattctaataattgggcactgtatgaagggtaggataccagaggcagtcactctttttcacaaaatggtggaaactgggtgtcgccctgacaatattacaattaattcttttattagttgtgttttgaaggctgggatgcctaatgaggtacatcaaataatgcttattgcttcaggtcatgcttcagctagtcagaaagttcattctcaccagtgccaaagactagatatgtcagttgctgtatagttgaattctgctaacataaagaatgtagggaagaacacctgagctgtctcagatgcttattgcagcatagaactgggactgggacttctctagatgagaacaatgaggcatggacattcatccaaagaaactcagatgtgaatattgaaatgttggttgcacaaggctacataacaataaaaaattagtcaaaccaagttgatgtcgtgtaacaatacaaagttgggagattgttaatggataagattgaattagcagatgaagattcattgcttgaagaattggatggaagtaaatttacaccctagcagtggtacttcagttgtattctttctttagcagcctgcctcaatgcttgaagaattggatggaagttttttttgtaggaaaagagtacgcagtatgcacattggcgtgcattcttcatgtctacacaagcctgac

SEQ ID NO: 17182 - DNA, 2157 bp, Zea Mays
atcacttgtccacagtccacactgcatccacggaccctcctccacgctgccacgcacacgctccgacacggcgacaccccatcctccgcattcccccatgtccccccgccacgatacgctccgcctcctccgcctccgcttacctcctcaccaccccctacgccgcctcctccactacgcgtgcagccccgacgcccacccgccgccgcaacacccggccccggcagcgccgcacgccgctgagctctggatagccaaggcgctcgcgtcagcggccctccttcgtccgcactgcctcccggccttctgccgcctcgcgccctccccgcttgctgccgcggcctctgtccggctcgcgccgtgcgccggctctgccctccgcctcttctccgcctgcactcccagccgctctctgtacctccttctgagcagtcctacatccacgttatcgcgtcgctgtgccgatcaggtcgccacagggacgcactcaagctgttcgaccaaatgacggatcagtcagggtacgtacctgacgcagggttcttctcgttcgtggccggctcctgcaccaacgccggccttcttgatgctgcggcgaatttgctcacaaagggctcctggtttggttgccgcattgagtggtatgcatataacaacctcttgaacacgttaattgcccatggccgtgcgcaggatgctgttgctttgtttgagagttggattcaggatgggctgtattctcccgatgtctggagttttaatgttgtcattaagggggtgtgtcgggtggggaatttgcagaaggcacttgagttagttgaaaggatgactgagtttgggtgttccccggataccatcacacaaaatattcttgttgatgggctatgcagggtgaagcaggtgaacaagggccatgaggtattgaggaggctccagagggatggtgtttgcatgcccaatgttgtgacatacacctcagtaatatcaggttattgtaaggctggcaggatgaaggatgcattttcagtgtataatgacatgcttcaatctggaacaagacccaacacggtcacatacaacgtgcttattaatggatatggaaaggctttggacatggaatctgcagtgagaatgtattggcagctgattctccatagttgccctcccgatgttgtgacatttaattctttgattgatggatattgtcgatgtggacagcttgatgatgccatgaggatttggatggagatgggtcagcatcatattcaaccaaatgtatacaccttctccatcataatacactcactttgtacgcagaacagatcagcagaagctctcagtcttctaagggaattgaatatgcgagccgacattgttccacagacatttatatataacccgatcattgatatactgtgcaagggaggaaaggtggatgaagcaaacttgattgttacagacatggaagagaaagggtgtcatcctgataagtatacatacactattctaataattgggcactgtatgaagggtaggataccagaggcagtcactctttttcacaaaatggtggaaactgggtgtcgccctgacaatattacaattaattcttttattagttgtgttttgaaggctgggatgcctaatgaggtacatcaaataatgcttattgcttcaggtcatgcttcagctagtcagaaagttcattctcaccagtgccaaagactagatatgtcagttgctgtatagttgaattctgctaacataaagaatgtagggaagaacacctgagctgtctcagatgcttattgcagcatagaactgggactgggacttctctagatgagaacaatgaggcatggacattcatccaaagaaactcagatgtgaatattgaaatgttggttgcacaaggctacataacaataaaaaattagtcaaaccaagttgatgtcgtgtaacaatacaaagatgaagattcattgcttgaagaattggatggaagtaaatttacaccctagcagtggtacttcagttgtattctttctttagcagcctgcctcaatgcttgaagaattggatggaagttttttttgtaggaaaagagtacgcagtatgcacattggcgtgcattcttcatgtctacacaagcctgac

SEQ ID NO: 17183 - DNA, 2859 bp, Zea Mays
atcacttgtccacagtccacactgcatccacggaccctcctccacgctgccacgcacacgctccgacacggcgacaccccatcctccgcattcccccatgtccccccgccacgatacgctccgcctcctccgcctccgcttacctcctcaccaccccctacgccgcctcctccactacgcgtgcagccccgacgcccacccgccgccgcaacacccggccccggcagcgccgcacgccgctgagctctggatagccaaggcgctcgcgtcagcggccctccttcgtccgcactgcctcccggccttctgccgcctcgcgccctccccgcttgctgccgcggcctctgtccggctcgcgccgtgcgccggctctgccctccgcctcttctccgcctgcactcccagccgctctctgtacctccttctgagcagtcctacatccacgttatcgcgtcgctgtgccgatcaggtcgccacagggacgcactcaagctgttcgaccaaatgacggatcagtcagggtacgtacctgacgcagggttcttctcgttcgtggccggctcctgcaccaacgccggccttcttgatgctgcggcgaatttgctcacaaagggctcctggtttggttgccgcattgagtggtatgcatataacaacctcttgaacacgttaattgcccatggccgtgcgcaggatgctgttgctttgtttgagagttggattcaggatgggctgtattctcccgatgtctggagttttaatgttgtcattaagggggtgtgtcgggtggggaatttgcagaaggcacttgagttagttgaaaggatgactgagtttgggtgttccccggataccatcacacaaaatattcttgttgatgggctatgcagggtgaagcaggtgaacaagggccatgaggtattgaggaggctccagagggatggtgtttgcatgcccaatgttgtgacatacacctcagtaatatcaggttattgtaaggctggcaggatgaaggatgcattttcagtgtataatgacatgcttcaatctggaacaagacccaacacggtcacatacaacgtgcttattaatggatatggaaaggctttggacatggaatctgcagtgagaatgtattggcagctgattctccatagttgccctcccgatgttgtgacatttaattctttgattgatggatattgtcgatgtggacagcttgatgatgccatgaggatttggatggagatgggtcagcatcatattcaaccaaatgtatacaccttctccatcataatacactcactttgtacgcagaacagatcagcagaagctctcagtcttctaagggaattgaatatgcgagccgacattgttccacagacatttatatataacccgatcattgatatactgtgcaagggaggaaaggtggatgaagcaaacttgattgttacagacatggaagagaaagggtgtcatcctgataagtatacatacactattctaataattgggcactgtatgaagggtaggataccagaggcagtcactctttttcacaaaatggtggaaactgggtgtcgccctgacaatattacaattaattcttttattagttgtgttttgaaggctgggatgcctaatgaggtacatcaaataatgcttattgcttcaggtcatgcttcagctagtcagaaagttcattctcaccagtgccaaagactagatatgtcagttgctgtatagttgaattctgctaacataaagaatgtagggaagaacacctgagctgtctcagatgcttattgcagcatagaactgggactgggacttctctagatgagaacaatgaggcatggacattcatccaaagaaactcagatgtgaatattgaaatgttggttgcacaaggctacataacaataaaaaattagtcaaaccaagttgatgtcgtgtaacaatacaaaggtaagctatttggtgcattgtgcattcagtgatttgctgagtctcatgaagaagagtcaaacaggtgtccatagttctgctctactgcagtggtgctgcaaaacatgcacacatgtatgctggacacactcatgtaaacattatatccaagcatgttctgttagttagggctggaaacgagccgagccgaactcggctcggtgcgtctcgttggctgaccgagctcagctcggctcgactcatccactcaacgagctgaaggaggaggctcgactcggctcaaagtcggctcgcgagctataccttgataaataatactacattatatagtgatttaatattatatgaatatgaaaaatataatcatctttaacattatatgtaatctaaattataaattgtcatatattcatcattaaaggctaaggaacgagtcagatatctataaaattatccaatattcatcattattttataggttgattaatttggcacaactcgtgagtcggctcgggtcgttggaccaacgagctcgaaaacctagctcggctcgcttgaggctcgcgagctgctccgagccacctgagctcgagccaactcgcgagcctcaagtttttttttcagcccctctttgtacttttgccaaagattgaaaagcaggtacagttgggagattgttaatggataagattgaattagcagatgaagattcattgcttgaagaattggatggaagtaaatttacaccctagcagtggtacttcagttgtattctttctttagcagcctgcctcaatgcttgaagaattggatggaagttttttttgtaggaaaagagtacgcagtatgcacattggcgtgcattcttcatgtctacacaagcctgac

SEQ ID NO: 17184 - DNA, 2165 bp, Zea Mays
atcacttgtccacagtccacactgcatccacggaccctcctccacgctgccacgcacacgctccgacacggcgacaccccatcctccgcattcccccatgtccccccgccacgatacgctccgcctcctccgcctccgcttacctcctcaccaccccctacgccgcctcctccactacgcgtgcagccccgacgcccacccgccgccgcaacacccggccccggcagcgccgcacgccgctgagctctggatagccaaggcgctcgcgtcagcggccctccttcgtccgcactgcctcccggccttctgccgcctcgcgccctccccgcttgctgccgcggcctctgtccggctcgcgccgtgcgccggctctgccctccgcctcttctccgcctgcactcccagccgctctctgtacctccttctgagcagtcctacatccacgttatcgcgtcgctgtgccgatcaggtcgccacagggacgcactcaagctgttcgaccaaatgacggatcagtcagggtacgtacctgacgcagggttcttctcgttcgtggccggctcctgcaccaacgccggccttcttgatgctgcggcgaatttgctcacaaagggctcctggtttggttgccgcattgagtggtatgcatataacaacctcttgaacacgttaattgcccatggccgtgcgcaggatgctgttgctttgtttgagagttggattcaggatgggctgtattctcccgatgtctggagttttaatgttgtcattaagggggtgtgtcgggtggggaatttgcagaaggcacttgagttagttgaaaggatgactgagtttgggtgttccccggataccatcacacaaaatattcttgttgatgggctatgcagggtgaagcaggtgaacaagggccatgaggtattgaggaggctccagagggatggtgtttgcatgcccaatgttgtgacatacacctcagtaatatcaggttattgtaaggctggcaggatgaaggatgcattttcagtgtataatgacatgcttcaatctggaacaagacccaacacggtcacatacaacgtgcttattaatggatatggaaaggctttggacatggaatctgcagtgagaatgtattggcagctgattctccatagttgccctcccgatgttgtgacatttaattctttgattgatggatattgtcgatgtggacagcttgatgatgccatgaggatttggatggagatgggtcagcatcatattcaaccaaatgtatacaccttctccatcataatacactcactttgtacgcagaacagatcagcagaagctctcagtcttctaagggaattgaatatgcgagccgacattgttccacagacatttatatataacccgatcattgatatactgtgcaagggaggaaaggtggatgaagcaaacttgattgttacagacatggaagagaaagggtgtcatcctgataagtatacatacactattctaataattgggcactgtatgaagggtaggataccagaggcagtcactctttttcacaaaatggtggaaactgggtgtcgccctgacaatattacaattaattcttttattagttgtgttttgaaggctgggatgcctaatgaggtacatcaaataatgcttattgcttcaggtcatgcttcagctagtcagaaagttcattctcaccagtgccaaagactagatatgtcagttgctgtatagttgaattctgctaacataaagaatgtagggaagaacacctgagctgtctcagatgcttattgcagcatagaactgggactgggacttctctagatgagaacaatgaggcatggacattcatccaaagaaactcagatgtgaatattgaaatgttggttgcacaaggctacataacaataaaaaattagtcaaaccaagttgatgtcgtgtaacaatacaaagatgaagattcattgcttgaagaattggatggaagtaaatttacaccctagcagtggtacttcagttgtattctttctttagcagcctgcctcaatgcttgaagaattggatggaagtaatttactctctagcagaggaaaagagtacgcagtatgcacattggcgtgcattcttcatgtctacacaagcctgac

SEQ ID NO: 17185 - DNA, 1325 bp, Zea Mays
atttcatgaaagctaaagtgatttacacacaatactttcagaaatgctagggagaactgtggtggaaagtatagtgctccactgaatgctgtatgtgcagaggctgtccaagctatcaacaattgcacacgggatatcaataagcaatacatcttggatcctgcttgcccggatgatgatctgttgagccccaagactgtagcagagacagatggaacgagcaggttgatgctagagtctgcagattttctacttggttccaaatgtgcagctaagttccaaagatcatatcctttaactaattcaatccccttgtccctacactgtcaagtccttgactgcttatctgacctacactttcctttggccgcaggaagctttatacattctatcctacgcttgggggaatgatgatacagttcaggagagcctcggtatccgcaaggggacaattggagcatggaaacgatacagccatgcattgccttacaattatgatatccagagtgtagtggattaccattcaaggctagccacaaaaggatacagggcgctgatatacagagcggcgaccacgatgctgttgtaccccatgttggcacacaagcatggattagatacctcaacttgacaatcgttgatgattggcgaccatggtacgttggaggccaagttgctggattcacaaggagttatgcgagcggcctaacatttgccaccgtgaagggtgctggacatgttgcgccgttgtataagaccttggaatgccaaaaaatgtttataacatggatttcagggaatcctctttgatgcaagtctgatagaatgacccatcggttatctgagtgggcgtcagccgtcaggaatcctctttgaagggtgaacgtgcatatgttgttgctatatgcatacatggggacatggggtgtaggggtgcttgtgcgttcgtacaaaaaataaagtgccaatttggattacttgtttggtccccatgcaggtgtatgtgcagttgcgtgtaaaaattctttgcataaaacaattataacttgcttcctaaatcttcatctaatcttgctgttcggtactgacacgctgttaggtgggcccaaacactcagtaacaaaatgtagagcacgaaagagcgataagacggttggtgggaattgtagcttctcattatgtgtgtcccatcctgctacatgacaatgacgggggtatttatatagggtaggtggtctaaagtacggtcttaccctcggacaccaaccatatccaggggatatccagtgtaacagagtaattacagtgttgtctgtacaataaac

SEQ ID NO: 17186 - DNA, 1993 bp, Zea Mays
ggaccggagtggcatttgaccagctgaagtcaacaggcatgccgaacggtggcggcaagaggtggctgctgctgctgccgctgtcgcggtacgtggaggtggacgagcagcaaggtgtgcagctcttctactacttcgtgcgctcggagcgcgacccctacgaggacccgctgctgctgtggctgtccggcggcccaggctgctccggcatctccggccttgcctacgagataggacccttaaaatttgatgcccgagggcaaggtgaatttcccactcttctctaccgaccggagacatggaccaaggtgagcaacatcatatttgtggactcgccggtggggactgggttctcgtacgccaagtccgaggaagggctcgagaccggcgacaccaagcaagtgaagcagctagtcattttcctcaggaagtggctccaagaccatccccggttcgtgatgaatcctctttatattgctggagattcatacagtggtctcatcattcctactcttgcattagaaattgacagaagcatagaactcggtgaaaagatattttccggtctcaaggggtacattgctggcaacccgttgactggcggacagtttgatacagacagccaaattccatactttcatgccatgggacttgtatccgatgaactttacaagaatgctagggagaactgtggtggaaagtatagtgctccactgaatgctgtatgtgcagaggctgtccaagctatcaacaattgcacacgggatatcaataagcaatacatcttggatcctgcttgcccggatgatgatctgttgagccccaagactgtagcagagacagatggaacgagcaggttgatgctagagtctgcagattttctacttggttccaaatgtgcagaagctttatacattctatcctacgcttgggggaatgatgatacagttcaggagagcctcggtatccgcaaggggacaattggagcatggaaacgatacagccatgcattgccttacaattatgatatccagagtgtagtggattaccattcaaggctagccacaaaaggatacagggcgctgatatacagcggcgaccacgatgctgttgtaccccatgttggcacacaagcatggattagatacctcaacttgacaatcgttgatgattggcgaccatggtacgttggaggccaagttgctggattcacaaggagttatgcgagcggcctaacatttgccaccgtgaagggtgctggacatgttgcgccgttgtataagaccttggaatgccaaaaaatgtttataacatggatttcagggaatcctctttgatgcaagtctgatagaatgacccatcggttatctgagtgggcgtcagccgtcaggaatcctctttgaagggtcagttgcttgggtttctttggtgtcaactggttcaaatccttgatcgatatggttgatcgtaatatttttggaacttatttcaagatttattaacggtattgttctcttaagacctgcctgttgattctgttcatataggtgaacgtgcatatgttgttgctatatgcatacatggggacatggggtgtaggggtgcttgtgcgttcgtacaaaaaataaagtgccaatttggattacttgtttggtccccatgcaggtgtatgtgcagttgcgtgtaaaaattctttgcataaaacaattataacttgcttcctaaatcttcatctaatcttgctgttcggtactgacacgctgttaggtgggcccaaacactcagtaacaaaatgtagagcacgaaagagcgataagacggttggtgggaattgtagcttctcattatgtgtgtcccatcctgctacatgacaatgacgggggtatttatatagggtaggtggtctaaagtacggtcttaccctcggacaccaaccatatccaggggatatccagtgtaacagagtaattacagtgttgtctgtacaataaac

SEQ ID NO: 17187 - DNA, 2086 bp, Zea Mays
ggaccggagtggcatttgaccagctgaagtcaacaggcatgccgaacggtggcggcaagaggtggctgctgctgctgccgctgtcgcggtacgtggaggtggacgagcagcaaggtgtgcagctcttctactacttcgtgcgctcggagcgcgacccctacgaggacccgctgctgctgtggctgtccggcggcccaggctgctccggcatctccggccttgcctacgagataggacccttaaaatttgatgcccgagggcaaggtgaatttcccactcttctctaccgaccggagacatggaccaaggtgagcaacatcatatttgtggactcgccggtggggactgggttctcgtacgccaagtccgaggaagggctcgagaccggcgacaccaagcaagtgaagcagctagtcattttcctcaggaagaccatccccggttcgtgatgaatcctctttatattgctggagattcatacagtggtctcatcattcctactcttgcattagaaattgacagaagcatagaactcggtgaaaagatattttccggtctcaaggggtacattgctggcaacccgttgactggcggacagtttgatacagacagccaaattccatactttcatgccatgggacttgtatccgatgaactttacaagaatgctagggagaactgtggtggaaagtatagtgctccactgaatgctgtatgtgcagaggctgtccaagctatcaacaattgcacacgggatatcaataagcaatacatcttggatcctgcttgcccggatgatgatctgttgagccccaagactgtagcagagacagatggaacgagcaggttgatgctagagtctgcagattttctacttggttccaaatgtgcagctaagttccaaagatcatatcctttaactaattcaatccccttgtccctacactgtcaagtccttgactgcttatctgacctacactttcctttggccgcaggaagctttatacattctatcctacgcttgggggaatgatgatacagttcaggagagcctcggtatccgcaaggggacaattggagcatggaaacgatacagccatgcattgccttacaattatgatatccagagtgtagtggattaccattcaaggctagccacaaaaggatacagggcgctgatatacagcggcgaccacgatgctgttgtaccccatgttggcacacaagcatggattagatacctcaacttgacaatcgttgatgattggcgaccatggtacgttggaggccaagttgctggattcacaaggagttatgcgagcggcctaacatttgccaccgtgaagggtgctggacatgttgcgccgttgtataagaccttggaatgccaaaaaatgtttataacatggatttcagggaatcctctttgatgcaagtctgatagaatgacccatcggttatctgagtgggcgtcagccgtcaggaatcctctttgaagggtcagttgcttgggtttctttggtgtcaactggttcaaatccttgatcgatatggttgatcgtaatatttttggaacttatttcaagatttattaacggtattgttctcttaagacctgcctgttgattctgttcatataggtgaacgtgcatatgttgttgctatatgcatacatggggacatggggtgtaggggtgcttgtgcgttcgtacaaaaaataaagtgccaatttggattacttgtttggtccccatgcaggtgtatgtgcagttgcgtgtaaaaattctttgcataaaacaattataacttgcttcctaaatcttcatctaatcttgctgttcggtactgacacgctgttaggtgggcccaaacactcagtaacaaaatgtagagcacgaaagagcgataagacggttggtgggaattgtagcttctcattatgtgtgtcccatcctgctacatgacaatgacgggggtatttatatagggtaggtggtctaaagtacggtcttaccctcggacaccaaccatatccaggggatatccagtgtaacagagtaattacagtgttgtctgtacaataaac

SEQ ID NO: 17188 - DNA, 2042 bp, Zea Mays
ggaccggagtggcatttgaccagctgaagtcaacaggcatgccgaacggtggcggcaagaggtggctgctgctgctgccgctgtcgcggtgggttctcctcctcggcagcctccagctcccggcggtcggcggcagcggccatgtcgtcacgcgcatgcgcgggttcgacgggccacttccgttctacctcgaaaccgggtacgtggaggtggacgagcagcaaggtgtgcagctcttctactacttcgtgcgctcggagcgcgacccctacgaggacccgctgctgctgtggctgtccggcggcccaggctgctccggcatctccggccttgcctacgagataggacccttaaaatttgatgcccgagggcaaggtgaatttcccactcttctctaccgaccggagacatggaccaaggtgagcaacatcatatttgtggactcgccggtggggactgggttctcgtacgccaagtccgaggaagggctcgagaccggcgacaccaagcaagtgaagcagctagtcattttcctcaggaagtggctccaagaccatccccggttcgtgatgaatcctctttatattgctggagattcatacagtggtctcatcattcctactcttgcattagaaattgacagaagcatagaactcggtgaaaagatattttccggtctcaaggggtacattgctggcaacccgttgactggcggacagtttgatacagacagccaaattccatactttcatgccatgggacttgtatccgatgaactttacaagaatgctagggagaactgtggtggaaagtatagtgctccactgaatgctgtatgtgcagaggctgtccaagctatcaacaattgcacacgggatatcaataagcaatacatcttggatcctgcttgcccggatgatgatctgttgagccccaagactgtagcagagacagatggaacgagcaggttgatgctagagtctgcagattttctacttggttccaaatgtgcagctaagttccaaagatcatatcctttaactaattcaatccccttgtccctacactgtcaagtccttgactgcttatctgacctacactttcctttggccgcaggaagctttatacattctatcctacgcttgggggaatgatgatacagttcaggagagcctcggtatccgcaaggggacaattggagcatggaaacgatacagccatgcattgccttacaattatgatatccagagtgtagtggattaccattcaaggctagccacaaaaggatacagggcgctgatatacagcggcgaccacgatgctgttgtaccccatgttggcacacaagcatggattagatacctcaacttgacaatcgttgatgattggcgaccatgattcacaaggagttatgcgagcggcctaacatttgccaccgtgaagggtgctggacatgttgcgccgttgtataagaccttggaatgccaaaaaatgtttataacatggatttcagggaatcctctttgatgcaagtctgatagaatgacccatcggttatctgagtgggcgtcagccgtcaggaatcctctttgaagggtgaacgtgcatatgttgttgctatatgcatacatggggacatggggtgtaggggtgcttgtgcgttcgtacaaaaaataaagtgccaatttggattacttgtttggtccccatgcaggtgtatgtgcagttgcgtgtaaaaattctttgcataaaacaattataacttgcttcctaaatcttcatctaatcttgctgttcggtactgacacgctgttaggtgggcccaaacactcagtaacaaaatgtagagcacgaaagagcgataagacggttggtgggaattgtagcttctcattatgtgtgtcccatcctgctacatgacaatgacgggggtatttatatagggtaggtggtctaaagtacggtcttaccctcggacaccaaccatatccaggggatatccagtgtaacagagtaattacagtgttgtctgtacaataaac

SEQ ID NO: 17189 - DNA, 1912 bp, Zea Mays
caacacatctgtttttatatatttttagtggtccatttgcaccctatccacagtatagggaccggagtggcatttgaccagctgaagtcaacaggcatgccgaacggtggcggcaagaggtggctgctgctgctgccgctgtcgcggtacgtggaggtggacgagcagcaaggtgtgcagctcttctactacttcgtgcgctcggagcgcgacccctacgaggacccgctgctgctgtggctgtccggcggcccaggctgctccggcatctccggccttgcctacgagataggacccttaaaatttgatgcccgagggcaaggtgaatttcccactcttctctaccgaccggagacatggaccaaggtgagcaacatcatatttgtggactcgccggtggggactgggttctcgtacgccaagtccgaggaagggctcgagaccggcgacaccaagcaagtgaagcagctagtcattttcctcaggaagtggctccaagaccatccccggttcgtgatgaatcctctttatattgctggagattcatacagtggtctcatcattcctactcttgcattagaaattgacagaagcatagaactcggtgaaaagatattttccggtctcaaggggtacattgctggcaacccgttgactggcggacagtttgatacagacagccaaattccatactttcatgccatgggacttgtatccgatgaactttacaagaatgctagggagaactgtggtggaaagtatagtgctccactgaatgctgtatgtgcagaggctgtccaagctatcaacaattgcacacgggatatcaataagcaatacatcttggatcctgcttgcccggatgatgatctgttgagccccaagactgtagcagagacagatggaacgagcaggttgatgctagagtctgcagattttctacttggttccaaatgtgcagaagctttatacattctatcctacgcttgggggaatgatgatacagttcaggagagcctcggtatccgcaaggggacaattggagcatggaaacgatacagccatgcattgccttacaattatgatatccagagtgtagtggattaccattcaaggctagccacaaaaggatacagggcgctgatatacagagcggcgaccacgatgctgttgtaccccatgttggcacacaagcatggattagatacctcaacttgacaatcgttgatgattggcgaccatggtacgttggaggccaagttgctggattcacaaggagttatgcgagcggcctaacatttgccaccgtgaagggtgctggacatgttgcgccgttgtataagaccttggaatgccaaaaaatgtttataacatggatttcagggaatcctctttgatgcaagtctgatagaatgacccatcggttatctgagtgggcgtcagccgtcaggaatcctctttgaagggtgaacgtgcatatgttgttgctatatgcatacatggggacatggggtgtaggggtgcttgtgcgttcgtacaaaaaataaagtgccaatttggattacttgtttggtccccatgcaggtgtatgtgcagttgcgtgtaaaaattctttgcataaaacaattataacttgcttcctaaatcttcatctaatcttgctgttcggtactgacacgctgttaggtgggcccaaacactcagtaacaaaatgtagagcacgaaagagcgataagacggttggtgggaattgtagcttctcattatgtgtgtcccatcctgctacatgacaatgacgggggtatttatatagggtaggtggtctaaagtacggtcttaccctcggacaccaaccatatccaggggatatccagtgtaacagagtaattacagtgttgtctgtacaataaac

SEQ ID NO: 17190 - DNA, 1266 bp, Zea Mays
ggaccggagtggcatttgaccagctgaagtcaacaggcatgccgaacggtggcggcaagaggtggctgctgctgctgccgctgtcgcggtacgtggaggtggacgagcagcaaggtgtgcagctcttctactacttcgtgcgctcggagcgcgacccctacgaggacccgctgctgctgtggctgtccggcggcccaggctgctccggcatctccggccttgcctacgagataggacccttaaaatttgatgcccgagggcaaggtgaatttcccactcttctctaccgaccggagacatggaccaaggtgagcaacatcatatttgtggactcgccggtggggactgggttctcgtacgccaagtccgaggaagggctcgagaccggcgacaccaagcaagtgaagcagctagtcattttcctcaggaagtggctccaagaccatccccggttcgtgatgaatcctctttatattgctggagattcatacagtggtctcatcattcctactcttgcattagaaattgacagaagcatagaactcggtgaaaagatattttccggtctcaaggggtacattgctggcaacccgttgactggcggacagtttgatacagacagccaaattccatactttcatgccatgggacttgtatccgatgaactttacaagaatgctagggagaactgtggtggaaagtatagtgctccactgaatgctgtatgtgcagaggctgtccaagctatcaacaattgcacacgggatatcaataagcaatacatcttggatcctgcttgcccggatgatgatctgttgagccccaagactgtagcagagacagatggaacgagcaggttgatgctagagtctgcagattttctacttggttccaaatgtgcagaagctttatacattctatcctacgcttgggggaatgatgatacagttcaggagagcctcggtatccgcaaggggacaattggagcatggaaacgatacagccatgcattgccttacaattatgatatccagagtgtagtggattaccattcaaggctagccacaaaaggatacagggcgctgatatacagagcggcgaccacgatgctgttgtaccccatgttggcacacaagcatggattagatacctcaacttgacaatcgttgatgattggcgaccatggtacgttggaggccaagttgctggaaatctcaccggtcatggaactatcttaagcaaaaattgaacaactttgtagcaggt

SEQ ID NO: 17191 - DNA, 777 bp, Zea Mays
ggaccggagtggcatttgaccagctgaagtcaacaggcatgccgaacggtggcggcaagaggtggctgctgctgctgccgctgtcgcggtacgtggaggtggacgagcagcaaggtgtgcagctcttctactacttcgtgcgctcggagcgcgacccctacgaggacccgctgctgctgtggctgtccggcggcccaggctgctccggcatctccggccttgcctacgagataggacccttaaaatttgatgcccgagggcaaggtgaatttcccactcttctctaccgaccggagacatggaccaaggtgagcaacatcatatttgtggactcgccggtggggactgggttctcgtacgccaagtccgaggaagggctcgagaccggcgacaccaagcaagtgaagcagctagtcattttcctcaggaagtggctccaagaccatccccggttcgtgatgaatcctctttatattgctggagattcatacagtggtctcatcattcctactcttgcattagaaattgacagaagcatagaactcggtgaaaagatattttccggtctcaaggggtacattgctggcaacccgttgactggcggacagtttgatacagacagccaaattccatactttcatgccatgggacttgtatccgatgaactttacaagaatgctagggagaactgtggtggaaagtatagtgctccactgaatgctgtatgtgcagaggctgtccaagctatcaacaatcctgtgggggctacgaaacaac

SEQ ID NO: 17192 - DNA, 4625 bp, Zea Mays
gcaggttatgcagcacccgctcgctgccccctccgcttttcctacgggctctttattgccgtaatggtagccgctactagctcctctacatctcatctacatgctacaatcttggtggacagcacagaaaacttgtcagctttggagttacggcagcagctcactgctcacccatgctctgcagtagttgttagaagaaaaaaaatgatattaaatgatgaatgggtttataaaataatattttatggttggagtgagatatagagggaaaacttagaggaaactgatgtgagaagaagagaagtaggagatagaatctagatgacatagctgcatagtatgatataaaaggaaaaatttagagataagtgttgcagtcagtctgactgcgaggtcagtttgctcccgcccaacataatcagaatagatggaaactaaaagcctatttgtttagcctatagattatataatccaactcaaataaattaaggggtaaacaaacaacataaattattagatgaattatataatctagatacctagattataataatctataagcaggtgaatatgtgcttatataaactactagccagttgctcgtgttttgctacgatttttatatgctatataaatacgtattgagatatttattcaaatataatatttactacatattaagtcaatagtgtagaccatccccgtgcccccgcctctccctccgcatgaacgcccccgtctcccccctgtgaaatctgcaaccccccacgcgccgacaaagccgcaaggggatagtgatagacgacaaggagaaggagattgtcaacaacaatgagccaaagggagataagtccatcgactcacgctcaaacaacaagaacaaggacgggaagaagaagaggcgcttcaaaaagatagtctacgacagcgatgcctcccaatcttcaccgaaggacgacgactcttcttcaaagaaaaagacggttcacgaaaattactcttttgattattcccgcattccgtacaactcaatgctcatttattgtctattccttttggcaagccccctcactttgatggggaagattgttcgttttgaaatcataaaatgcgtagtcatttattttctcttcatcctagcatttggaaagtagtagaaaatggaatgcattttgatagcaatgataatgccatatttattaatgaacaaattcataaaaatatccaggctactacttttcttttagcatctctatgcagggatgaatacaacatttttagtagcttggacaataccaaggaaatatgggacaccctcaaaatcactcatgagggtaatgatgccacaatgatcaccaagatggagttcgtggaagacgagttggggaggttcgccatgaagagggtgaggagccaactgaaacgtataacaggctcaagaccctggtgaacaaaatccgaagctatggaagcacaagatggacggatcacgacgtcgtgcgtctcatgttaaggttgtttactgttattgatcctcatcttgttaatcttattcatgaaatcccaggtataccaaaatgtcgcccaaagaaattcttggtaagtttgtaagtgggcgcatgatggtaaaagaagcaaggtatgtcaacgacatcgccaacggtcctcttcctcactacgagtcgtaacccattgcactcaaagcaacgaccaactaggaggatcagaacaagaaagggaagaatgagaaaaggaagttctatagaaagaagggtgaggcgcacatcagcaaggaatgggactcggactcctcttcatccgactccgacgacgaagttctatagaaagaagaagtgcgaggaggatcaacaaggaatgtttcctatttctatgtatttgggagcaaatgctacatcttggtaaagaaagatagacattcaaagtttgctcccaaagccattgaagggtttttacttggttatgatttaaatacaaaggcatatagggccttcaacaaatctttgggtttagttgaagtcactagtgacattttatttgatgagactaatggccctctaagagtgcaagttgatcttcatgacatagatgaaaacgaggttccaacggtagcaatgaggactatggcgatagacgatgtgcgaccacaggaacaacaagtgcaagatcatccctcttcctcaacgatggtgcatcctccgactcaagatgaggaacaggtaccacaagacgacgacatggatcaagggggagcacaagaataagaagaaagggaggaggaagaagtaccacatgcacctccaacccaagtccgcactaacattcaaagggatcaactggtggatcaaatccttggtgacattagcaagggagttactacacacgtattgctaatttttgtgggcactactcttttgtttcttctattgagcctttcagggtagaagaagccttgcaggatccagactagatgttggccatgcaagaggagctaaacaacttgaagagaaatgaagtatggagtttggtgccacatccaaagtaaaatgttgttggcacaaagtgggtgtttcgcaacaaacaagacgagtacggggtggtgacaagaaacaaggcaagacttgtggcaaaaggttatgcccaagttacaggtttggattttgaggagacttttgctcctgtagctaggcttgagtctattcgaatactattagcctatgctgctcaccattcttttaagctctatcaaatggatgtgaagagcgcctttctcaataggccaatcaaggaggaggtgtacatggagcaaccccctggctttgaggatgataagtaccccaaccatgtgtataatctctctaaggcgctctatcgacctaagcaagccccaagagcatggtatggatgccttatatatttccttatttcacatgctttcaaggccaggaaagcgaatcctactcttttcactaagacttgctttggtgatttgtttatatgccaaatatatgtcgatgccataatatttggttctactaatcaaaattcatgtgagaagtttagtagggtgatgacataaaaattcaagatgtccatgatgggagagttgacttatttccttggatttcaagtaaagcaactcaaggaagagacattcctctctcaaacaaagtacacacaagatatactaaagaagtttgggatgaaggacgtaaaacctgctaagacgccaatgggaacaaacagtcatttggacctcaacataggaggtaagtatatagatcaaaaggtataccggtcattatctttgtgcaagtacagtagaccagacattatactttctgtttgcatgtgtgctagatttcaatctgatcccaaggaatgtcaccttgtggctatgaagcgtattcttcgatatttagttcatacgccttgcatcaggctctggtatcctaagggtctacctttgacttgattggatattcagactctgactatgccaggtgcaaggttgataggaagagcacaactaggacttgtcagattctgggaaggtccttggtgtcttggagttcaaagaaacaatggtatcaaagccctatccaccatcgaggccgagtatgttgttgcaggccaatgttgtgtccaactactttggatgaggcaaaccctttgggactttggctgcaatttgagcaaagtcccactcctatgtgatattgagagtgcaatccgcttggcggataatcccattgaacacagccgcactaagcacatagacatccggcatcactttttgagaaatcaccagcaaaggggagatatcgatgtttgccatattagcaccgatcactagctagtcaataccttcaccaagcctttagatgagaaaaggtgttgtaagctacgtagtgagctaaatgtcttagattcgtggaacttggattgatctatagcatatatgtcttttatgtttttaatcatattattttaagattatctatgtatttgggtgttcaagatgtaaaacatcatccccggacctcacaagtctttgtgcaaatgatgcatatgtttaagaggaggatatgctacaactgtggcagaacctcccaaggtatcgggcccacatgcacctgtccttgtctcaaagaactcagacggccatgcatgtgcaccagataacttaacaggatccgtccgattgccccacggacaccggataaaccacttacaaccagaaccgcgggattaagtaatacaaatcacacacaccaatattttgcagcggaaatcttattaccaaattttacaagttacaaaaattttacttcgtacatgatcagagtgattactacattgattcaaacaaagaaactttgaaaggttataaattatttatagttttgaaatatatgctagttcaagtgaccatcctcattaagaagtatagaaggattacttagacttataagaaggccgagcccaccggcacttaacaccatcatcagcagcacaaaactatgacctgaaaaacaacagggaataaaaccctgagtatggaattactcagcaagacttacccgactaaagaaaagactctcaag

SEQ ID NO: 17193 - DNA, 1607 bp, Zea Mays
taataaactatatcgttccttaaaccaaacacgctgtaaatacattgaaagcaataagtactctatactctctacttatcctatgtctctgcgtttgtgtctgaggctagaacggattatggatacaatacaaataagtaccgcaggtagaaatccgcgaggtgtgagcaaaccatgacgtaagttaggcttctagccacttgtcgcgttgggacaaaatgaaaagggaataaataaaaagagagaataactggctagttgtcgtctgcctctcgatttctgcgtgattcgcctgcctgccttccttcctgttggttgcttctttctactcgcgctcgcaccaaccagaggagcaaccgagcagtagcgactcctctgcgtgaggcctgccgtcatcccccgtgggccgtggccgtggccgtggccgtgcgcaaaaaaacaaaccatcctcgattcgaccggaggggaaggagacgcgccgggagaagggggaagagacgcggcgaccatgtctccgatctgggtgttcgggtacggctcgctgatctggaacccaggcttcgcctacgacgaccgcgtcgtcggctttgtcagggactaccgccgcgtcttctaccaagggagcacggaccacaggggcacgccgcagttccccgggaggaccgtcacgctcgagcaccagcccggagcgacttgctggggagttgcttacagaataaaggaggaagataaggagatagctttggagtatcttgaggtcagggagaagcaatatgatgagaaggtttaccttgacttgtatactgattcatcgcccaaagtaccagctgtcgaaaatgtgatggtatacttcgccaccagtaacaaggagaacaatcaaaactatcttggtcctgcacctctggaagaaatgaccaggcaaatttaccttgctcaaggcccatctggacctaacaaagagtatgtgttcaaactcgaggacgcgttacacaaattaggagttgtagaccaacatgtccaagaactggcaaatgctctgcgtgagtattctgacaccgagttatctaagtgaaagatcacatttaccccttgtttggaggcaatgagcaacaaaaaggcgaccaggaaaaaagatgaatggaccaaagaaacgatgggcaatctattatatgctaccaaaaaaaaagtttacatcattgtagactttccaggaatttctgacaaatgctaatatagagcaccgatgtctagtccccaatctcaatgtacaaattctctaaaatcctgtcacggagtacaagatcacgagaccaagtttccagtccatgcggaacctatctgttgcaaggagtcgcagatggccttggtgaaggtgatcttgccccggcgcaggtggtagaggacatgcatattctcctgctggaagttcccaagaatggacaccccgctcgtcttgccgatcattgggcttgggcacatcatcctgcggtgttgccagcggttttgccttgtttgggccatataaaactgaggatgctggtgacaatcctgggctgcagcacgtgttttctacgcggcagggtcggcttggcccagttagctaggct

SEQ ID NO: 17194 - DNA, 1868 bp, Zea Mays
taataaactatatcgttccttaaaccaaacacgctgtaaatacattgaaagcaataagtactctatactctctacttatcctatgtctctgcgtttgtgtctgaggctagaacggattatggatacaatacaaataagtaccgcaggtagaaatccgcgaggtgtgagcaaaccatgacgtaagttaggcttctagccacttgtcgcgttgggacaaaatgaaaagggaataaataaaaagagagaataactggctagttgtcgtctgcctctcgatttctgcgtgattcgcctgcctgccttccttcctgttggttgcttctttctactcgcgctcgcaccaaccagaggagcaaccgagcagtagcgactcctctgcgtgaggcctgccgtcatcccccgtgggccgtggccgtggccgtggccgtgcgcaaaaaaacaaaccatcctcgattcgaccggaggggaaggagacgcgccgggagaagggggaagagacgcggcgaccatgtctccgatctgggtgttcgggtacggctcgctgatctggaacccaggcttcgcctacgacgaccgcgtcgtcggctttgtcagggactaccgccgcgtcttctaccaagtggggagttgcttacagaataaaggaggaagataaggagatagctttggagtatcttgaggtcagggagaagcaatatgatgagaaggtttaccttgacttgtatactgattcatcgcccaaagtaccagctgtcgaaaatgtgatggtatacttcgccaccagtaacaaggagaacaatcaaaactatcttggtcctgcacctctggaagaaatgaccaggcaaatttaccttgctcaaggcccatctggacctaacaaagagtatgtgttcaaactcgaggacgcgttacacaaattaggagttgtagaccaacatgtccaagaactggcaaatgctctgcgtgagtattctgacaccgagttatctaagtgaaagatcacatttaccccttgtttggagggtaaggatttataaataaagttagaattcattcatgcatgtcccaacatggatatattcttgtaagctgcgttttgagtgactacattacgattatattcctgtgcacatgtggtttgcaaaaatctgttggtttcccctgttcactttttctgatctaggagagcgatcatttgctttgctttctacttctagcaatgagcaacaaaaaggcgaccaggaaaaaagatgaatggaccaaagaaacgatgggcaatctattatatgctaccaaaaaaaaagtttacatcattgtagactttccaggtttatctcactatcggtgttaataaacggatttcatattcgaccaatcttatcagcagttatagagtttctcctcgagcgctgctccctcctttcgctactctgattactgaatggatacgcttttctgcaaatacacttcaggaatttctgacaaatgctaatatagagcaccgatgtctagtccccaatctcaatgtacaaattctctaaaatcctgtcacggagtacaagatcacgagaccaagtttccagtccatgcggaacctatctgttgcaaggagtcgcagatggccttggtgaaggtgatcttgccccggcgcaggtggtagaggacatgcatattctcctgctggaagttcccaagaatggacaccccgctcgtcttgccgatcattgggcttgggcacatcatcctgcggtgttgccagcggttttgccttgtttgggccatataaaactgaggatgctggtgacaatcctgggctgcagcacgtgttttctacgcggcagggtcggcttggcccagttagctaggct

SEQ ID NO: 17195 - DNA, 2315 bp, Zea Mays
taataaactatatcgttccttaaaccaaacacgctgtaaatacattgaaagcaataagtactctatactctctacttatcctatgtctctgcgtttgtgtctgaggctagaacggattatggatacaatacaaataagtaccgcaggtagaaatccgcgaggtgtgagcaaaccatgacgtaagttaggcttctagccacttgtcgcgttgggacaaaatgaaaagggaataaataaaaagagagaataactggctagttgtcgtctgcctctcgatttctgcgtgattcgcctgcctgccttccttcctgttggttgcttctttctactcgcgctcgcaccaaccagaggagcaaccgagcagtagcgactcctctgcgtgaggcctgccgtcatcccccgtgggccgtggccgtggccgtggccgtgcgcaaaaaaacaaaccatcctcgattcgaccggaggggaaggagacgcgccgggagaagggggaagagacgcggcgaccatgtctccgatctgggtgttcgggtacggctcgctgatctggaacccaggcttcgcctacgacgaccgcgtcgtcggctttgtcagggactaccgccgcgtcttctaccaagggagcacggaccacaggggcacgccgcagttccccgggaggaccgtcacgctcgagcaccagcccggagcgacttgctggggagttgcttacagaataaaggaggaagataaggagatagctttggaggtatgtttattgcaagccaggcagatgcagatatgttttgttcactagtactgatcgcgcacaaatatcccatgatgatactcagattgtttgatgattgggatattgctgatgttacttgtcattatggagatttagagattggtcgatgtaccaaaactcatatgttctttcctacaaactgattatatctagatactatgacgatttaagtcatgaatgggcttatgaaatttcggtatatatatcaacttatatgtgtttatcgcgatggtatacgtagcagcaaatctctgcacattctgatactccgttgcttacagctttatattgcttctactggcatttatcttcagatttaaatttgcagtatcttgaggtcagggagaagcaatatgatgagaaggtttaccttgacttgtatactgattcatcgcccaaagtaccagctgtcgaaaatgtgatggtatacttcgccaccagtaacaaggagaacaatcaaaactatcttggtcctgcacctctggaagaaatgaccaggcaaatttaccttgctcaaggcccatctggacctaacaaagagtatgtgttcaaactcgaggacgcgttacacaaattaggagttgtagaccaacatgtccaagaactggcaaatgctctgcgtgagtattctgacaccgagttatctaagtgaaagatcacatttaccccttgtttggagggtaaggatttataaataaagttagaattcattcatgcatgtcccaacatggatatattcttgtaagctgcgttttgagtgactacattacgattatattcctgtgcacatgtggtttgcaaaaatctgttggtttcccctgttcactttttctgatctaggagagcgatcatttgctttgctttctacttctagcaatgagcaacaaaaaggcgaccaggaaaaaagatgaatggaccaaagaaacgatgggcaatctattatatgctaccaaaaaaaaagtttacatcattgtagactttccaggtttatctcactatcggtgttaataaacggatttcatattcgaccaatcttatcagcagttatagagtttctcctcgagcgctgctccctcctttcgctactctgattactgaatggatacgcttttctgcaaatacacttcaggaatttctgacaaatgctaatatagagcaccgatgtctagtccccaatctcaatgtacaaattctctaaaatcctgtcacggagtacaagatcacgagaccaagtttccagtccatgcggaacctatctgttgcaaggagtcgcagatggccttggtgaaggtgatcttgccccggcgcaggtggtagaggacatgcatattctcctgctggaagttcccaagaatggacaccccgctcgtcttgccgatcattgggcttgggcacatcatcctgcggtgttgccagcggttttgccttgtttgggccatataaaactgaggatgctggtgacaatcctgggctgcagcacgtgttttctacgcggcagggtcggcttggcccagttagctaggct

SEQ ID NO: 17196 - DNA, 1959 bp, Zea Mays
taataaactatatcgttccttaaaccaaacacgctgtaaatacattgaaagcaataagtactctatactctctacttatcctatgtctctgcgtttgtgtctgaggctagaacggattatggatacaatacaaataagtaccgcaggtagaaatccgcgaggtgtgagcaaaccatgacgtaagttaggcttctagccacttgtcgcgttgggacaaaatgaaaagggaataaataaaaagagagaataactggctagttgtcgtctgcctctcgatttctgcgtgattcgcctgcctgccttccttcctgttggttgcttctttctactcgcgctcgcaccaaccagaggagcaaccgagcagtagcgactcctctgcgtgaggcctgccgtcatcccccgtgggccgtggccgtggccgtggccgtgcgcaaaaaaacaaaccatcctcgattcgaccggaggggaaggagacgcgccgggagaagggggaagagacgcggcgaccatgtctccgatctgggtgttcgggtacggctcgctgatctggaacccaggcttcgcctacgacgaccgcgtcgtcggctttgtcagggactaccgccgcgtcttctaccaagggagcacggaccacaggggcacgccgcagttccccgggaggaccgtcacgctcgagcaccagcccggagcgacttgctggggagttgcttacagaataaaggaggaagataaggagatagctttggagatttaaatttgcagtatcttgaggtcagggagaagcaatatgatgagaaggtttaccttgacttgtatactgattcatcgcccaaagtaccagctgtcgaaaatgtgatggtatacttcgccaccagtaacaaggagaacaatcaaaactatcttggtcctgcacctctggaagaaatgaccaggcaaatttaccttgctcaaggcccatctggacctaacaaagagtatgtgttcaaactcgaggacgcgttacacaaattaggagttgtagaccaacatgtccaagaactggcaaatgctctgcgtgagtattctgacaccgagttatctaagtgaaagatcacatttaccccttgtttggagggtaaggatttataaataaagttagaattcattcatgcatgtcccaacatggatatattcttgtaagctgcgttttgagtgactacattacgattatattcctgtgcacatgtggtttgcaaaaatctgttggtttcccctgttcactttttctgatctaggagagcgatcatttgctttgctttctacttctagcaatgagcaacaaaaaggcgaccaggaaaaaagatgaatggaccaaagaaacgatgggcaatctattatatgctaccaaaaaaaaagtttacatcattgtagactttccaggtttatctcactatcggtgttaataaacggatttcatattcgaccaatcttatcagcagttatagagtttctcctcgagcgctgctccctcctttcgctactctgattactgaatggatacgcttttctgcaaatacacttcaggaatttctgacaaatgctaatatagagcaccgatgtctagtccccaatctcaatgtacaaattctctaaaatcctgtcacggagtacaagatcacgagaccaagtttccagtccatgcggaacctatctgttgcaaggagtcgcagatggccttggtgaaggtgatcttgccccggcgcaggtggtagaggacatgcatattctcctgctggaagttcccaagaatggacaccccgctcgtcttgccgatcattgggcttgggcacatcatcctgcggtgttgccagcggttttgccttgtttgggccatataaaactgaggatgctggtgacaatcctgggctgcagcacgtgttttctacgcggcagggtcggcttggcccagttagctaggct

SEQ ID NO: 17197 - DNA, 1677 bp, Zea Mays
gcaattgttattagagctcgaaagagaaaacgacacggtcatgcacccgtaggacaaattacttatgctccaattgatgagagggataggaagcgagctgagtatctcaatgataaaatttggaagaatgatgttacttgtgtcaatatgattaggcttaatagagcatcgttctttcgattttgtaaactttttagggatcgaggtttattacaagacactacacacatgtgtgttgagcaacaagttgctatgtttttacacacaattggccataatgttaggaatagagtagttgccactaattttggtaggtccggggaaaccgttagtcggtacttcaataaagtccttcatgcaattggagagctacacaccgacttcattaagccaccatcatcgacgacaccatctaaaattcaagggaacccacgctgggatccttattttaaggattgtattggggccatcgacggaacacatattcgggcgtctgttcctaaggaattggaacctgcgtttcgtggtaggaagagttacactacacaaaatgtaatggcagccgtagactttgatctacggttcacatgtgttatagctggttgggagggaacagcccatgacgcttcaatattacgcgatgctttagaacgcccaaatggtcttcgtgttcctcaagctggatataatggaaggagaggttaaaggtggaactgtttggacagtaagtcagaaagcttttgtgcaagagtttcttgctaaccttgttgctgatggttccaaaacatcaactggtttcaaaagagttcatctcagtgcttgtgctaaagctttgaacaatcattttaagatcaatagaactcctgaacaaattggcaaccacttgaaaacattgaaaaaaaagtacattaggatcaaccaacttaggagcaagagtggtgctaactgggatgaagagaactttatcatccgatatgaccatgagatgtacacaagtcattttaaggatgagaatggaaaggagatcaacaagggtgatgatgagtacataaacaagcctcttccatactatggaaatctagctaccatcttcggtgatagtgttgcaacaggtcaatttgtgaagacctcaagtgaacctcttgctgttgatgttgaagaggatgagatgaatgttggaacaccatccagtacttccattgacaaagaagacacagcgggttcaggcaataggccctccaagagagctaagaaggatgaaaatatagttgatcctttggttcacgcctttgaactcggtactcaaaccatagctggtgctatacgagatgcagcatccaagagagcgttgccaccaggtttgtttgaagctgtggatagtcttcctggttttgagcttgagcacaaggctaagtactattcttatttgctgaacaatcctaatgttgcacaagggtttgtggaggtgccgttgttgtacaagcttagtatgcttactgagttcattaatggtaatatgtaggcttgctaggaatacttcattttgggtgacataaactagtatgtcatgcttctatgtatccataaacaaggcactttgggaatacttcattttgggtgatatgaacttgtatgtcatgcttctatttactaatgaacatggcactttggattata

SEQ ID NO: 17198 - DNA, 1204 bp, Zea Mays
gttagcacaaaaaatagttttgctagaatattagttctggtgcacatagttcttcttgaaattgtataatgattttcaagattttatgtgtgcatatattgatgttccacgctgcttgagtcatctccaatgtcacgtggacctggactccaatgagatggtgtacatttattaattactaaatggattttatgcttttagagtcagaactaatcgtcagctctgaaaatggtgccatttcttactcatcaagccgttcagatgctaatgactcagcttcttccctatccgtaaacggcttgtaccagtcttcagttttctgaactttaagcagataccaataccagaaagacatgctactatggcgtgcaagaataaggctttcatctgactgatctcgggagtgatcatgggccctgaaaaagattttactctatgaccttcatgtgattgtccagcagttagggtagactttaccgggaactggatggaattgaggccccgtttcaatctcacgtgataaactttagcttcctgctaaactttagctatatgaattgaagtgctaaagtttagcttcaattaccaccattagctctcctgtttagattacaaatggctaaaagtagctaaaaaatagctgctaaagtttatctcgcgagattggaacagggcctgagtctgtttaaatcataagttgaaatccattcgaatccctctgaatccacatgtatgtttgttgggctgtgtctgtctttgagtttggttcagctaggaagataatagctatacaaccgccttttgccttatttttttcttcacattttgtttgttcgacctatggggttcgtccctcaatttatgtgaaaccttttcttttgaattagaccaacttatgcaaaacctacatgctatgttccggatgaagggtgctgaacacgctcccatacgaatccgcgagaagtgggaaggcgcaggcgcagccgcaacaggcaacagcaagttcttcaggcagcatgaatgaagacaacagtcactatcctatcatctgctagaggtgctacagtgcgacactctaaacacacaaaggacagaagatgcgtcaaagcagatgttttttttgcatccatgcagaggtgaaacatgattttgaatcctctcaactaacgtattgagataaagaaattttagttctacgacagtc

SEQ ID NO: 17199 - DNA, 1146 bp, Zea Mays
attccaaaactttctcacagaaaccgccgcccctttccgtcctttagcatcggccgccactgcgccctcgcgtccacgctgggggtccgttggatcaggtcccggcgtcccgcctccctggcctccggcatcagccgccaccgcgcgttccgtcgtccgcctcggtctagattaacacagattggacttttaggaaaacacagcccacggcttgccgcgatttagtttcccaaatcccagggccgatgtcagcccacgacgaggacggcggccgccgccgcaggacccttgccaaggtttcactctcgttggtctcggccaccatggcggaggcctccacctactccttagacgcagtcaagacgcgccgcctccagttccaccgcagccccggcggcgcgggcgggcgcggcgtaatccgggtcgcggccgagctcgtccgcgatggcggggtttaacggggcttatccccctccgtcctccgccacctgatgtacaccccgctttgcatcgtggggttccagcatcttcggcccaccctcgctagcgacaggcgggaggttggcctggttgggaaggcgctcgccggtggactttcaggcgttgctgcgcagttgtttcatggcatggtgagccaatggcttcaatgagcaccagtaacagtgatacgcaaattatttcattgtgcttctattcttcaccatattctgatcttccttaacagttgctagtcactgatatggctgtcgttctgggtttcctacgagaaactgcaccaaacatcagttattttatcattttggcaatcgagtgtgtttcatgatagaaccatttttatgttcattaccggagtgtgggcttttatcccttgctgtcatcaaggaaaaacatggatgaaattgctatgcctcacgttgtattttgacaatctacaagatctatgaactccacagaaaactgacaatctcatccattctcccttttctattaacaaagttgcttgctcaacctatattagtgtgatttatagcctcacgtgggaagttatatatgtcattcaaaatttgtcatctataaatatttattcataacttttaatcaaagtataatgattaaagaagatttcaatatgtgatgtatatgaac

SEQ ID NO: 17200 - DNA, 1494 bp, Zea Mays
cgtgaaaggatttttatagtttttttattctgcatgaatttcaaagaaaatccagcagttcaagaaactggcgctggtggaagaacaaatcataccctatctgactcagcgccagatatactgtattacatgatcaaagtatacgtgccgtaaacaactatatactgtattacatgatcaaagtgttactgtatacgtgccgtaattacaatatggcttctagatgtacaatattttgggtgatgataccaacaatgtacacagtccgacaacagctaagttatccctatcgtacaactcagttcctctcgtagaactgaaacttcatcatttaaatccgttaggtgctaggattcaaaatcctgtttcgcatctgcatggatgcaaaaatcacatctgttttgacgtatcttttacgcttttttacgcgttggagtatcgtgtatctcccgattgctatacagtacagtgtcgctgatgatgggatggtgactggtgtctccattcatgctgcctggaggacttgctcttgctgcagcccctgctgcttcccacttcttgctgattcgtatgggagcgtgttcagcaccttcacccggaacatagcctgtaggttttgcacaagttgattgtaattcagaagaaaaggtttcacattgattcagggatgaacgccacaagacgaacaattggctaaataagaggaacaaaccaaatgtgaagaaaaataaaaggcaaaggacggtagtatagctaccttcttatcggaaccaaactcaatgacatcggaaggatggaaacgaaccgggaagtttggtggcacgcggtaacgtctaccttcattgctggacaatcacatgaaggtcagtgagtaaaatcttgttactgaaattctcgacgatggggcatagcaccatggttctttcagggcttactcggtaatccaggtaccatgttcactcccgagatcagtcagatagaaagccttattcttgcacgtgatagtagcatgcctttctgatatctgcatcaagttcagaaaactgaagactggtacaagcagtttacggatacaaggccttgtacaatgcaacacatgagaagttcgtttaaaccctgtcatcattcggattaactaacctgtggaaagggcaatgatagggaagaagctgagtcattagcatctgaccggctgctgcaaaagaaaattcactagttttgttccataaagccttgattgaatgcaattagggcagaaatgagtttgctatttagacatacccaacagagagtgacctctgctcatccctaattaaacgaatgggctgctgcaagctattgttgtttgcttcacttgttgcgaagaggtaccatctgcaaatagtattatgaatgatttttttgtccaaaagtgctgaaataaagtaataaatcaaacacttcgtttcacaaaataaaaatgaaatataagaagaaacaaagaacgtactctcc

SEQ ID NO: 17201 - DNA, 1295 bp, Zea Mays
gtcacatatgttcgcattttcggattggtccccttagatgttggccaggtggtttatgcctctcaagatcgattggtgatcaggatgtaggtgaatttattattccggttccttatgtgaagcaaattaagctgtctaatgctggaggccgtcttattatttcaagcgacggtgtttgggatgctttgactgcagaaatggcttttaaatgtgcacgagggcttcctcctgaggccgcagctgagcaaattgttaaagaagcagttgaagcaaaaggattgagagatgatacaacttgcattgtcattgacataatatcaccagagaaaccaaaacgcactatacaatctcaaagaacgccaggaaaaggccttgtgcttctaaaaaatttctttttaaggaaaacaacatctgactcgttgtctctccctgataaggataattatcctgagccagatttagaggaggtctttgaggacggatgcccatccctttcaaggaggcttaattctgagtatcctgtccgagacatgttcaaactttttgcatgtgcaatttgtcaaattgacttggaatctggccaaggcatatccatacacgagggtttgtcaaggccagggaagctgcgtccctgggatggccctttcctttgtcacagctgccaggaaaagaaagaggcgatggaggggaagcgccattcacgagattcctcgtccagaaatagcgggtcaagtgaatcgtgactgaagccgagaatcatcttgaggcaaacgcctagcggtgtgacgagctaattatcgttgctgctgttatcttgcagcactttctcatggattaccattgaattgagacatgttggaagtcgccatgcctatatatatgttggagctgtacggtactggaccgtagagcaaatccaatcgcctctagataccacaccagcgtcttcggcagggcttgtgacagcagcttatgcagggaatgatgacaagaggttattattagtgaagaatgtcgacagtggccaacagtcatgtaaattattcgtcgtgtagaggtgcaagtgacaaatagccacggttttgtaattctcaactaggattaggtattgagacctgtaattcgtctgggcagacctcaaactgaaggtcaacaacgtagcctggccctattgtagaatgtatgttgccctacaatctaaatgattcaacgctgcaattaaatctaagatctttgcagaccaccataattctttttcggttactatactagtgtaatgtttgtccaatcatatt

SEQ ID NO: 17202 - DNA, 2732 bp, Zea Mays
gccgcgggctcccgtctcccccctcctgccgcttttcgggatttcgtttcgtttcactcgagggcgaggctggatttgcgcgtcctgtaccgagcgttccatgtgacaggtcgctcgcttgcccccgccccgccgctccccctcctcgtctcgcaaagcaaccgcaacgcgccgagccggcagcggggtccccccaaaagacgaggcagcgagcaaggtaggcaggcaggcaggcagcgggctggcggaaaagactagtgcgcgctcgtgctcgtgctggtgctccccgaccagactagaccagcttgctagcgccagcaaggcgagcggcgatgctcgcacgatctactacagctgccgccgcggccgccgccgggatctgcctgtgattaaggatgtcggcgtcgcggagcgggaggcggcggaccggtagcgtggcgctcggagaccttctgcagcgggaggcgtcggcggagcgggccgcgttgggatgcggcgagcggccctcggtcgcggcggggcaggcctgccgggcgaagaagggtgaggacttcgcgctgctcaagcccgcctgcgagcgacgccccggcgcgccgtccacctccttctccgccttcgccctgttcgatgggcacaacgggagcgccgccgcggtgtacgccaaggagcacctcctcggcaacgtgctcagctgcgtcccgaccgatctggcctgggacgactggctcgccgcgctgccgagggccctcgtcgcggggttcgtcaagaccgacaaggatttccagactaaagctcattcctcggggacaaccgtgacgcttgccataattgatggctccgttgtaactgttgcatctgttggtgattcacgttgtgtccttgaagctgagggatccatctactatttgtcggctgaccatcgcttcgacgctaatgaagaggaggttggacgtgtaaccgaatgtggaggtgaagttggaagactaaatgtcgtcggtggtgctgagattggtccccttagatgttggccaggtggtttatgcctctcaagatcgattggtgatcaggatgtaggtgaatttattattccggttccttatgtgaagcaaattaaggtacactgttgggaagttattttacaccatttctggacaaaactgaattgtaaactctcactatagtgatatcacattcaagtaccagaagttgtgctgtttggatttttctcattatcattatcatctgaattttctatcgttatgagagcctgtccttgtaaattagctctaatctttgaggtcaaactgtattctatactgtacctgttacctgactatttagacatacatcactttatcaacacatattttccagtatttataaactgactgccagatttttgttcttatttcctttgtttgcaaagtttgttcgttgttatacgcaactatagttatgttttcttttcttttctgagaggattatcctgtgattttctctggagtgattctttgttcatttaaatcggatcgaaatttgaaaacaatgttgtattgcaatgcttgtagctgtctaatgctggaggccgtcttattatttcaagcgacggtgtttgggatgctttgactgcagaaatggcttttaaatgtgcacgagggcttcctcctgaggccgcagctgagcaaattgttaaagaagcagttgaagcaaaaggattgagagatgatacaacttgcattgtcattgacataatatcaccagagaaaccaaaacgcactatacaatctcaaagaacgccaggaaaaggccttgtgcttctaaaaaatttctttttaaggaaaacaacatctgactcgttgtctctccctgataaggataattatcctgagccagatttagaggaggtctttgaggacggatgcccatccctttcaaggaggcttaattctgagtatcctgtccgagacatgttcaaactttttgcatgtgcaatttgtcaaattgacttggaatctggccaaggcatatccatacacgagggtttgtcaaggccagggaagctgcgtccctgggatggccctttcctttgtcacagctgccaggaaaagaaagaggcgatggaggggaagcgccattcacgagattcctcgtccagaaatagcgggtcaagtgaatcgtgactgaagccgagaatcatcttgaggcaaacgcctagcggtgtgacgagctaattatcgttgctgctgttatcttgcagcactttctcatggattaccattgaattgagacatgttggaagtcgccatgcctatatatatgttggagctgtacggtactggaccgtagagcaaatccaatcgcctctagataccacaccagcgtcttcggcagggcttgtgacagcagcttatgcagggaatgatgacaagaggttattattagtgaagaatgtcgacagtggccaacagtcatgtaaattattcgtcgtgtagaggtgcaagtgacaaatagccacggttttgtaattctcaactaggattaggtattgagacctgtaattcgtctgggcagacctcaaactgaaggtcaacaacgtagcctggccctattgtagaatgtatgttgccctacaatctaaatgattcaacgctgcaattaaatctaagatctttgcagaccaccataattctttttcggttactatactagtgtaatgtttgtccaatcatatt

SEQ ID NO: 17203 - DNA, 2327 bp, Zea Mays
gccgcgggctcccgtctcccccctcctgccgcttttcgggatttcgtttcgtttcactcgagggcgaggctggatttgcgcgtcctgtaccgagcgttccatgtgacaggtcgctcgcttgcccccgccccgccgctccccctcctcgtctcgcaaagcaaccgcaacgcgccgagccggcagcggggtccccccaaaagacgaggcagcgagcaaggtaggcaggcaggcaggcagcgggctggcggaaaagactagtgcgcgctcgtgctcgtgctggtgctccccgaccagactagaccagcttgctagcgccagcaaggcgagcggcgatgctcgcacgatctactacagctgccgccgcggccgccgccgggatctgcctgtgattaaggatgtcggcgtcgcggagcgggaggcggcggaccggtagcgtggcgctcggagaccttctgcagcgggaggcgtcggcggagcgggccgcgttgggatgcggcgagcggccctcggtcgcggcggggcaggcctgccgggcgaagaagggtgaggacttcgcgctgctcaagcccgcctgcgagcgacgccccggcgcgccgtccacctccttctccgccttcgccctgttcgatgggcacaacgggagcgccgccgcggtgtacgccaaggagcacctcctcggcaacgtgctcagctgcgtcccgaccgatctggcctgggacgactggctcgccgcgctgccgagggccctcgtcgcggggttcgtcaagaccgacaaggatttccagactaaagctcattcctcggggacaaccgtgacgcttgccataattgatggctccgttgtaactgttgcatctgttggtgattcacgttgtgtccttgaagctgagggatccatctactatttgtcggctgaccatcgcttcgacgctaatgaagaggaggttggacgtgtaaccgaatgtggaggtgaagttggaagactaaatgtcgtcggtggtgctgagattggtccccttagatgttggccaggtggtttatgcctctcaagatcgattggtgatcaggatctgtctaatgctggaggccgtcttattatttcaagcgacggtgtttgggatgctttgactgcagaaatggcttttaaatgtgcacgagggcttcctcctgaggccgcagctgagcaaattgttaaagtacaatactaatacccttcccacccatcctaacacaaggtctcaaatcctcagttgtacatgtactgttcctaactggtgtattgtttgcaggaagcagttgaagcaaaaggattgagagatgatacaacttgcattgtcattgacataatatcaccagagaaaccaaaacgcactatacaatctcaaagaacgccaggaaaaggccttgtgcttctaaaaaatttctttttaaggaaaacaacatctgactcgttgtctctccctgataaggataattatcctgagccagatttagaggaggtctttgaggacggatgcccatccctttcaaggaggcttaattctgagtatcctgtccgagacatgttcaaactttttgcatgtgcaatttgtcaaattgacttggaatctggccaaggcatatccatacacgagggtttgtcaaggccagggaagctgcgtccctgggatggccctttcctttgtcacagctgccaggaaaagaaagaggcgatggaggggaagcgccattcacgagattcctcgtccagaaatagcgggtcaagtgaatcgtgactgaagccgagaatcatcttgaggcaaacgcctagcggtgtgacgagctaattatcgttgctgctgttatcttgcagcactttctcatggattaccattgaattgagacatgttggaagtcgccatgcctatatatatgttggagctgtacggtactggaccgtagagcaaatccaatcgcctctagataccacaccagcgtcttcggcagggcttgtgacagcagcttatgcagggaatgatgacaagaggttattattagtgaagaatgtcgacagtggccaacagtcatgtaaattattcgtcgtgtagaggtgcaagtgacaaatagccacggttttgtaattctcaactaggattaggtattgagacctgtaattcgtctgggcagacctcaaactgaaggtcaacaacgtagcctggccctattgtagaatgtatgttgccctacaatctaaatgattcaacgctgcaattaaatctaagatctttgcagaccaccataattctttttcggttactatactagtgtaatgtttgtccaatcatatt

SEQ ID NO: 17204 - DNA, 2171 bp, Zea Mays
gccgcgggctcccgtctcccccctcctgccgcttttcgggatttcgtttcgtttcactcgagggcgaggctggatttgcgcgtcctgtaccgagcgttccatgtgacaggtcgctcgcttgcccccgccccgccgctccccctcctcgtctcgcaaagcaaccgcaacgcgccgagccggcagcggggtccccccaaaagacgaggcagcgagcaaggtaggcaggcaggcaggcagcgggctggcggaaaagactagtgcgcgctcgtgctcgtgctggtgctccccgaccagactagaccagcttgctagcgccagcaaggcgagcggcgatgctcgcacgatctactacagctgccgccgcggccgccgccgggatctgcctgtgattaaggatgtcggcgtcgcggagcgggaggcggcggaccggtagcgtggcgctcggagaccttctgcagcgggaggcgtcggcggagcgggccgcgttgggatgcggcgagcggccctcggtcgcggcggggcaggcctgccgggcgaagaagggtgaggacttcgcgctgctcaagcccgcctgcgagcgacgccccggcgcgccgtccacctccttctccgccttcgccctgttcgatgggcacaacgggagcgccgccgcggtgtacgccaaggagcacctcctcggcaacgtgctcagctgcgtcccgaccgatctggcctgggacgactggctcgccgcgctgccgagggccctcgtcgcggggttcgtcaagaccgacaaggatttccagactaaagctcattcctcggggacaaccgtgacgcttgccataattgatggctccgttgtaactgttgcatctgttggtgattcacgttgtgtccttgaagctgagggatccatctactatttgtcggctgaccatcgcttcgacgctaatgaagaggaggttggacgtgtaaccgaatgtggaggtgaagttggaagactaaatgtcgtcggtggtgctgagctgtctaatgctggaggccgtcttattatttcaagcgacggtgtttgggatgctttgactgcagaaatggcttttaaatgtgcacgagggcttcctcctgaggccgcagctgagcaaattgttaaagaagcagttgaagcaaaaggattgagagatgatacaacttgcattgtcattgacataatatcaccagagaaaccaaaacgcactatacaatctcaaagaacgccaggaaaaggccttgtgcttctaaaaaatttctttttaaggaaaacaacatctgactcgttgtctctccctgataaggataattatcctgagccagatttagaggaggtctttgaggacggatgcccatccctttcaaggaggcttaattctgagtatcctgtccgagacatgttcaaactttttgcatgtgcaatttgtcaaattgacttggaatctggccaaggcatatccatacacgagggtttgtcaaggccagggaagctgcgtccctgggatggccctttcctttgtcacagctgccaggaaaagaaagaggcgatggaggggaagcgccattcacgagattcctcgtccagaaatagcgggtcaagtgaatcgtgactgaagccgagaatcatcttgaggcaaacgcctagcggtgtgacgagctaattatcgttgctgctgttatcttgcagcactttctcatggattaccattgaattgagacatgttggaagtcgccatgcctatatatatgttggagctgtacggtactggaccgtagagcaaatccaatcgcctctagataccacaccagcgtcttcggcagggcttgtgacagcagcttatgcagggaatgatgacaagaggttattattagtgaagaatgtcgacagtggccaacagtcatgtaaattattcgtcgtgtagaggtgcaagtgacaaatagccacggttttgtaattctcaactaggattaggtattgagacctgtaattcgtctgggcagacctcaaactgaaggtcaacaacgtagcctggccctattgtagaatgtatgttgccctacaatctaaatgattcaacgctgcaattaaatctaagatctttgcagaccaccataattctttttcggttactatactagtgtaatgtttgtccaatcatatt

SEQ ID NO: 17205 - DNA, 2241 bp, Zea Mays
gcggccgcgggctcccgtctcccccctcctgccgcttttcgggatttcgtttcgtttcactcgagggcgaggctggatttgcgcgtcctgtaccgagcgttccatgtgacaggtcgctcgcttgcccccgccccgccgctccccctcctcgtctcgcaaagcaaccgcaacgcgccgagccggcagcggggtccccccaaaagacgaggcagcgagcaaggtaggcaggcaggcaggcagcgggctggcggaaaagactagtgcgcgctcgtgctcgtgctggtgctccccgaccagactagaccagcttgctagcgccagcaaggcgagcggcgatgctcgcacgatctactacagctgccgccgcggccgccgccgggatctgcctgtgattaaggatgtcggcgtcgcggagcgggaggcggcggaccggtagcgtggcgctcggagaccttctgcagcgggaggcgtcggcggagcgggccgcgttgggatgcggcgagcggccctcggtcgcggcggggcaggcctgccgggcgaagaagggtgaggacttcgcgctgctcaagcccgcctgcgagcgacgccccggcgcgccgtccacctccttctccgccttcgccctgttcgatgggcacaacgggagcgccgccgcggtgtacgccaaggagcacctcctcggcaacgtgctcagctgcgtcccgaccgatctggcctgggacgactggctcgccgcgctgccgagggccctcgtcgcggggttcgtcaagaccgacaaggatttccagactaaagctcattcctcggggacaaccgtgacgcttgccataattgatggctccgttgtaactgttgcatctgttggtgattcacgttgtgtccttgaagctgagggatccatctactatttgtcggctgaccatcgcttcgacgctaatgaagaggaggttggacgtgtaaccgaatgtggaggtgaagttggaagactaaatgtcgtcggtggtgctgagattggtccccttagatgttggccaggtggtttatgcctctcaagatcgattggtgatcaggatgtagctgtctaatgctggaggccgtcttattatttcaagcgacggtgtttgggatgctttgactgcagaaatggcttttaaatgtgcacgagggcttcctcctgaggccgcagctgagcaaattgttaaagaagcagttgaagcaaaaggattgagagatgatacaacttgcattgtcattgacataatatcaccagagaaaccaaaacgcactatacaatctcaaagaacgccaggaaaaggccttgtgcttctaaaaaatttctttttaaggaaaacaacatctgactcgttgtctctccctgataaggataattatcctgagccagatttagaggaggtctttgaggacggatgcccatccctttcaaggaggcttaattctgagtatcctgtccgagacatgttcaaactttttgcatgtgcaatttgtcaaattgacttggaatctggccaaggcatatccatacacgagggtttgtcaaggccagggaagctgcgtccctgggatggccctttcctttgtcacagctgccaggaaaagaaagaggcgatggaggggaagcgccattcacgagattcctcgtccagaaatagcgggtcaagtgaatcgtgactgaagccgagaatcatcttgaggcaaacgcctagcggtgtgacgagctaattatcgttgctgctgttatcttgcagcactttctcatggattaccattgaattgagacatgttggaagtcgccatgcctatatatatgttggagctgtacggtactggaccgtagagcaaatccaatcgcctctagataccacaccagcgtcttcggcagggcttgtgacagcagcttatgcagggaatgatgacaagaggttattattagtgaagaatgtcgacagtggccaacagtcatgtaaattattcgtcgtgtagaggtgcaagtgacaaatagccacggttttgtaattctcaactaggattaggtattgagacctgtaattcgtctgggcagacctcaaactgaaggtcaacaacgtagcctggccctattgtagaatgtatgttgccctacaatctaaatgattcaacgctgcaattaaatctaagatctttgcagaccaccataattctttttcggttactatactagtgtaatgtttgtccaatcatatt

SEQ ID NO: 17206 - DNA, 2911 bp, Zea Mays
cccccttcttgacgtgccccctgctcggctgccggtcacgcgggccaagctatatcgcagtagatgggccaggctacatggtaggacgattccatacctatctgttttgtcttagagtggaaagaagagcatccgacggacattgatgtgcgttgatgagatccgacagacacacgttggccggtgacatgttttggctcccgcatctcctgacgggtgtccacgtcaccctgacctctcatccaatcgttccttcttccctatataaaaggatgactgttcagcattccactccacatgacagcagcgacgacgtttgcggtccctggttgagcgcctctatcccccttcatctcgctccttcgcagaggtactagctatcatcatcttctatctgatttttgtcggctacggttttggaaagaaatgttgcgcgtcgtcatccatggcggagcaagtcagctgctgaatggcggcgtcgaagcccccatcggccgaatcactgtctgagaagcgaacgaagcgcagtcgcgagaagtgctgatccgtctcaaacatttgggactgtgattttcttttgttttctactacaacaatcccatttttctctgtttgtagacacgtacggagttaataaactaaaacatttgtattactagaataattcagtggtgaggacaatgtcaatataataacgtaattctttgttttattcctaacaattgagaggaatgttttgatagtaaatggttactctattactagaataattcagtaacaaatcaagatcttgtatcgttcggtagaaagcatcaattgtggctgtaatctaatacggtttttaccacacttttgactagaaacacataaatagttagttgggttacgatcctgattaatttgccttttgccatcgctaagcatcttttctccgtcagtatatatggacaccatgatggggcgtcgtcttctagtgagccttgtaccactactcatggcggtcatggtggcggcggcgttcgacatctcaagaggcccaccggcgttcggggtccgaagaggggctccaaaggagtactgcgactggcgcggaccttggggcgctgcgcccttcctgctggggtcagctgcggccatccacctcggcaacaccaactcgtgcatcgccgcctacaactttcgcacatggagccacgagtactaccagctctgcatgccctcttgggtggccgtcacggacaacggtacggtcctctccggcgaggctgctatgaaccacgccaccatcggccctaggacggccatctcgggcttcacgcgcctcctcgaccaaaagctcacggacgatgtggggaagagcgagatgaagctttcgccgccgtacaagttctccgagagggcgggaccggtcgccatgcaatttaatcatccaagccggcgtggccaggtcatagagttctcccccgtggatctcgccgttgtcctcgtctctgagctgaagcacagggcggaggctcacctaggacgtgagctctcggctgctgtcatcgccatgccgcgtcacctcaactacaacgaaaggcatgacatcgtcaatgtgggacggcacgacgctggcttccaccggggcgccaaggccatcgaccggtagatcgtggcggccgcgtcgtatcaccaccacacggagcagggtgacggcaaggctatccttgtcttgcgtgttggcggccgcacgtccaacgccaccatcttcaagttcatcgatggcgaggctcgctacatcgcggcgcaagatgatatctacttgggaggtgacgacttcacggcgcggatcgtcgactacatggcagagctcatcaaggagaagcaccagtgggacatcaggcaggacgcggaggcgctgcgcaggctaagggtggcctacgagcacgccaagaaggcattgagcgaccaggaagagacgatggtgcagatacatgtcgccggcatcgagtcatcggcgcccctcacacgggccaagctggaggagctcaaccaggacctgttggacagggtcatgggacttgtggacggggcggtgatggggacggggagtgggtggctgacccagccccgcgacgagagtcgcaaggacatggtcgacgagatcgtcctcgtcggtggcggcacgaggatgcccaagctccgtcagctcgtcgaggactactttcatggcaggcggccaaacagccgcaagggagtggaaccagaggacgccatcgtccggggcaccgccattctttcctgtcctaaggcggcgcactacctagaggagtgctttgactatctttacggcaaggatggtaggggtcttccaagttttatattcagaacgccggattaatcccaaaaataaccaagtcgtaatcttgcattctcattccttctctatgatcgacccctggccaaggagtcatattgtttgttttaactgttctgttctgttagggcttctttagatggcaggatcggtaaaaacataaggatatgaaaaatgtagtattagaggttcaagacacttgcaattctataggaaaattttcaagaggttggaatcctctaaaatctcactataatggtctattccataggaattctaggaactcaatcatttgttttgtttcaaacgacaacatatataggaaaaataaaattttctatatgattgtaatccctcaaaattccttcatttttactttattccaaaggaggagttagtaatctattggtaatgatggataaactattgcctattagaaatctgattgtcagtgctagataatggtttagatttattttgttatgaaacaattatgtgagtgcgatgaacgagatcgatcaacgcaggtctgagcttttaactctgttctcg

SEQ ID NO: 17207 - DNA, 2917 bp, Zea Mays
ggagcacatgtccgagaggttgacgaggctagtggcgtggcacaggcggcgagaccagagcacctgatcccacacttgctccggcagtcgcaacgtgaacctctcgtggtcgccctcctccttcgcgttgccgccggccgccgccgcaaagagcgtgtggcggcccgccgcgccctgcgcagcatctccagctcgatggcctcctccttcctatcgtcctccttgtcgctgtcctcctccaactcgtcgtccaacaccggtaccgccacggcctccggcagccgcgaaggctagcacggcgctagcgccaccggcggcaccagcaccggtaccttggcgcggcagagcaggcacgtggcccgcgactgcagccaggggtcgatgcactcggggtggaacgcgtgggacggtgggagcagtgcggcagtaggcggtggtcattgtcgtccactcgtcctcgaacgccgtgaggcacaccgcgcactccagcaccccttgccgaccttgtgctccacgacctccctgtacgacacgatcgggaacgtggcgacaaccgcgggtccagtccacgcttcccccttcttgacgtgccccctgctcggctgccggtcacgcgggccaagctatatcgcagtagatgggccaggctacatggtaggacgattccatacctatctgttttgtcttagagtggaaagaagagcatccgacggacattgatgtgcgttgatgagatccgacagacacacgttggccggtgacatgttttggctcccgcatctcctgacgggtgtccacgtcaccctgacctctcatccaatcgttccttcttccctatataaaaggatgactgttcagcattccactccacatgacagcagcgacgacgtttgcggtccctggttgagcgcctctatcccccttcatctcgctccttcgcagagtatatatggacaccatgatggggcgtcgtcttctagtgagccttgtaccactactcatggcggtcatggtggcggcggcgttcgacatctcaagaggcccaccggcgttcggggtccgaagaggggctccaaaggagtactgcgactggcgcggaccttggggcgctgcgcccttcctgctggggtcagctgcggccatccacctcggcaacaccaactcgtgcatcgccgcctacaactttcgcacatggagccacgagtactaccagctctgcatgccctcttgggtggccgtcacggacaacggtacggtcctctccggcgaggctgctatgaaccacgccaccatcggccctaggacggccatctcgggcttcacgcgcctcctcgaccaaaagctcacggacgatgtggggaagagcgagatgaagctttcgccgccgtacaagttctccgagagggcgggaccggtcgccatgcaatttaatcatccaagccggcgtggccaggtcatagagttctcccccgtggatctcgccgttgtcctcgtctctgagctgaagcacagggcggaggctcacctaggacgtgagctctcggctgctgtcatcgccatgccgcgtcacctcaactacaacgaaaggcatgacatcgtcaatgtgggacggcacgacgctggcttccaccggggcgccaaggccatcgaccggtagatcgtggcggccgcgtcgtatcaccaccacacggagcagggtgacggcaaggctatccttgtcttgcgtgttggcggccgcacgtccaacgccaccatcttcaagttcatcgatggcgaggctcgctacatcgcggcgcaagatgatatctacttgggaggtgacgacttcacggcgcggatcgtcgactacatggcagagctcatcaaggagaagcaccagtgggacatcaggcaggacgcggaggcgctgcgcaggctaagggtggcctacgagcacgccaagaaggcattgagcgaccaggaagagacgatggtgcagatacatgtcgccggcatcgagtcatcggcgcccctcacacgggccaagctggaggagctcaaccaggacctgttggacagggtcatgggacttgtggacggggcggtgatggggacggggagtgggtggctgacccagccccgcgacgagagtcgcaaggacatggtcgacgagatcgtcctcgtcggtggcggcacgaggatgcccaagctccgtcagctcgtcgaggactactttcatggcaggcggccaaacagccgcaagggagtggaaccagaggacgccatcgtccggggcaccgccattctttcctgtcctaaggcggcgcactacctagaggagtgctttgactatctttacggcaaggatggtaggggtcttccaagttttatattcagaacgccggattaatcccaaaaataaccaagtcgtaatcttgcattctcattccttctctatgatcgacccctggccaaggagtcatattgtttgttttaactgttctgttctgttagggcttctttagatggcaggatcggtaaaaacataaggatatgaaaaatgtagtattagaggttcaagacacttgcaattctataggaaaattttcaagaggttggaatcctctaaaatctcactataatggtctattccataggaattctaggaactcaatcatttgttttgtttcaaacgacaacatatataggaaaaataaaattttctatatgattgtaatccctcaaaattccttcatttttactttattccaaaggaggagttagtaatctattggtaatgatggataaactattgcctattagaaatctgattgtcagtgctagataatggtttagatttattttgttatgaaacaattatgtgagtgcgatgaacgagatcgatcaacgcaggtctgagcttttaactctgttctcg

SEQ ID NO: 17208 - DNA, 2934 bp, Zea Mays
ggagcacatgtccgagaggttgacgaggctagtggcgtggcacaggcggcgagaccagagcacctgatcccacacttgctccggcagtcgcaacgtgaacctctcgtggtcgccctcctccttcgcgttgccgccggccgccgccgcaaagagcgtgtggcggcccgccgcgccctgcgcagcatctccagctcgatggcctcctccttcctatcgtcctccttgtcgctgtcctcctccaactcgtcgtccaacaccggtaccgccacggcctccggcagccgcgaaggctagcacggcgctagcgccaccggcggcaccagcaccggtaccttggcgcggcagagcaggcacgtggcccgcgactgcagccaggggtcgatgcactcggggtggaacgcgtgggacggtgggagcagtgcggcagtaggcggtggtcattgtcgtccactcgtcctcgaacgccgtgaggcacaccgcgcactccagcaccccttgccgaccttgtgctccacgacctccctgtacgacacgatcgggaacgtggcgacaaccgcgggtccagtccacgcttcccccttcttgacgtgccccctgctcggctgccggtcacgcgggccaagctatatcgcagtagatgggccaggctacatggtaggacgattccatacctatctgttttgtcttagagtggaaagaagagcatccgacggacattgatgtgcgttgatgagatccgacagacacacgttggccggtgacatgttttggctcccgcatctcctgacgggtgtccacgtcaccctgacctctcatccaatcgttccttcttccctatataaaaggatgactgttcagcattccactccacatgacagcagcgacgacgtttgcggtccctggttgagcgcctctatcccccttcatctcgctccttcgcagagcatcttttctccgtcagtatatatggacaccatgatggggcgtcgtcttctagtgagccttgtaccactactcatggcggtcatggtggcggcggcgttcgacatctcaagaggcccaccggcgttcggggtccgaagaggggctccaaaggagtactgcgactggcgcggaccttggggcgctgcgcccttcctgctggggtcagctgcggccatccacctcggcaacaccaactcgtgcatcgccgcctacaactttcgcacatggagccacgagtactaccagctctgcatgccctcttgggtggccgtcacggacaacggtacggtcctctccggcgaggctgctatgaaccacgccaccatcggccctaggacggccatctcgggcttcacgcgcctcctcgaccaaaagctcacggacgatgtggggaagagcgagatgaagctttcgccgccgtacaagttctccgagagggcgggaccggtcgccatgcaatttaatcatccaagccggcgtggccaggtcatagagttctcccccgtggatctcgccgttgtcctcgtctctgagctgaagcacagggcggaggctcacctaggacgtgagctctcggctgctgtcatcgccatgccgcgtcacctcaactacaacgaaaggcatgacatcgtcaatgtgggacggcacgacgctggcttccaccggggcgccaaggccatcgaccggtagatcgtggcggccgcgtcgtatcaccaccacacggagcagggtgacggcaaggctatccttgtcttgcgtgttggcggccgcacgtccaacgccaccatcttcaagttcatcgatggcgaggctcgctacatcgcggcgcaagatgatatctacttgggaggtgacgacttcacggcgcggatcgtcgactacatggcagagctcatcaaggagaagcaccagtgggacatcaggcaggacgcggaggcgctgcgcaggctaagggtggcctacgagcacgccaagaaggcattgagcgaccaggaagagacgatggtgcagatacatgtcgccggcatcgagtcatcggcgcccctcacacgggccaagctggaggagctcaaccaggacctgttggacagggtcatgggacttgtggacggggcggtgatggggacggggagtgggtggctgacccagccccgcgacgagagtcgcaaggacatggtcgacgagatcgtcctcgtcggtggcggcacgaggatgcccaagctccgtcagctcgtcgaggactactttcatggcaggcggccaaacagccgcaagggagtggaaccagaggacgccatcgtccggggcaccgccattctttcctgtcctaaggcggcgcactacctagaggagtgctttgactatctttacggcaaggatggtaggggtcttccaagttttatattcagaacgccggattaatcccaaaaataaccaagtcgtaatcttgcattctcattccttctctatgatcgacccctggccaaggagtcatattgtttgttttaactgttctgttctgttagggcttctttagatggcaggatcggtaaaaacataaggatatgaaaaatgtagtattagaggttcaagacacttgcaattctataggaaaattttcaagaggttggaatcctctaaaatctcactataatggtctattccataggaattctaggaactcaatcatttgttttgtttcaaacgacaacatatataggaaaaataaaattttctatatgattgtaatccctcaaaattccttcatttttactttattccaaaggaggagttagtaatctattggtaatgatggataaactattgcctattagaaatctgattgtcagtgctagataatggtttagatttattttgttatgaaacaattatgtgagtgcgatgaacgagatcgatcaacgcaggtctgagcttttaactctgttctcg

SEQ ID NO: 17209 - DNA, 1694 bp, Zea Mays
taaaatgggcacagtatcgatttttatggtaattttttttggggtggggggtatcacttagactagaggttgaaacaacgattccatatgttgacatcatttttagtgctatatgtgggtttcatgtggtacaagtgtacaatgaatgcatattttgtcctgctttgaggggacgatagttatgtagagtttacctgcttagcactaaatgaaacaaatcctttcttctaattctctctatatgtttatatgatctcattaattcttgttattggcaggcacctttttggctttaacatattaagagtttcaaaatccccaattatttggcccttttctgatggatatatgctgcatttctgcttactaatttttgttagctgcattgaagttttaacatataagccaagcaaagaaaaagaccggtgttattgctccaaaacgttttgttcagagagtgaagaaacagaatgagttgtttcgcagctacatgcaccaggatgcacatgagttcttaaatttccttttgaatgaacttgttgatattctggaaaaagagtcaagtgctgctaaggactcaccccaatcgtcgtctcctgaaaaagctccaaatggcccagttcaacctttagccaatggagttaaaaaagaaccaccagttaccctggtccataaaagttttcagggcatattgaccaacgaaacaagatgcttaagatgtgaaacagtaactgcaagggatgaaacatttcttgatcttagtgttgacattgaacaaaatagttcaatcacaagctgcctgaaaaatttctgttctacagagactttaaatgcagaggataaattcttctgtgacaaatgctgcagtttgcaagaagcacagaagagaatgaagattaagaaggctccccacatattggtgatccatctaaagcgtttcaagtacattgagcagcttggccggtataagaagctttcatacagggttgtattccccatggaactgaagctcagtaattcatccgacgatgtagacactgagtactccctctttgctgtcgtggtccatgtcggaagtggcccgaaccatgggcattatgtaagccttgtcaaaagccacaaccactggttgttcttcgacgatgaaaatgtcgagatggttgaagagcagaccctacaaacattcttcggtacttcacatgaatactcaggcaacacggaccatgggtatatcttgttttacgaggggcttggtgggaagagttagattggtctattaacctttcctgttcctttttttccttctctttggagcttgcaagttccactcttgtacctacacagctactatatcattacctccatggaaaacggtcaatccaagaggttgtatgaggcgacgatgccagattttgggtggtttcagtgtacaggggataatggaatctagctcccaacgatgaaataaggtgtaattttgaagttcgcctgaccagttccttctcagggctaacatcttctgttaaagtgtgggactttactattgggcacactgtacatcaattctcgttcataactttgtacgcattttccagttctgatccatgtacgtgctgaaacttgtgagcatttggcatgtttgattttgtttttcagtttacccatgtaactgtattttctcagggcgaacagag

SEQ ID NO: 17210 - DNA, 1443 bp, Zea Mays
gacaagatagatgtgcagctgggaaggataaggcactttatttttgcattccattcagggagcagttactggaatattatgcaaataacaaaactccaggagacgctgaggaaaatcttctgacttgtttggccgacctttttatgcagataagccaagcaaagaaaaagaccggtgttattgctccaaaacgttttgttcagagagtgaagaaacagaatgagttgtttcgcagctacatgcaccaggatgcacatgagttcttaaatttccttttgaatgaacttgttgatattctggaaaaagagtcaagtgctgctaaggactcaccccaatcgtcgtctcctgaaaaagctccaaatggcccagttcaacctttagccaatggagttaaaaaagaaccaccagttaccctggtccataaaagttttcagggcatattgaccaacgaaacaagatgcttaagatgtgaaacagtaactgcaagggatgaaacatttcttgatcttagtgttgacattgaacaaaatagttcaatcacaagctgcctgaaaaatttctgttctacagagactttaaatgcagaggataaattcttctgtgacaaatgctgcagtttgcaagaagcacagaagagaatgaagattaagaaggctccccacatattggtgatccatctaaagcgtttcaagtacattgagcagcttggccggtataagaagctttcatacagggttgtattccccatggaactgaagctcagtaattcatccgacgatgtagacactgagtactccctctttgctgtcgtggtccatgtcggaagtggcccgaaccatgggcattatgtaagccttgtcaaaagccacaaccactggttgttcttcgacgatgaaaatgtcgagatggttgaagagcagaccctacaaacattcttcggtacttcacatgaatactcaggcaacacggaccatgggtatatcttgttttacgaggggcttggtgggaagagttagattggtctattaacctttcctgttcctttttttccttctctttggagcttgcaagttccactcttgtacctacacagctactatatcattacctccatggaaaacggtcaatccaagaggttgtatgaggcgacgatgccagattttgggtggtttcagtgtacaggggataatggaatctagctcccaacgatgaaataaggtgtaattttgaagttcgcctgaccagttccttctcagggctaacatcttctgttaaagtgtgggactttactattgggcacactgtacatcaattctcgttcataactttgtacgcattttccagttctgatccatgtacgtgctgaaacttgtgagcatttggcatgtttgattttgtttttcagtttacccatgtaactgtattttctcagggcgaacagag

SEQ ID NO: 17211 - DNA, 1303 bp, Zea Mays
ccttaacatataagccaagcaaagaaaaagaccggtgttattgctccaaaacgttttgttcagagagtgaagaaacagaatgagttgtttcgcagctacatgcaccaggatgcacatgagttcttaaatttccttttgaatgaacttgttgatattctggaaaaagagtcaagtgctgctaaggactcaccccaatcgtcgtctcctgaaaaagctccaaatggcccagttcaacctttagccaatggagttaaaaaagaaccaccagttaccctggtccataaaagttttcagggcatattgaccaacgaaacaagatgcttaagatgtgaaacagtaactgcaagggatgaaacatttcttgatcttagtgttgacattgaacaaaatagttcaatcacaagctgcctgaaaaatttctgttctacagagactttaaatgcagaggataaattcttctgtgacaaatgctgcagtttgcaagaagcacagaagagaatgaagattaagaaggctccccacatattggtgatccatctaaagcgtttcaagtacattgagcagcttggccggtataagaagctttcatacagggttgtattccccatggaactgaagctcagtaattcatccgacgatgtagacactgagtactccctctttgctgtcgtggtccatgtcggaagtggcccgaaccatgggcattatgtaagccttgtcaaaagccacaaccactggttgttcttcgacgatgaaaatgtcgagatggttgaagagcagaccctacaaacattcttcggtacttcacatgaatactcaggcaacacggaccatgggtatatcttgttttacgaggggcttggtgggaagagttagattggtctattaacctttcctgttcctttttttccttctctttggagcttgcaagttccactcttgtacctacacagctactatatcattacctccatggaaaacggtcaatccaagaggttgtatgaggcgacgatgccagattttgggtggtttcagtgtacaggggataatggaatctagctcccaacgatgaaataaggtgtaattttgaagttcgcctgaccagttccttctcagggctaacatcttctgttaaagtgtgggactttactattgggcacactgtacatcaattctcgttcataactttgtacgcattttccagttctgatccatgtacgtgctgaaacttgtgagcatttggcatgtttgattttgtttttcagtttacccatgtaactgtattttctcagggcgaacagag

SEQ ID NO: 17212 - DNA, 1937 bp, Zea Mays
cggagcaagaaacctctctgttgaagtgctgatgatggattacaatgaatttcagtccacagcagaaaaaaaaaaccccggttagatctgtgtagaaagagtaaagaaatacagataggcccggggtccacaggtccagtgaaatgcttgcccacgaacagaaacagcaagaaccaccacaaggcgagtccgattctagatcaagcgagtcctcccgtttcatcgcctcggaaaaaggcgagaaatctgcaacagaagaagcagcagcgacagcgattccttcctcgtacctttcgttgcgctcgcgcactcggatcgacccctctagggttttgcatcggcctcccgccagctcctatccctcccctctccctccgccgcgcgcccgcgcggggagccaccaaaccctaggacggcaaatccggtgcgatcacccacggtggaggcctcgtcggcggccgagaggagccgctcagggctcgggtcagggttccggtacctcgccggcgccgcctctggctggtgggaccggtggatggtcatgggagccagcggctccaagcttgagaaggccctcggagaccagttcccggaaggcgagcgctacttcggcctcgagaacttcggcaacacctgctactgcaacagtgtccttcagggagcagttactggaatattatgcaaataacaaaactccaggagacgctgaggaaaatcttctgacttgtttggccgacctttttatgcagataagccaagcaaagaaaaagaccggtgttattgctccaaaacgttttgttcagagagtgaagaaacagaatgagttgtttcgcagctacatgcaccagctccaaatggcccagttcaacctttagccaatggagttaaaaaagaaccaccagttaccctggtccataaaagttttcagggcatattgaccaacgaaacaagatgcttaagatgtgaaacagtaactgcaagggatgaaacatttcttgatcttagtgttgacattgaacaaaatagttcaatcacaagctgcctgaaaaatttctgttctacagagactttaaatgcagaggataaattcttctgtgacaaatgctgcagtttgcaagaagcacagaagagaatgaagattaagaaggctccccacatattggtgatccatctaaagcgtttcaagtacattgagcagcttggccggtataagaagctttcatacagggttgtattccccatggaactgaagctcagtaattcatccgacgatgtagacactgagtactccctctttgctgtcgtggtccatgtcggaagtggcccgaaccatgggcattatgtaagccttgtcaaaagccacaaccactggttgttcttcgacgatgaaaatgtcgagatggttgaagagcagaccctacaaacattcttcggtacttcacatgaatactcaggcaacacggaccatgggtatatcttgttttacgaggggcttggtgggaagagttagattggtctattaacctttcctgttcctttttttccttctctttggagcttgcaagttccactcttgtacctacacagctactatatcattacctccatggaaaacggtcaatccaagaggttgtatgaggcgacgatgccagattttgggtggtttcagtgtacaggggataatggaatctagctcccaacgatgaaataaggtgtaattttgaagttcgcctgaccagttccttctcagggctaacatcttctgttaaagtgtgggactttactattgggcacactgtacatcaattctcgttcataactttgtacgcattttccagttctgatccatgtacgtgctgaaacttgtgagcatttggcatgtttgattttgtttttcagtttacccatgtaactgtattttctcagggcgaacagag

SEQ ID NO: 17213 - DNA, 2437 bp, Zea Mays
cggagcaagaaacctctctgttgaagtgctgatgatggattacaatgaatttcagtccacagcagaaaaaaaaaaccccggttagatctgtgtagaaagagtaaagaaatacagataggcccggggtccacaggtccagtgaaatgcttgcccacgaacagaaacagcaagaaccaccacaaggcgagtccgattctagatcaagcgagtcctcccgtttcatcgcctcggaaaaaggcgagaaatctgcaacagaagaagcagcagcgacagcgattccttcctcgtacctttcgttgcgctcgcgcactcggatcgacccctctagggttttgcatcggcctcccgccagctcctatccctcccctctccctccgccgcgcgcccgcgcggggagccaccaaaccctaggacggcaaatccggtgcgatcacccacggtggaggcctcgtcggcggccgagaggagccgctcagggctcgggtcagggttccggtacctcgccggcgccgcctctggctggtgggaccggtggatggtcatgggagccagcggctccaagcttgagaaggccctcggagaccagttcccggaaggcgagcgctacttcggcctcgagaacttcggcaacacctgctactgcaacagtgtccttcaggcactttatttttgcattccattcagggagcagttactggaatattatgcaaataacaaaactccaggagacgctgaggaaaatcttctgacttgtttggccgacctttttatgcagcttgcttaagttgatgggtactgttctactattaattacctgacatataatcagtgttatcaaatcctctaattgatcctattgacgtggcaccgaccagcccgattactcgcactaatcacaattagtcggacgacttgatacattgcatataatatgatcccaatgtcatttaattttgtatggtaaagatctttgacttgacatctttgttgtgaatgcattgtttcactttatccatgtgtgtcagtgttactgcatagtgttttgtatgtcacttgaaacttctgcagtctgcatgatattacaattggccatgataaagaaaaaagaggtgaattaagaggtgctcattgtctatcatgtagataagccaagcaaagaaaaagaccggtgttattgctccaaaacgttttgttcagagagtgaagaaacagaatgagttgtttcgcagctacatgcaccaggatgcacatgagttcttaaatttccttttgaatgaacttgttgatattctggaaaaagagtcaagtgctgctaaggactcaccccaatcgtcgtctcctgaaaaagctccaaatggcccagttcaacctttagccaatggagttaaaaaagaaccaccagttaccctggtccataaaagttttcagggcatattgaccaacgaaacaagatgcttaagatgtgaaacagtaactgcaagggatgaaacatttcttgatcttagtgttgacattgaacaaaatagttcaatcacaagctgcctgaaaaatttctgttctacagagactttaaatgcagaggataaattcttctgtgacaaatgctgcagtttgcaagaagcacagaagagaatgaagattaagaaggctccccacatattggtgatccatctaaagcgtttcaagtacattgagcagcttggccggtataagaagctttcatacagggttgtattccccatggaactgaagctcagtaattcatccgacgatgtagacactgagtactccctctttgctgtcgtggtccatgtcggaagtggcccgaaccatgggcattatgtaagccttgtcaaaagccacaaccactggttgttcttcgacgatgaaaatgtcgagatggttgaagagcagaccctacaaacattcttcggtacttcacatgaatactcaggcaacacggaccatgggtatatcttgttttacgaggggcttggtgggaagagttagattggtctattaacctttcctgttcctttttttccttctctttggagcttgcaagttccactcttgtacctacacagctactatatcattacctccatggaaaacggtcaatccaagaggttgtatgaggcgacgatgccagattttgggtggtttcagtgtacaggggataatggaatctagctcccaacgatgaaataaggtgtaattttgaagttcgcctgaccagttccttctcagggctaacatcttctgttaaagtgtgggactttactattgggcacactgtacatcaattctcgttcataactttgtacgcattttccagttctgatccatgtacgtgctgaaacttgtgagcatttggcatgtttgattttgtttttcagtttacccatgtaactgtattttctcagggcgaacagag

SEQ ID NO: 17214 - DNA, 3377 bp, Zea Mays
cggagcaagaaacctctctgttgaagtgctgatgatggattacaatgaatttcagtccacagcagaaaaaaaaaaccccggttagatctgtgtagaaagagtaaagaaatacagataggcccggggtccacaggtccagtgaaatgcttgcccacgaacagaaacagcaagaaccaccacaaggcgagtccgattctagatcaagcgagtcctcccgtttcatcgcctcggaaaaaggcgagaaatctgcaacagaagaagcagcagcgacagcgattccttcctcgtacctttcgttgcgctcgcgcactcggatcgacccctctagggttttgcatcggcctcccgccagctcctatccctcccctctccctccgccgcgcgcccgcgcggggagccaccaaaccctaggacggcaaatccggtgcgatcacccacggtggaggcctcgtcggcggccgagaggagccgctcagggctcgggtcagggttccggtacctcgccggcgccgcctctggctggtgggaccggtggatggtcatgggagccagcggctccaagcttgagaaggccctcggagaccagttcccggaaggcgagcgctacttcggcctcgagaacttcggcaacacctgctactgcaacagtgtccttcaggcactttatttttgcattccattcagggagcagttactggaatattatgcaaataacaaaactccaggagacgctgaggaaaatcttctgacttgtttggccgacctttttatgcaggtaacatgtagataggattataccaaatgataaaaatgactctagtactttgtaaaatgggcacagtatcgatttttatggtaattttttttggggtggggggtatcacttagactagaggttgaaacaacgattccatatgttgacatcatttttagtgctatatgtgggtttcatgtggtacaagtgtacaatgaatgcatattttgtcctgctttgaggggacgatagttatgtagagtttacctgcttagcactaaatgaaacaaatcctttcttctaattctctctatatgtttatatgatctcattaattcttgttattggcaggcacctttttggctttaacatattaagagtttcaaaatccccaattatttggcccttttctgatggatatatgctgcatttctgcttactaatttttgttagctgcattgaagttttaacatgtacagtatcctagatgtatatctatagctttctttgaataaccctgtcgatatagccatatgtgtccatttatggatttgtagttctttgcttgtaactccatgttctttgtactgtttaataaatttaggtgttgtgcaattacttttgtttcctactgaaagtgagataatagtataatactcatataaactgaaaacctacaatcccacattctgctaaatcgtcttttctatttgtttatcctaagagttgaacccctctgttagtgttgattttgctatagctacatatgatgtgttgaattttgtgcaacatacccactcatggatgcatcatgcatgcacatgtgatatgcttggatagcatgccactagacatttgaacaatgaatctcatgctaagtcgtacttaatgtgcgctctgtgctagtgactataaaacatttattgtattgcctcttactttgcaattggttgttggacagcttgcttaagttgatgggtactgttctactattaattacctgacatataatcagtgttatcaaatcctctaattgatcctattgacgtggcaccgaccagcccgattactcgcactaatcacaattagtcggacgacttgatacattgcatataatatgatcccaatgtcatttaattttgtatggtaaagatctttgacttgacatctttgttgtgaatgcattgtttcactttatccatgtgtgtcagtgttactgcatagtgttttgtatgtcacttgaaacttctgcagtctgcatgatattacaattggccatgataaagaaaaaagaggtgaattaagaggtgctcattgtctatcatgtagataagccaagcaaagaaaaagaccggtgttattgctccaaaacgttttgttcagagagtgaagaaacagaatgagttgtttcgcagctacatgcaccaggatgcacatgagttcttaaatttccttttgaatgaacttgttgatattctggaaaaagagtcaagtgctgctaaggactcaccccaatcgtcgtctcctgaaaaagctccaaatggcccagttcaacctttagccaatggagttaaaaaagaaccaccagttaccctggtccataaaagttttcagggcatattgaccaacgaaacaagatgcttaagatgtgaaacagtaactgcaagggatgaaacatttcttgatcttagtgttgacattgaacaaaatagttcaatcacaagctgcctgaaaaatttctgttctacagagactttaaatgcagaggataaattcttctgtgacaaatgctgcagtttgcaagaagcacagaagagaatgaagattaagaaggctccccacatattggtgatccatctaaagcgtttcaagtacattgagcagcttggccggtataagaagctttcatacagggttgtattccccatggaactgaagctcagtaattcatccgacgatgtagacactgagtactccctctttgctgtcgtggtccatgtcggaagtggcccgaaccatgggcattatgtaagccttgtcaaaagccacaaccactggttgttcttcgacgatgaaaatgtcgagatggttgaagagcagaccctacaaacattcttcggtacttcacatgaatactcaggcaacacggaccatgggtatatcttgttttacgaggggcttggtgggaagagttagattggtctattaacctttcctgttcctttttttccttctctttggagcttgcaagttccactcttgtacctacacagctactatatcattacctccatggaaaacggtcaatccaagaggttgtatgaggcgacgatgccagattttgggtggtttcagtgtacaggggataatggaatctagctcccaacgatgaaataaggtgtaattttgaagttcgcctgaccagttccttctcagggctaacatcttctgttaaagtgtgggactttactattgggcacactgtacatcaattctcgttcataactttgtacgcattttccagttctgatccatgtacgtgctgaaacttgtgagcatttggcatgtttgattttgtttttcagtttacccatgtaactgtattttctcagggcgaacagag

SEQ ID NO: 17215 - DNA, 3351 bp, Zea Mays
cggagcaagaaacctctctgttgaagtgctgatgatggattacaatgaatttcagtccacagcagaaaaaaaaaaccccggttagatctgtgtagaaagagtaaagaaatacagataggcccggggtccacaggtccagtgaaatgcttgcccacgaacagaaacagcaagaaccaccacaaggcgagtccgattctagatcaagcgagtcctcccgtttcatcgcctcggaaaaaggcgagaaatctgcaacagaagaagcagcagcgacagcgattccttcctcgtacctttcgttgcgctcgcgcactcggatcgacccctctagggttttgcatcggcctcccgccagctcctatccctcccctctccctccgccgcgcgcccgcgcggggagccaccaaaccctaggacggcaaatccggtgcgatcacccacggtggaggcctcgtcggcggccgagaggagccgctcagggctcgggtcagggttccggtacctcgccggcgccgcctctggctggtgggaccggtggatggtcatgggagccagcggctccaagcttgagaaggccctcggagaccagttcccggaaggcgagcgctacttcggcctcgagaacttcggcaacacctgctactgcaacagtgtccttcagggagcagttactggaatattatgcaaataacaaaactccaggagacgctgaggaaaatcttctgacttgtttggccgacctttttatgcaggtaacatgtagataggattataccaaatgataaaaatgactctagtactttgtaaaatgggcacagtatcgatttttatggtaattttttttggggtggggggtatcacttagactagaggttgaaacaacgattccatatgttgacatcatttttagtgctatatgtgggtttcatgtggtacaagtgtacaatgaatgcatattttgtcctgctttgaggggacgatagttatgtagagtttacctgcttagcactaaatgaaacaaatcctttcttctaattctctctatatgtttatatgatctcattaattcttgttattggcaggcacctttttggctttaacatattaagagtttcaaaatccccaattatttggcccttttctgatggatatatgctgcatttctgcttactaatttttgttagctgcattgaagttttaacatgtacagtatcctagatgtatatctatagctttctttgaataaccctgtcgatatagccatatgtgtccatttatggatttgtagttctttgcttgtaactccatgttctttgtactgtttaataaatttaggtgttgtgcaattacttttgtttcctactgaaagtgagataatagtataatactcatataaactgaaaacctacaatcccacattctgctaaatcgtcttttctatttgtttatcctaagagttgaacccctctgttagtgttgattttgctatagctacatatgatgtgttgaattttgtgcaacatacccactcatggatgcatcatgcatgcacatgtgatatgcttggatagcatgccactagacatttgaacaatgaatctcatgctaagtcgtacttaatgtgcgctctgtgctagtgactataaaacatttattgtattgcctcttactttgcaattggttgttggacagcttgcttaagttgatgggtactgttctactattaattacctgacatataatcagtgttatcaaatcctctaattgatcctattgacgtggcaccgaccagcccgattactcgcactaatcacaattagtcggacgacttgatacattgcatataatatgatcccaatgtcatttaattttgtatggtaaagatctttgacttgacatctttgttgtgaatgcattgtttcactttatccatgtgtgtcagtgttactgcatagtgttttgtatgtcacttgaaacttctgcagtctgcatgatattacaattggccatgataaagaaaaaagaggtgaattaagaggtgctcattgtctatcatgtagataagccaagcaaagaaaaagaccggtgttattgctccaaaacgttttgttcagagagtgaagaaacagaatgagttgtttcgcagctacatgcaccaggatgcacatgagttcttaaatttccttttgaatgaacttgttgatattctggaaaaagagtcaagtgctgctaaggactcaccccaatcgtcgtctcctgaaaaagctccaaatggcccagttcaacctttagccaatggagttaaaaaagaaccaccagttaccctggtccataaaagttttcagggcatattgaccaacgaaacaagatgcttaagatgtgaaacagtaactgcaagggatgaaacatttcttgatcttagtgttgacattgaacaaaatagttcaatcacaagctgcctgaaaaatttctgttctacagagactttaaatgcagaggataaattcttctgtgacaaatgctgcagtttgcaagaagcacagaagagaatgaagattaagaaggctccccacatattggtgatccatctaaagcgtttcaagtacattgagcagcttggccggtataagaagctttcatacagggttgtattccccatggaactgaagctcagtaattcatccgacgatgtagacactgagtactccctctttgctgtcgtggtccatgtcggaagtggcccgaaccatgggcattatgtaagccttgtcaaaagccacaaccactggttgttcttcgacgatgaaaatgtcgagatggttgaagagcagaccctacaaacattcttcggtacttcacatgaatactcaggcaacacggaccatgggtatatcttgttttacgaggggcttggtgggaagagttagattggtctattaacctttcctgttcctttttttccttctctttggagcttgcaagttccactcttgtacctacacagctactatatcattacctccatggaaaacggtcaatccaagaggttgtatgaggcgacgatgccagattttgggtggtttcagtgtacaggggataatggaatctagctcccaacgatgaaataaggtgtaattttgaagttcgcctgaccagttccttctcagggctaacatcttctgttaaagtgtgggactttactattgggcacactgtacatcaattctcgttcataactttgtacgcattttccagttctgatccatgtacgtgctgaaacttgtgagcatttggcatgtttgattttgtttttcagtttacccatgtaactgtattttctcagggcgaacagag

SEQ ID NO: 17216 - DNA, 1447 bp, Zea Mays
atcacctagaagaccgtaccctcggatgttgttaaggcactttatttttgcattccattcagggagcagttactggaatattatgcaaataacaaaactccaggagacgctgaggaaaatcttctgacttgtttggccgacctttttatgcagataagccaagcaaagaaaaagaccggtgttattgctccaaaacgttttgttcagagagtgaagaaacagaatgagttgtttcgcagctacatgcaccaggatgcacatgagttcttaaatttccttttgaatgaacttgttgatattctggaaaaagagtcaagtgctgctaaggactcaccccaatcgtcgtctcctgaaaaagctccaaatggcccagttcaacctttagccaatggagttaaaaaagaaccaccagttaccctggtccataaaagttttcagggcatattgaccaacgaaacaagatgcttaagatgtgaaacagtaactgcaagggatgaaacatttcttgatcttagtgttgacattgaacaaaatagttcaatcacaagctgcctgaaaaatttctgttctacagagactttaaatgcagaggataaattcttctgtgacaaatgctgcagtttgcaagaagcacagaagagaatgaagattaagaaggctccccacatattggtgatccatctaaagcgtttcaagtacattgagcagcttggccggtataagaagctttcatacagggttgtattccccatggaactgaagctcagtaattcatccgacgatgtagacactgagtactccctctttgctgtcgtggtccatgtcggaagtggcccgaaccatgggcattatgtaagccttgtcaaaagccacaaccactggttgttcttcgacgatgaaaatgtcgagatggttgaagagcagaccctacaaacattcttcggtacttcacatgaatactcaggcaacacggaccatgggtatatcttgttttacgaggggcttggtgggaagagttagattggtctattaacctttcctgttcctttttttccttctctttggagcttgcaagttccactcttgtacctacacagctactatatcattacctccatggaaaacggtcaatccaagaggttgtatgaggcgacgatgccagattttgggtggtttcagtgtacaggggataatggaatctagctcccaacgatgaaataaggtgtaattttgaagttcgcctgaccagttccttctcagggctaacatcttctgttaaagtgtgggactttactattgggcacactgtacatcaattctcgttcataactttgtacgcattttccagttctgatccatgtacgtgctgaaacttgtgagcatttggcatgtttgattttgtttttcagtttacccatgtaactgtattttctcagggcgaacagag

SEQ ID NO: 17217 - DNA, 3745 bp, Zea Mays
ctgtggatgttctagtctattgaaaggaaattttgctctggctcaaagttgaaagagatgggtgggagtgggatttttgctgagaagagtgaaaatggtgatgcagaggcttcaaatcctgctaacaagacttccttgaggatgtaccagcaaactgtgactggaataagccagatttcatttagcgctgatggaagtgtttcaccaaagaagccatcgtcgatacctgaggtggctaagcagcgagagcttagtggcaccctggaagatgctgatgctaaaatcaataagcagctttctgaagccaagaccaaggagcttagtgggagtgacatctttggtccgcctcctgagattccagcgaggccattggctgctcgtaacatggagctacaaggaaatgtcgatttttcacttccacagcgaagcgtccacacatcagttaaagtatctaatcctgccggaggtccaagcaacatctctttcagcgaagagcctgtagtgaagacagcaaagaaaatccacaaccagaagttccaggagctgacaggtaacaacatcttcaaggaggacgtccctgcctcggccgagaagtctctgagctctgcgaagcttaaggagatgagcggcagtgacatcttcgccgatggaacgccagctccccgagaataccttggcggcatccggaagccccctggcggtgagagcagcatcgcgctgatctgattgttctgggctgctctaattcgcactggctagcagcgccccctcgccagtcgtcactgaagcagcacacagagtgcatttcttgacctcttggttctcgaatcgtgttggggatcataatttatgttgggtgtcgttagtctaatataatttggagtcagcagaatctgatccggttacctccgtatcatctgatacgcgggtgtgtgatctcatctgtgatccatgctacattattatgttatgccatccgaactgagaacttatgcaacaattatttttggactcgtttctgggactatggcatcatataggatgttttgcttgtgctgtcgatgattccaaaggtacatagttttgaaaagaagacatgctacattattatgctatgtattagtacaaccgaactgagaacttatgcagtaattattttggactcgtttctgggattatggcatcatagatatgatattttgttttgtgctgttggtgatgcaaaggctccaatactttggaaacgaagactgtatattcagagtttgcaaaagtgtggaccagattttgtgtaccatctggtaacaaaacctctggaaatgaagaacatccagattgttttctgtagctgtgttggcagtagatgtcaacgtcaagaataaaatagacccgcgccttgaccattgggccacggagtcgttgttgttaccgctattgttaaaacttaaatataacatcgatatcactgcgaacgttcggttaacatttaacaactttgcatgacgtattcctgtattagaaaaaccacggacagggcacacgcattggctttcagccttcgtccacagacaactcttcctcagacgacgaccacactgcaaccattgacacacacaacgtccggaagcgtgtcacgtccacaacagaaggccgcatcagtcactcatcactcatcaggggtcctccgcaacagaaggctgcacgaaccgtctccagtaccagtggcgctcccagatggcgcccatggcctcgagcggtacccccttggtctccggcaggaacgccacgacgaaggcggtcatgacggctacccaggccgcgtagtagatgaaggtggcgtacttgagcgtgcacagcatggagaggaacgtctgcgtgagcaggaacgtggcgcccaggttgacggccacgctgacgccctgccccgccgaccggatctccacggggaatatctcgccagggatcacccaggtcagcgggccccacgaccagccgaacgccgccgagaagacgcacgtcagcgccagcaccgcgagggagtagggcctggccatcgcggacccgccgtcggccccgatctgggaccccatgatccacgcgaccgcgacctggcagatgatcatgacgaagccgccggtgaggaacagcggccgccggccgtaccggtcgaccgtgacgatggacaggagcgtggaggcgaggttgacggcgccgaggatgacggcgcccatgagcgcggcgttgctgccgaacccggccgtctggaacagcacgggcgagaagaaggcgatgacgatgacccccgtgagctgctggaacagcgggaccgccacggccacggccaggtggtgccggtgctcccgccggaggatcctgcggaacgcgccctgctcgtgcgcgcgcgcggcctccacggcgcgggccacgtcctccagctccgcgtccacgtccgccttggcgcccctgacgcgccgcagcgcggcgcgggcctcctccgcgcgcccgcgcacgaggaggctgctgggcgtgtccgggatgagcagcgcccccgcgaggatgacggcggcgggcgccgcggccaggcccagcgagaggcgccacccccacgccgggatgcgcgaggtgccgtagttcaccaggttcgccgccaggttgccgatgctgaggaagagctggaaccccgtcgtgaaggcgccccgccacttggccggcgccgtctccgccaggtacaccggcgccgcctgccatgcattcgtcactcatgcgtgtgaagtaaaacacttgggatcctggatgttagaaaggacagccaactaccccaagaaagccggcaggatgacgccatcttaggcatcgctatcccgtcaggtcggcgcttgagagcgatgtgctggctcaaaaccaaccactagtcctagctacctcgagagacagtgagcaaacgaagcaggagtgtcgtaggacggtgccgtcgcaacaacctttcccatctcctctgcttcttttgggcatggcaattggccagctactctcctgtctcctttggtggaggtgcaaagcacctatcgcctcatctcttgtgcaggaattcattttaccagagagtaatcagagtatcctattcctagtatcctagcaaacaattggctatatgcttgttttgtgaaacataatatattcggcgtccactgagaagaaacgccaatatgccgaaagccaaaaccacaatgagatattttttttaccatttttctgcagcagcattgcttagttttctaattgaattcctgtcaagaagaacgctaactacttgtacgcgctgataatgttatagacagctgggtaggtttgtagtgtagcttcatctatccatctacctaactataagctgacaacaacaacacatcaagataataaaaagtacacttttattagggcatgtgtaggggtattagtttcatggtttgtccatgcacactaattgaagggcacacacacagtgtgggtcacctatcatctaaagcttgcttaagtgttagtagtatatatttacactacattatattactatgggattctgtccaatatagccccaatgggtacccagccagattacggtagtcgttcatcagcctcagatagtgaccgcacaagctgaactatcgttccattactagaatattttgagttattactataatttaaacttataaccataaggcaatccatcaaaagttagtgaggg

SEQ ID NO: 17218 - DNA, 4054 bp, Zea Mays
gaacaggcatggatgtgtaccagtaccagtacaaaccagtggcaggcagcggtgtcgccggcaaaaaatttcgaaacgagaggtgtctgcctatcacttgcgaagaaatcgcgaggggaagcgtgacacctgacgagctgagcaggcaggcggtagtggccgagcgaaagcatcctcgatctcgtcgtatcgtagctgccgccgctcagagcaatggagagagcggtgccagttcggaagtcgcacaccaacacggccgaccttctctcctggtcggccacgggccctgacgcatctgcctcgccggccgcgtcctcccgccccagcctcaagccggccgcggggattacgccggcgatgttcggcgcgccggtcaccgagcaggaggccgaggatctgagcaagagtgaaaggaaattttgctctggctcaaagttgaaagagatgggtgggagtgggatttttgctgagaagagtgaaaatggtgatgcagaggcttcaaatcctgctaacaagacttccttgaggatgtaccagcaaactgtgactggaataagccagatttcatttagcgctgatggaagtgtttcaccaaagaagccatcgtcgatacctgaggtggctaagcagcgagagcttagtggcaccctggaagatgctgatgctaaaatcaataagcagctttctgaagccaagaccaaggagcttagtgggagtgacatctttggtccgcctcctgagattccagcgaggccattggctgctcgtaacatggagctacaaggaaatgtcgatttttcacttccacagcgaagcgtccacacatcagttaaagtatctaatcctgccggaggtccaagcaacatctctttcagcgaagagcctgtagtgaagacagcaaagaaaatccacaaccagaagttccaggagctgacaggtaacaacatcttcgccgatggaacgccagctccccgagaataccttggcggcatccggaagccccctggcggtgagagcagcatcgcgctgatctgattgttctgggctgctctaattcgcactggctagcagcgccccctcgccagtcgtcactgaagcagcacacagagtgcatttcttgacctcttggttctcgaatcgtgttggggatcataatttatgttgggtgtcgttagtctaatataatttggagtcagcagaatctgatccggttacctccgtatcatctgatacgcgggtgtgtgatctcatctgtgatccatgctacattattatgttatgccatccgaactgagaacttatgcaacaattatttttggactcgtttctgggactatggcatcatataggatgttttgcttgtgctgtcgatgattccaaaggtacatagttttgaaaagaagacatgctacattattatgctatgtattagtacaaccgaactgagaacttatgcagtaattattttggactcgtttctgggattatggcatcatagatatgatattttgttttgtgctgttggtgatgcaaaggctccaatactttggaaacgaagactgtatattcagagtttgcaaaagtgtggaccagattttgtgtaccatctggtaacaaaacctctggaaatgaagaacatccagattgttttctgtagctgtgttggcagtagatgtcaacgtcaagaataaaatagacccgcgccttgaccattgggccacggagtcgttgttgttaccgctattgttaaaacttaaatataacatcgatatcactgcgaacgttcggttaacatttaacaactttgcatgacgtattcctgtattagaaaaaccacggacagggcacacgcattggctttcagccttcgtccacagacaactcttcctcagacgacgaccacactgcaaccattgacacacacaacgtccggaagcgtgtcacgtccacaacagaaggccgcatcagtcactcatcactcatcaggggtcctccgcaacagaaggctgcacgaaccgtctccagtaccagtggcgctcccagatggcgcccatggcctcgagcggtacccccttggtctccggcaggaacgccacgacgaaggcggtcatgacggctacccaggccgcgtagtagatgaaggtggcgtacttgagcgtgcacagcatggagaggaacgtctgcgtgagcaggaacgtggcgcccaggttgacggccacgctgacgccctgccccgccgaccggatctccacggggaatatctcgccagggatcacccaggtcagcgggccccacgaccagccgaacgccgccgagaagacgcacgtcagcgccagcaccgcgagggagtagggcctggccatcgcggacccgccgtcggccccgatctgggaccccatgatccacgcgaccgcgacctggcagatgatcatgacgaagccgccggtgaggaacagcggccgccggccgtaccggtcgaccgtgacgatggacaggagcgtggaggcgaggttgacggcgccgaggatgacggcgcccatgagcgcggcgttgctgccgaacccggccgtctggaacagcacgggcgagaagaaggcgatgacgatgacccccgtgagctgctggaacagcgggaccgccacggccacggccaggtggtgccggtgctcccgccggaggatcctgcggaacgcgccctgctcgtgcgcgcgcgcggcctccacggcgcgggccacgtcctccagctccgcgtccacgtccgccttggcgcccctgacgcgccgcagcgcggcgcgggcctcctccgcgcgcccgcgcacgaggaggctgctgggcgtgtccgggatgagcagcgcccccgcgaggatgacggcggcgggcgccgcggccaggcccagcgagaggcgccacccccacgccgggatgcgcgaggtgccgtagttcaccaggttcgccgccaggttgccgatgctgaggaagagctggaaccccgtcgtgaaggcgccccgccacttggccggcgccgtctccgccaggtacaccggcgccgcctgccatgcattcgtcactcatgcgtgtgaagtaaaacacttgggatcctggatgttagaaaggacagccaactaccccaagaaagccggcaggatgacgccatcttaggcatcgctatcccgtcaggtcggcgcttgagagcgatgtgctggctcaaaaccaaccactagtcctagctacctcgagagacagtgagcaaacgaagcaggagtgtcgtaggacggtgccgtcgcaacaacctttcccatctcctctgcttcttttgggcatggcaattggccagctactctcctgtctcctttggtggaggtgcaaagcacctatcgcctcatctcttgtgcaggaattcattttaccagagagtaatcagagtatcctattcctagtatcctagcaaacaattggctatatgcttgttttgtgaaacataatatattcggcgtccactgagaagaaacgccaatatgccgaaagccaaaaccacaatgagatattttttttaccatttttctgcagcagcattgcttagttttctaattgaattcctgtcaagaagaacgctaactacttgtacgcgctgataatgttatagacagctgggtaggtttgtagtgtagcttcatctatccatctacctaactataagctgacaacaacaacacatcaagataataaaaagtacacttttattagggcatgtgtaggggtattagtttcatggtttgtccatgcacactaattgaagggcacacacacagtgtgggtcacctatcatctaaagcttgcttaagtgttagtagtatatatttacactacattatattactatgggattctgtccaatatagccccaatgggtacccagccagattacggtagtcgttcatcagcctcagatagtgaccgcacaagctgaactatcgttccattactagaatattttgagttattactataatttaaacttataaccataaggcaatccatcaaaagttagtgaggg

SEQ ID NO: 17219 - DNA, 2842 bp, Zea Mays
caccttggcgtggaatggtgttgggtggatccctataagaccgcgcggatgctagacacgaatctgcgttggggtgggggtttggtggaaatcgaccgtgccataatggaagagagcgggaactgctgcatatatgctcatggactacctctcaaacatcggagacaggagatgttgcagatcaaacaagagaaagaagagatggatcgaagttacaagggacaactgtattcaaatgatactacgataaaggaaaaagattcgctcatcaagcagttggagggttcacttgatgataataaatcccgcttgatatatcttgactcccgcttgcaatgcatggagcaagaactgaagctaaaagatgatgtttgtatcagcctgaaaggaaacctagctagcagtgaaagtgaaaagaacagtttggagcttatgaataagggacacattctggaaattaaaaaactatgccaggacaacaaggatcttaatgaattgtttagcagcttcatggttaaagtaactgagctagataaagaacatgcctctatgtcaagtcatgtgtctaggctgatttcttcatttgaaagattctatgaaatggcccaagaggagaaaatgctaatggcaagatcttctaaggataaatttgaacatcttcaaagccagtatgtagatttgacatcagaaaacaatgctctcaaaactgaaattgaagaactgaagtccagactcatagagttgcagagaactcaagaaattgttatggttcaacatgttgaagaatgccaagtggctgaagataagatcagaagattagagtctgaagctgaagtttctgcctccaacataaatcagttagaaaaattagcttcagaactacaagggagaattcagaagttactagaagattctacctttgctgaaaatcacaagcaagagttgcttcaaaagattttgaagctagaatcagataatcaggaactcctaggacaaatgcagtccattatggaagagaaatcaaataatgctgaatctctgcatggagagataactaagcgtgaccagcaggttgatacacttgagaatcagatcaaccagcttcgtagtgttctggatgagaaggagcaactctatctttgttctgtacaaaaagagaagactttggaggaacagaaattacaggtcgaagcattgctttctgcaacagagtgcaaacttagtgatgcaaaaaaacagtatgatttgatgcttgaaggcgaaaagatagagctatccaagcatttgaaagagctatctctcaaaaatgaccaggcgatcaatgaaatccgtaagaaatatgaacttgaaaagattgaaattactaatgctgaaaaagaaaaggtaagttaaattctattttagaaattatttgtgcaagatgtctataatgctcaagttattctaatgccataatttttatgaatgtttgggaattcaggcagaaaagctcataagggaaattgaaaacaaatgcaacgaaaagatatcacagaacaagcatgattctcagaggtatttgatttgccttaaggaggaacatggcacaacggtggcgagaattcagcaggataatgagcataaagagtcaactctccgggcttatcacaaagaagaactgcagcgcattcaatctcaggctgagaatgaaatgagggagaggttgtcattgctcagaaaagagcatgaagttcaaataaaatcactaaggatgcatcatgaggaagaatgccagaggatgcaggaggaactggagcttcagaagtccaaggaggagaagcaaagagcattgttacaattacagtggaaagtaatgggagaaagtcaacgagttgatcaagaagtgaactctaagaagatttttcaggaatactctgtttcgtcgattaggaggagcgacccatatggaagaaaagaacaagaggtccagttggtaagtccggagaccaatcggaaggacgtaaacttacctgggattttacaatcaccaatttcgaacatgttgagaaaggtagagaaagtgtctcaggatattcctaaacatagaaaggtaacccaccatgaatacgaagttgagacagcaaatggaagaatcacaaagcgcaggaaaactaggagcactgtcatgtttggtgaaccgaactctcagaaaccattgcataatactactgacaaagatgttaaaaaactaaaaaaggttcctacaagatcccgtgcacatcctgcaaacattggtgaattattctctgagggttccttgaatccgtatgctgacgacccttatgcttttgactagaagctcacgcctggaagtatcatttttgcaagcacgatgacgaattctggaacacacaattaccaccaccgtgttgggtcaatcctacggcttttccctggtcatccgtccatcataatgtacatgactgccgttgactcatgtatctctgaagtattgctactgcaacaaccatcacgattgtcggatatgtaggtgtagatttgtgaatgaactgtacatgccataactacggagtaactgaatatcctcagataaaacgctttgtacgcgtcgtgcgatgctgttggattggaatcgtgtttgccctttcctccagatgccaaggcccggtggagtagatgggctccggtctggaagtggggcacagcatgtggatacaggattaatgccactgggtgtttgcatctatggaacgacggaaacaattcggatcgatatttgcttaacaaccatcaggcactgattggttggccagacgacgaattggagagggtagactttttt

SEQ ID NO: 17220 - DNA, 3151 bp, Zea Mays
attcactacccgcgtgctcgcgcgctcgcgctctctccgcgacgactgggtgtgggctaccgccgccctacgccaggtgccgaggcttcgtcgatctcttcgccggcgacgagcacccaccaggatgcaaaagcactcggggcttcggagcctcgaggggttccgatccctcgttggatccacctcgacagccatgaaggtcgcgaaccccaggccctccccggatactgggggtatttcgtatgggagcttcgccaaccttaagatcacagcagagaaattagtcaaggagcaggcttcagtgaagactgatctagaaatggcgcatgtcaaattgagaagagcaacagaacagataaacattatagagggaaaacttcaacaagctttgaatgaaaatgcaaagcttaaggtgaagcagactgaagattcgaagctctggcagggattagattcgaaactctcctcaacaaagaccttgtgtgatcaactgactgaaactcttcagcagctagctagtcagacagaacaagctgaggaagacaagaagttttttgaggagatgcttgggaagaattccaaagctctagatgaattcaactgcttgttgcgtgatttatcaacaaaactggagtatgcggaacaaaagataatttcagggagacaggagatgttgcagatcaaacaagagaaagaagagatggatcgaagttacaagggacaactgtattcaaatgatactacgataaaggaaaaagattcgctcatcaagcagttggagggttcacttgatgataataaatcccgcttgatatatcttgactcccgcttgcaatgcatggagcaagaactgaagctaaaagatgatgtttgtatcagcctgaaaggaaacctagctagcagtgaaagtgaaaagaacagtttggagcttatgaataagggacacattctggaaattaaaaaactatgccaggacaacaaggatcttaatgaattgtttagcagcttcatggttaaagtaactgagctagataaagaacatgcctctatgtcaagtcatgtgtctaggctgatttcttcatttgaaagattctatgaaatggcccaagaggagaaaatgctaatggcaagatcttctaaggataaatttgaacatcttcaaagccagtatgtagatttgacatcagaaaacaatgctctcaaaactgaaattgaagaactgaagtccagactcatagagttgcagagaactcaagaaattgttatggttcaacatgttgaagaatgccaagtggctgaagataagatcagaagattagagtctgaagctgaagtttctgcctccaacataaatcagttagaaaaattagcttcagaactacaagggagaattcagaagttactagaagattctacctttgctgaaaatcacaagcaagagttgcttcaaaagattttgaagctagaatcagataatcaggaactcctaggacaaatgcagtccattatggaagagaaatcaaataatgctgaatctctgcatggagagataactaagcgtgaccagcaggttgatacacttgagaatcagatcaaccagcttcgtagtgttctggatgagaaggagcaactctatctttgttctgtacaaaaagagaagactttggaggaacagaaattacaggtcgaagcattgctttctgcaacagagtgcaaacttagtgatgcaaaaaaacagtatgatttgatgcttgaaggcgaaaagatagagctatccaagcatttgaaagagctatctctcaaaaatgaccaggcgatcaatgaaatccgtaagaaatatgaacttgaaaagattgaaattactaatgctgaaaaagaaaaggcagaaaagctcataagggaaattgaaaacaaatgcaacgaaaagatatcacagaacaagcatgattctcagaggtatttgatttgccttaaggaggaacatggcacaacggtggcgagaattcagcaggataatgagcataaagagtcaactctccgggcttatcacaaagaagaactgcagcgcattcaatctcaggctgagaatgaaatgagggagaggttgtcattgctcagaaaagagcatgaagttcaaataaaatcactaaggatgcatcatgaggaagaatgccagaggatgcaggaggaactggagcttcagaagtccaaggaggagaagcaaagagcattgttacaattacagtggaaagtaatgggagaaagtcaacgagttgatcaagaagtgaactctaagaaggaatactctgtttcgtcgattaggaggagcgacccatatggaagaaaagaacaagaggtccagttggtaagtccggagaccaatcggaaggacgtaaacttacctgggattttacaatcaccaatttcgaacatgttgagaaaggtagagaaagtgtctcaggatattcctaaacatagaaaggaaccgaactctcagaaaccattgcataatactactgacaaagatgttaaaaaactaaaaaaggttcctacaagatcccgtgcacatcctgcaaacattggtgaattattctctgagggttccttgaatccgtatgctgacgacccttatgcttttgactagaagctcacgcctggaagtatcatttttgcaagcacgatgacgaattctggaacacacaattaccaccaccgtgttgggtcaatcctacggcttttccctggtcatccgtccatcataatgtacatgactgccgttgactcatgtatctctgaagtattgctactgcaacaaccatcacgattgtcggatatgtaggtgtagatttgtgaatgaactgtacatgccataactacggagtaactgaatatcctcagataaaacgctttgtacgcgtcgtgcgatgctgttggattggaatcgtgtttgccctttcctccagatgccaaggcccggtggagtagatgggctccggtctggaagtggggcacagcatgtggatacaggattaatgccactgggtgtttgcatctatggaacgacggaaacaattcggatcgatatttgcttaacaaccatcaggcactgattggttggccagacgacgaattggagagggtagactttttt

SEQ ID NO: 17221 - DNA, 3247 bp, Zea Mays
attcactacccgcgtgctcgcgcgctcgcgctctctccgcgacgactgggtgtgggctaccgccgccctacgccaggtgccgaggcttcgtcgatctcttcgccggcgacgagcacccaccaggatgcaaaagcactcggggcttcggagcctcgaggggttccgatccctcgttggatccacctcgacagccatgaaggtcgcgaaccccaggccctccccggatactgggggtatttcgtatgggagcttcgccaaccttaagatcacagcagagaaattagtcaaggagcaggcttcagtgaagactgatctagaaatggcgcatgtcaaattgagaagagcaacagaacagataaacattatagagggaaaacttcaacaagctttgaatgaaaatgcaaagcttaaggtgaagcagactgaagattcgaagctctggcagggattagattcgaaactctcctcaacaaagaccttgtgtgatcaactgactgaaactcttcagcagctagctagtcagacagaacaagctgaggaagacaagaagttttttgaggagatgcttgggaagaattccaaagctctagatgaattcaactgcttgttgcgtgatttatcaacaaaactggagtatgcggaacaaaagataatttcagggagacaggagatgttgcagatcaaacaagagaaagaagagatggatcgaagttacaagggacaactgtattcaaatgatactacgataaaggaaaaagattcgctcatcaagcagttggagggttcacttgatgataataaatcccgcttgatatatcttgactcccgcttgcaatgcatggagcaagaactgaagctaaaagatgatgtttgtatcagcctgaaaggaaacctagctagcagtgaaagtgaaaagaacagtttggagcttatgaataagggacacattctggaaattaaaaaactatgccaggacaacaaggatcttaatgaattgtttagcagcttcatggttaaagtaactgagctagataaagaacatgcctctatgtcaagtcatgtgtctaggctgatttcttcatttgaaagattctatgaaatggcccaagaggagaaaatgctaatggcaagatcttctaaggataaatttgaacatcttcaaagccagtatgtagatttgacatcagaaaacaatgctctcaaaactgaaattgaagaactgaagtccagactcatagagttgcagagaactcaagaaattgttatggttcaacatgttgaagaatgccaagtggctgaagataagatcagaagattagagtctgaagctgaagtttctgcctccaacataaatcagttagaaaaattagcttcagaactacaagggagaattcagaagttactagaagattctacctttgctgaaaatcacaagcaagagttgcttcaaaagattttgaagctagaatcagataatcaggaactcctaggacaaatgcagtccattatggaagagaaatcaaataatgctgaatctctgcatggagagataactaagcgtgaccagcaggttgatacacttgagaatcagatcaaccagcttcgtagtgttctggatgagaaggagcaactctatctttgttctgtacaaaaagagaagactttggaggaacagaaattacaggtcgaagcattgctttctgcaacagagtgcaaacttagtgatgcaaaaaaacagtatgatttgatgcttgaaggcgaaaagatagagctatccaagcatttgaaagagctatctctcaaaaatgaccaggcgatcaatgaaatccgtaagaaatatgaacttgaaaagattgaaattactaatgctgaaaaagaaaaggcagaaaagctcataagggaaattgaaaacaaatgcaacgaaaagatatcacagaacaagcatgattctcagaggtatttgatttgccttaaggaggaacatggcacaacggtggcgagaattcagcaggataatgagcataaagagtcaactctccgggcttatcacaaagaagaactgcagcgcattcaatctcaggctgagaatgaaatgagggagaggttgtcattgctcagaaaagagcatgaagttcaaataaaatcactaaggatgcatcatgaggaagaatgccagaggatgcaggaggaactggagcttcagaagtccaaggtggaggagaagcaaagagcattgttacaattacagtggaaagtaatgggagaaagtcaacgagttgatcaagaagtgaactctaagaagatttttcaggaatactctgtttcgtcgattaggaggagcgacccatatggaagaaaagaacaagaggtccagttggtaagtccggagaccaatcggaaggacgtaaacttacctgggattttacaatcaccaatttcgaacatgttgagaaaggtagagaaagtgtctcaggatattcctaaacatagaaaggtaacccaccatgaatacgaagttgagacagcaaatggaagaatcacaaagcgcaggaaaactaggagcactgtcatgtttggtgaaccgaactctcagaaaccattgcataatactactgacaaagatgttaaaaaactaaaaaaggttcctacaagatcccgtgcacatcctgcaaacattggtgaattattctctgagggttccttgaatccgtatgctgacgacccttatgcttttgactagaagctcacgcctggaagtatcatttttgcaagcacgatgacgaattctggaacacacaattaccaccaccgtgttgggtcaatcctacggcttttccctggtcatccgtccatcataatgtacatgactgccgttgactcatgtatctctgaagtattgctactgcaacaaccatcacgattgtcggatatgtaggtgtagatttgtgaatgaactgtacatgccataactacggagtaactgaatatcctcagataaaacgctttgtacgcgtcgtgcgatgctgttggattggaatcgtgtttgccctttcctccagatgccaaggcccggtggagtagatgggctccggtctggaagtggggcacagcatgtggatacaggattaatgccactgggtgtttgcatctatggaacgacggaaacaattcggatcgatatttgcttaacaaccatcaggcactgattggttggccagacgacgaattggagagggtagactttttt

SEQ ID NO: 17222 - DNA, 3218 bp, Zea Mays
attcactacccgcgtgctcgcgcgctcgcgctctctccgcgacgactgggtgtgggctaccgccgccctacgccaggtgccgaggcttcgtcgatctcttcgccggcgacgagcacccaccaggatgcaaaagcactcggggcttcggagcctcgaggggttccgatccctcgttggatccacctcgacagccatgaaggtcgcgaaccccaggccctccccggatactgggggtatttcgtatgggagcttcgccaaccttaagatcacagcagagaaattagtcaaggagcaggcttcagtgaagactgatctagaaatggcgcatgtcaaattgagaagagcaacagaacagataaacattatagagggaaaacttcaacaagctttgaatgaaaatgcaaagcttaaggtgaagcagactgaagattcgaagctctggcagggattagattcgaaactctcctcaacaaagaccttgtgtgatcaactgactgaaactcttcagcagctagctagtcagacagaacaagctgaggaagacaagaagttttttgaggagatgcttgggaagaattccaaagctctagatgaattcaactgcttgttgcgtgatttatcaacaaaactggagtatgcggaacaaaagataatttcagggagacaggagatgttgcagatcaaacaagagaaagaagagatggatcgaagttacaagggacaactgtattcaaatgatactacgataaaggaaaaagattcgctcatcaagcagttggagggttcacttgatgataataaatcccgcttgatatatcttgactcccgcttgcaatgcatggagcaagaactgaagctaaaagatgatgtttgtatcagcctgaaaggaaacctagctagcagtgaaagtgaaaagaacagtttggagcttatgaataagggacacattctggaaattaaaaaactatgccaggacaacaaggatcttaatgaattgtttagcagcttcatggttaaagtaactgagctagataaagaacatgcctctatgtcaagtcatgtgtctaggctgatttcttcatttgaaagattctatgaaatggcccaagaggagaaaatgctaatggcaagatcttctaaggataaatttgaacatcttcaaagccagtatgtagatttgacatcagaaaacaatgctctcaaaactgaaattgaagaactgaagtccagactcatagagttgcagagaactcaagaaattgttatggttcaacatgttgaagaatgccaagtggctgaagataagatcagaagattagagtctgaagctgaagtttctgcctccaacataaatcagttagaaaaattagcttcagaactacaagggagaattcagaagttactagaagattctacctttgctgaaaatcacaagcaagagttgcttcaaaagattttgaagctagaatcagataatcaggaactcctaggacaaatgcagtccattatggaagagaaatcaaataatgctgaatctctgcatggagagataactaagcgtgaccagcaggttgatacacttgagaatcagatcaaccagcttcgtagtgttctggatgagaaggagcaactctatctttgttctgtacaaaaagagaagactttggaggaacagaaattacaggtcgaagcattgctttctgcaacagagtgcaaacttagtgatgcaaaaaaacagtatgatttgatgcttgaaggcgaaaagatagagctatccaagcatttgaaagagctatctctcaaaaatgaccaggcgatcaatgaaatccgtaagaaatatgaacttgaaaagattgaaattactaatgctgaaaaagaaaaggcagaaaagctcataagggaaattgaaaacaaatgcaacgaaaagatatcacagaacaagcatgattctcagaggtatttgatttgccttaaggaggaacatggcacaacggtggcgagaattcagcaggataatgagcataaagagtcaactctccgggcttatcacaaagaagaactgcagcgcattcaatctcaggctgagaatgaaatgagggagaaaagagcatgaagttcaaataaaatcactaaggatgcatcatgaggaagaatgccagaggatgcaggaggaactggagcttcagaagtccaaggaggagaagcaaagagcattgttacaattacagtggaaagtaatgggagaaagtcaacgagttgatcaagaagtgaactctaagaaggaatactctgtttcgtcgattaggaggagcgacccatatggaagaaaagaacaagaggtccagttggtaagtccggagaccaatcggaaggacgtaaacttacctgggattttacaatcaccaatttcgaacatgttgagaaaggtagagaaagtgtctcaggatattcctaaacatagaaaggtaacccaccatgaatacgaagttgagacagcaaatggaagaatcacaaagcgcaggaaaactaggagcactgtcatgtttggtgaaccgaactctcagaaaccattgcataatactactgacaaagatgttaaaaaactaaaaaaggttcctacaagatcccgtgcacatcctgcaaacattggtgaattattctctgagggttccttgaatccgtatgctgacgacccttatgcttttgactagaagctcacgcctggaagtatcatttttgcaagcacgatgacgaattctggaacacacaattaccaccaccgtgttgggtcaatcctacggcttttccctggtcatccgtccatcataatgtacatgactgccgttgactcatgtatctctgaagtattgctactgcaacaaccatcacgattgtcggatatgtaggtgtagatttgtgaatgaactgtacatgccataactacggagtaactgaatatcctcagataaaacgctttgtacgcgtcgtgcgatgctgttggattggaatcgtgtttgccctttcctccagatgccaaggcccggtggagtagatgggctccggtctggaagtggggcacagcatgtggatacaggattaatgccactgggtgtttgcatctatggaacgacggaaacaattcggatcgatatttgcttaacaaccatcaggcactgattggttggccagacgacgaattggagagggtagactttttt

SEQ ID NO: 17223 - DNA, 3028 bp, Zea Mays
attcactacccgcgtgctcgcgcgctcgcgctctctccgcgacgactgggtgtgggctaccgccgccctacgccaggtgccgaggcttcgtcgatctcttcgccggcgacgagcacccaccaggatgcaaaagcactcggggcttcggagcctcgaggggttccgatccctcgttggatccacctcgacagccatgaaggtcgcgaaccccaggccctccccggatactgggggtatttcgtatgggagcttcgccaaccttaagatcacagcagagaaattagtcaaggagcaggcttcagtgaagactgatctagaaatggcgcatgtcaaattgagaagagcaacagaacagataaacattatagagggaaaacttcaacaagctttgaatgaaaatgcaaagcttaaggtgaagcagactgaagattcgaagctctggcagggattagattcgaaactctcctcaacaaagaccttgtgtgatcaactgactgaaactcttcagcagctagctagtcagacagaacaagggagacaggagatgttgcagatcaaacaagagaaagaagagatggatcgaagttacaagggacaactgtattcaaatgatactacgataaaggaaaaagattcgctcatcaagcagttggagggttcacttgatgataataaatcccgcttgatatatcttgactcccgcttgcaatgcatggagcaagaactgaagctaaaagatgatgtttgtatcagcctgaaaggaaacctagctagcagtgaaagtgaaaagaacagtttggagcttatgaataagggacacattctggaaattaaaaaactatgccaggacaacaaggatcttaatgaattgtttagcagcttcatggttaaagtaactgagctagataaagaacatgcctctatgtcaagtcatgtgtctaggctgatttcttcatttgaaagattctatgaaatggcccaagaggagaaaatgctaatggcaagatcttctaaggataaatttgaacatcttcaaagccagtatgtagatttgacatcagaaaacaatgctctcaaaactgaaattgaagaactgaagtccagactcatagagttgcagagaactcaagaaattgttatggttcaacatgttgaagaatgccaagtggctgaagataagatcagaagattagagtctgaagctgaagtttctgcctccaacataaatcagttagaaaaattagcttcagaactacaagggagaattcagaagttactagaagattctacctttgctgaaaatcacaagcaagagttgcttcaaaagattttgaagctagaatcagataatcaggaactcctaggacaaatgcagtccattatggaagagaaatcaaataatgctgaatctctgcatggagagataactaagcgtgaccagcaggttgatacacttgagaatcagatcaaccagcttcgtagtgttctggatgagaaggagcaactctatctttgttctgtacaaaaagagaagactttggaggaacagaaattacaggtcgaagcattgctttctgcaacagagtgcaaacttagtgatgcaaaaaaacagtatgatttgatgcttgaaggcgaaaagatagagctatccaagcatttgaaagagctatctctcaaaaatgaccaggcgatcaatgaaatccgtaagaaatatgaacttgaaaagattgaaattactaatgctgaaaaagaaaaggcagaaaagctcataagggaaattgaaaacaaatgcaacgaaaagatatcacagaacaagcatgattctcagaggtatttgatttgccttaaggaggaacatggcacaacggtggcgagaattcagcaggataatgagcataaagagtcaactctccgggcttatcacaaagaagaactgcagcgcattcaatctcaggctgagaatgaaatgagggagaggttgtcattgctcagaaaagagcatgaagttcaaataaaatcactaaggatgcatcatgaggaagaatgccagaggatgcaggaggaactggagcttcagaagtccaaggtggaggagaagcaaagagcattgttacaattacagtggaaagtaatgggagaaagtcaacgagttgatcaagaagtgaactctaagaaggaatactctgtttcgtcgattaggaggagcgacccatatggaagaaaagaacaagaggtccagttggtaagtccggagaccaatcggaaggacgtaaacttacctgggattttacaatcaccaatttcgaacatgttgagaaaggtagagaaagtgtctcaggatattcctaaacatagaaaggaaccgaactctcagaaaccattgcataatactactgacaaagatgttaaaaaactaaaaaaggttcctacaagatcccgtgcacatcctgcaaacattggtgaattattctctgagggttccttgaatccgtatgctgacgacccttatgcttttgactagaagctcacgcctggaagtatcatttttgcaagcacgatgacgaattctggaacacacaattaccaccaccgtgttgggtcaatcctacggcttttccctggtcatccgtccatcataatgtacatgactgccgttgactcatgtatctctgaagtattgctactgcaacaaccatcacgattgtcggatatgtaggtgtagatttgtgaatgaactgtacatgccataactacggagtaactgaatatcctcagataaaacgctttgtacgcgtcgtgcgatgctgttggattggaatcgtgtttgccctttcctccagatgccaaggcccggtggagtagatgggctccggtctggaagtggggcacagcatgtggatacaggattaatgccactgggtgtttgcatctatggaacgacggaaacaattcggatcgatatttgcttaacaaccatcaggcactgattggttggccagacgacgaattggagagggtagactttttt

SEQ ID NO: 17224 - DNA, 3112 bp, Zea Mays
attcactacccgcgtgctcgcgcgctcgcgctctctccgcgacgactgggtgtgggctaccgccgccctacgccaggtgccgaggcttcgtcgatctcttcgccggcgacgagcacccaccaggatgcaaaagcactcggggcttcggagcctcgaggggttccgatccctcgttggatccacctcgacagccatgaaggtcgcgaaccccaggccctccccggatactgggggtatttcgtatgggagcttcgccaaccttaagatcacagcagagaaattagtcaaggagcaggcttcagtgaagactgatctagaaatggcgcatgtcaaattgagaagagcaacagaacagataaacattatagagggaaaacttcaacaagctttgaatgaaaatgcaaagcttaaggtgaagcagactgaagattcgaagctctggcagggattagattcgaaactctcctcaacaaagaccttgtgtgatcaactgactgaaactcttcagcagctagctagtcagacagaacaagggagacaggagatgttgcagatcaaacaagagaaagaagagatggatcgaagttacaagggacaactgtattcaaatgatactacgataaaggaaaaagattcgctcatcaagcagttggagggttcacttgatgataataaatcccgcttgatatatcttgactcccgcttgcaatgcatggagcaagaactgaagctaaaagatgatgtttgtatcagcctgaaaggaaacctagctagcagtgaaagtgaaaagaacagtttggagcttatgaataagggacacattctggaaattaaaaaactatgccaggacaacaaggatcttaatgaattgtttagcagcttcatggttaaagtaactgagctagataaagaacatgcctctatgtcaagtcatgtgtctaggctgatttcttcatttgaaagattctatgaaatggcccaagaggagaaaatgctaatggcaagatcttctaaggataaatttgaacatcttcaaagccagtatgtagatttgacatcagaaaacaatgctctcaaaactgaaattgaagaactgaagtccagactcatagagttgcagagaactcaagaaattgttatggttcaacatgttgaagaatgccaagtggctgaagataagatcagaagattagagtctgaagctgaagtttctgcctccaacataaatcagttagaaaaattagcttcagaactacaagggagaattcagaagttactagaagattctacctttgctgaaaatcacaagcaagagttgcttcaaaagattttgaagctagaatcagataatcaggaactcctaggacaaatgcagtccattatggaagagaaatcaaataatgctgaatctctgcatggagagataactaagcgtgaccagcaggttgatacacttgagaatcagatcaaccagcttcgtagtgttctggatgagaaggagcaactctatctttgttctgtacaaaaagagaagactttggaggaacagaaattacaggtcgaagcattgctttctgcaacagagtgcaaacttagtgatgcaaaaaaacagtatgatttgatgcttgaaggcgaaaagatagagctatccaagcatttgaaagagctatctctcaaaaatgaccaggcgatcaatgaaatccgtaagaaatatgaacttgaaaagattgaaattactaatgctgaaaaagaaaaggcagaaaagctcataagggaaattgaaaacaaatgcaacgaaaagatatcacagaacaagcatgattctcagaggtatttgatttgccttaaggaggaacatggcacaacggtggcgagaattcagcaggataatgagcataaagagtcaactctccgggcttatcacaaagaagaactgcagcgcattcaatctcaggctgagaatgaaatgagggagaggttgtcattgctcagaaaagagcatgaagttcaaataaaatcactaaggatgcatcatgaggaagaatgccagaggatgcaggaggaactggagcttcagaagtccaaggtggaggagaagcaaagagcattgttacaattacagtggaaagtaatgggagaaagtcaacgagttgatcaagaagtgaactctaagaaggaatactctgtttcgtcgattaggaggagcgacccatatggaagaaaagaacaagaggtccagttggtaagtccggagaccaatcggaaggacgtaaacttacctgggattttacaatcaccaatttcgaacatgttgagaaaggtagagaaagtgtctcaggatattcctaaacatagaaaggtaacccaccatgaatacgaagttgagacagcaaatggaagaatcacaaagcgcaggaaaactaggagcactgtcatgtttggtgaaccgaactctcagaaaccattgcataatactactgacaaagatgttaaaaaactaaaaaaggttcctacaagatcccgtgcacatcctgcaaacattggtgaattattctctgagggttccttgaatccgtatgctgacgacccttatgcttttgactagaagctcacgcctggaagtatcatttttgcaagcacgatgacgaattctggaacacacaattaccaccaccgtgttgggtcaatcctacggcttttccctggtcatccgtccatcataatgtacatgactgccgttgactcatgtatctctgaagtattgctactgcaacaaccatcacgattgtcggatatgtaggtgtagatttgtgaatgaactgtacatgccataactacggagtaactgaatatcctcagataaaacgctttgtacgcgtcgtgcgatgctgttggattggaatcgtgtttgccctttcctccagatgccaaggcccggtggagtagatgggctccggtctggaagtggggcacagcatgtggatacaggattaatgccactgggtgtttgcatctatggaacgacggaaacaattcggatcgatatttgcttaacaaccatcaggcactgattggttggccagacgacgaattggagagggtagactttttt

SEQ ID NO: 17225 - DNA, 3164 bp, Zea Mays
cctcatttcaacttcaccccgcgtacgcgcgcttgctctctctctccgcattcccattcactacccgcgtgctcgcgcgctcgcgctctctccgcgacgactgggtgtgggctaccgccgccctacgccaggtgccgaggcttcgtcgatctcttcgccggcgacgagcacccaccaggatgcaaaagcactcggggcttcggagcctcgaggggttccgatccctcgttggatccacctcgacagccatgaaggtcgcgaaccccaggccctccccggatactgggggtatttcgtatgggagcttcgccaaccttaagatcacagcagagaaattagtcaaggagcaggcttcagtgaagactgatctagaaatggcgcatgtcaaattgagaagagcaacagaacagataaacattatagagggaaaacttcaacaagctttgaatgaaaatgcaaagcttaaggtgaagcagactgaagattcgaagctctggcagggattagattcgaaactctcctcaacaaagaccttgtgtgatcaactgactgaaactcttcagcagctagctagtcagacagaacaagggagacaggagatgttgcagatcaaacaagagaaagaagagatggatcgaagttacaagggacaactgtattcaaatgatactacgataaaggaaaaagattcgctcatcaagcagttggagggttcacttgatgataataaatcccgcttgatatatcttgactcccgcttgcaatgcatggagcaagaactgaagctaaaagatgatgtttgtatcagcctgaaaggaaacctagctagcagtgaaagtgaaaagaacagtttggagcttatgaataagggacacattctggaaattaaaaaactatgccaggacaacaaggatcttaatgaattgtttagcagcttcatggttaaagtaactgagctagataaagaacatgcctctatgtcaagtcatgtgtctaggctgatttcttcatttgaaagattctatgaaatggcccaagaggagaaaatgctaatggcaagatcttctaaggataaatttgaacatcttcaaagccagtatgtagatttgacatcagaaaacaatgctctcaaaactgaaattgaagaactgaagtccagactcatagagttgcagagaactcaagaaattgttatggttcaacatgttgaagaatgccaagtggctgaagataagatcagaagattagagtctgaagctgaagtttctgcctccaacataaatcagttagaaaaattagcttcagaactacaagggagaattcagaagttactagaagattctacctttgctgaaaatcacaagcaagagttgcttcaaaagattttgaagctagaatcagataatcaggaactcctaggacaaatgcagtccattatggaagagaaatcaaataatgctgaatctctgcatggagagataactaagcgtgaccagcaggttgatacacttgagaatcagatcaaccagcttcgtagtgttctggatgagaaggagcaactctatctttgttctgtacaaaaagagaagactttggaggaacagaaattacaggtcgaagcattgctttctgcaacagagtgcaaacttagtgatgcaaaaaaacagtatgatttgatgcttgaaggcgaaaagatagagctatccaagcatttgaaagagctatctctcaaaaatgaccaggcgatcaatgaaatccgtaagaaatatgaacttgaaaagattgaaattactaatgctgaaaaagaaaaggcagaaaagctcataagggaaattgaaaacaaatgcaacgaaaagatatcacagaacaagcatgattctcagaggtatttgatttgccttaaggaggaacatggcacaacggtggcgagaattcagcaggataatgagcataaagagtcaactctccgggcttatcacaaagaagaactgcagcgcattcaatctcaggctgagaatgaaatgagggagaggttgtcattgctcagaaaagagcatgaagttcaaataaaatcactaaggatgcatcatgaggaagaatgccagaggatgcaggaggaactggagcttcagaagtccaaggaggagaagcaaagagcattgttacaattacagtggaaagtaatgggagaaagtcaacgagttgatcaagaagtgaactctaagaaggaatactctgtttcgtcgattaggaggagcgacccatatggaagaaaagaacaagaggtccagttggtaagtccggagaccaatcggaaggacgtaaacttacctgggattttacaatcaccaatttcgaacatgttgagaaaggtagagaaagtgtctcaggatattcctaaacatagaaaggtaacccaccatgaatacgaagttgagacagcaaatggaagaatcacaaagcgcaggaaaactaggagcactgtcatgtttggtgaaccgaactctcagaaaccattgcataatactactgacaaagatgttaaaaaactaaaaaaggttcctacaagatcccgtgcacatcctgcaaacattggtgaattattctctgagggttccttgaatccgtatgctgacgacccttatgcttttgactagaagctcacgcctggaagtatcatttttgcaagcacgatgacgaattctggaacacacaattaccaccaccgtgttgggtcaatcctacggcttttccctggtcatccgtccatcataatgtacatgactgccgttgactcatgtatctctgaagtattgctactgcaacaaccatcacgattgtcggatatgtaggtgtagatttgtgaatgaactgtacatgccataactacggagtaactgaatatcctcagataaaacgctttgtacgcgtcgtgcgatgctgttggattggaatcgtgtttgccctttcctccagatgccaaggcccggtggagtagatgggctccggtctggaagtggggcacagcatgtggatacaggattaatgccactgggtgtttgcatctatggaacgacggaaacaattcggatcgatatttgcttaacaaccatcaggcactgattggttggccagacgacgaattggagagggtagactttttt

SEQ ID NO: 17226 - DNA, 3318 bp, Zea Mays
gaacaaccccagactcggctgccgcgcgcctcatttcaacttcaccccgcgtacgcgcgcttgctctctctctccgcattcccattcactacccgcgtgctcgcgcgctcgcgctctctccgcgacgactgggtgtgggctaccgccgccctacgccaggtgccgaggcttcgtcgatctcttcgccggcgacgagcacccaccaggatgcaaaagcactcggggcttcggagcctcgaggggttccgatccctcgttggatccacctcgacagccatgaaggtcgcgaaccccaggccctccccggatactgggggtatttcgtatgggagcttcgccaaccttaagatcacagcagagaaattagtcaaggagcaggcttcagtgaagactgatctagaaatggcgcatgtcaaattgagaagagcaacagaacagataaacattatagagggaaaacttcaacaagctttgaatgaaaatgcaaagcttaaggtgaagcagactgaagattcgaagctctggcagggattagattcgaaactctcctcaacaaagaccttgtgtgatcaactgactgaaactcttcagcagctagctagtcagacagaacaagctgaggaagacaagaagttttttgaggagatgcttgggaagaattccaaagctctagatgaattcaactgcttgttgcgtgatttatcaacaaaactggagtatgcggaacaaaagataatttcagggagacaggagatgttgcagatcaaacaagagaaagaagagatggatcgaagttacaagggacaactgtattcaaatgatactacgataaaggaaaaagattcgctcatcaagcagttggagggttcacttgatgataataaatcccgcttgatatatcttgactcccgcttgcaatgcatggagcaagaactgaagctaaaagatgatgtttgtatcagcctgaaaggaaacctagctagcagtgaaagtgaaaagaacagtttggagcttatgaataagggacacattctggaaattaaaaaactatgccaggacaacaaggatcttaatgaattgtttagcagcttcatggttaaagtaactgagctagataaagaacatgcctctatgtcaagtcatgtgtctaggctgatttcttcatttgaaagattctatgaaatggcccaagaggagaaaatgctaatggcaagatcttctaaggataaatttgaacatcttcaaagccagtatgtagatttgacatcagaaaacaatgctctcaaaactgaaattgaagaactgaagtccagactcatagagttgcagagaactcaagaaattgttatggttcaacatgttgaagaatgccaagtggctgaagataagatcagaagattagagtctgaagctgaagtttctgcctccaacataaatcagttagaaaaattagcttcagaactacaagggagaattcagaagttactagaagattctacctttgctgaaaatcacaagcaagagttgcttcaaaagattttgaagctagaatcagataatcaggaactcctaggacaaatgcagtccattatggaagagaaatcaaataatgctgaatctctgcatggagagataactaagcgtgaccagcaggttgatacacttgagaatcagatcaaccagcttcgtagtgttctggatgagaaggagcaactctatctttgttctgtacaaaaagagaagactttggaggaacagaaattacaggtcgaagcattgctttctgcaacagagtgcaaacttagtgatgcaaaaaaacagtatgatttgatgcttgaaggcgaaaagatagagctatccaagcatttgaaagagctatctctcaaaaatgaccaggcgatcaatgaaatccgtaagaaatatgaacttgaaaagattgaaattactaatgctgaaaaagaaaaggcagaaaagctcataagggaaattgaaaacaaatgcaacgaaaagatatcacagaacaagcatgattctcagaggtatttgatttgccttaaggaggaacatggcacaacggtggcgagaattcagcaggataatgagcataaagagtcaactctccgggcttatcacaaagaagaactgcagcgcattcaatctcaggctgagaatgaaatgagggagaggttgtcattgctcagaaaagagcatgaagttcaaataaaatcactaaggatgcatcatgaggaagaatgccagaggatgcaggaggaactggagcttcagaagtccaaggaggagaagcaaagagcattgttacaattacagtggaaagtaatgggagaaagtcaacgagttgatcaagaagtgaactctaagaaggaatactctgtttcgtcgattaggaggagcgacccatatggaagaaaagaacaagaggtccagttggtaagtccggagaccaatcggaaggacgtaaacttacctgggattttacaatcaccaatttcgaacatgttgagaaaggtagagaaagtgtctcaggatattcctaaacatagaaaggtaacccaccatgaatacgaagttgagacagcaaatggaagaatcacaaagcgcaggaaaactaggagcactgtcatgtttggtgaaccgaactctcagaaaccattgcataatactactgacaaagatgttaaaaaactaaaaaaggttcctacaagatcccgtgcacatcctgcaaacattggtgaattattctctgagggttccttgaatccgtatgctgacgacccttatgcttttgactagaagctcacgcctggaagtatcatttttgcaagcacgatgacgaattctggaacacacaattaccaccaccgtgttgggtcaatcctacggcttttccctggtcatccgtccatcataatgtacatgactgccgttgactcatgtatctctgaagtattgctactgcaacaaccatcacgattgtcggatatgtaggtgtagatttgtgaatgaactgtacatgccataactacggagtaactgaatatcctcagataaaacgctttgtacgcgtcgtgcgatgctgttggattggaatcgtgtttgccctttcctccagatgccaaggcccggtggagtagatgggctccggtctggaagtggggcacagcatgtggatacaggattaatgccactgggtgtttgcatctatggaacgacggaaacaattcggatcgatatttgcttaacaaccatcaggcactgattggttggccagacgacgaattggagagggtagactttttt

SEQ ID NO: 17227 - DNA, 2209 bp, Zea Mays
tttttgggtcggcctccacacgcaagcctcgccaagtttttaaaacccccgagctgaaaaaaaaaacacaaggtaaaaaaatatagggagagaaatctctcgcctcccgtcggagagtatcggtgaccgatgtgtcccgacggcggcggaagctgagggaggtcctggcggcgtcgtcagctcaggggtggcgctgtggcaacctgcgcgcgcgcggttttggctaccgagaggcgggtcgggcgtcggcgggatggcggcgtcgctgaggtggtggtggtcggcggtggtattttcggtggtggtcggcgtgatcccggttgtcgccaacacggagggtgatgctctatacagcctacgacaaagcctgaaagataacaacaacgtgctgcagagttgggatccaactctggttaatccatgtacatggttccatgttacttgtaaccctgataacagtgtcatcagacttgatcttggaaatgcacaactatcaggtccattggtgccacagcttgggcaattgaaaaatatgcaatatctggaactttacagtaacaacataagtgggccaataccacctgaactggggaacttgactaacctggtcagtttggacctgtacctcaacaacttcactggcggtattcctgacaccttgggccaactatcaaagttgcggtttctccgtcttaataacaacagtctttctggtcaaattccgaaaaccttgaccaatatcaacactctccaagttctggatctatcaaacaacaatctctcgggaggggtgccatcaagcggttcgttttctctctttacacctataagttttgctaacaacccaaatctttgcggccctggtactacaaagccttgtcctggggctcctccattttctccaccccctccatacaatcccccagcaccaacttcatcaaaaggcgtgtccagcactggagcagtagctggaggcgttgcagctggcacagcgttgctgatcgcagtgcctgctattgggtacgcattgtggcggaggcgaaaacccgaagagcaattcttcgatgtccctgccgaggaggatcccgaagttcaccttggacagctcaagaggttctcgctgagagagctgcaagtcgccacggacaattttaacaacaggaatgtcctgggaagaggcggttttggaaaggtgtacaaagggagactaacggacggttcactggtagccgtgaagagattgaaggaggaacgcacccccggcggagagctccagttccaaacggaggttgaactgattagcatggcggtgcacaggaaccttctccggctccgtggattctgcatgacccctacagagcggctgctagtgtatccatacatggctaacgggagcgtcgcatcgcgccttcgagaacgcgcgccaaatgagccccccctcgaatgggaaacgagggctcggatcgcgctggggtcagccagaggcctgtcctacctgcacgaccactgcgatcccaagatcatccaccgcgacgtgaaggccgccaacatcctgctggacgaggacttcgaagccgtcgtgggtgacttcggcctggccaagctcatggactacaaggacacccacgtgacgaccgccgtccgtgggacgatcggccacatcgcccccgagtacctctccacggggaagtcctccgagaagacggacgtcttcggctacgggatcatgctcctggaactcatcaccgggcagagggcgttcgacctcgctcgtctcgcgaacgatgacgacgtcatgctccttgactggggctccccgatggagcggcccaagatgtcggaggtggcgcggatgctggagggcgacgggctggcggagcggtgggagcagtggcagaaggtggaggtgatgcggcaggaggcggagctcgccccgcgccacaacgactggatcgtcgactccacctacaacctcagggccgtcgaactgtccggcccgaggtagggaggtagatgatcgccgtcgggatccttgtcgtctgtgaatatgacagcggataggtagcttggtggttggtcctgtctttaatgatagctgcgaaactgtagatgaaattgtgtgctcgtcttctgtaacctgagtacctgacatctctgacattttttttctgatattagagagccgtatgacaccagcctctgttgagcc

SEQ ID NO: 17228 - DNA, 2314 bp, Zea Mays
tttttgggtcggcctccacacgcaagcctcgccaagtttttaaaacccccgagctgaaaaaaaaaacacaaggtaaaaaaatatagggagagaaatctctcgcctcccgtcggagagtatcggtgaccgatgtgtcccgacggcggcggaagctgagggaggtcctggcggcgtcgtcagctcaggggtggcgctgtggcaacctgcgcgcgcgcggttttggctaccgagaggcgggtcgggcgtcggcgggatggcggcgtcgctgaggtggtggtggtcggcggtggtattttcggtggtggtcggcgtgatcccggttgtcgccaacacggagggtgatgctctatacagcctacgacaaagcctgaaagataacaacaacgtgctgcagagttgggatccaactctggttaatccatgtacatggttccatgttacttgtaaccctgataacagtgtcatcagacttgatcttggaaatgcacaactatcaggtccattggtgccacagcttgggcaattgaaaaatatgcaatatctggaactttacagtaacaacataagtgggccaataccacctgaactggggaacttgactaacctggtcagtttggacctgtacctcaacaacttcactggcggtattcctgacaccttgggccaactatcaaaccgtcttaataacaacagtctttctggtcaaattccgaaaaccttgaccaatatcaacactctccaagttctggatctatcaaacaacaatctctcgggaggggtgccatcaagcggttcgttttctctctttacacctataagttttgctaacaacccaaatctttgcggccctggtactacaaagccttgtcctggggctcctccattttctccaccccctccatacaatcccccagcaccaacttcatcaaaaggcgtgtccagcactggagcagtagctggaggcgttgcagctggcacagcgttgctgatcgcagtgcctgctattgggtacgcattgtggcggaggcgaaaacccgaagagcaattcttcgatgtccctgccgaggaggatcccgaagttcaccttggacagctcaagaggttctcgctgagagagctgcaagtcgccacggacaattttaacaacaggaatgtcctgggaagaggcggttttggaaaggtgtacaaagggagactaacggacggttcactggtagccgtgaagagattgaaggaggaacgcacccccggcggagagctccagttccaaacggaggttgaactgattagcatggcggtgcacaggaaccttctccggctccgtggattctgcatgacccctacagagcggctgctagtgtatccatacatggctaacgggagcgtcgcatcgcgccttcgagaacgcgcgccaaatgagccccccctcgaatgggaaacgagggctcggatcgcgctggggtcagccagaggcctgtcctacctgcacgaccactgcgatcccaagatcatccaccgcgacgtgaaggccgccaacatcctgctggacgaggacttcgaagccgtcgtgggtgacttcggcctggccaagctcatggactacaaggacacccacgtgacgaccgccgtccgtgggacgatcggccacatcgcccccgagtacctctccacggggaagtcctccgagaagacggacgtcttcggctacgggatcatgctcctggaactcatcaccgggcagagggcgttcgacctcgctcgtctcgcgaacgatgacgacgtcatgctccttgactgggtgaaggcgctgctgaaggagaagaagctggagcagctggtggacccggacctgcagggccggtacgtggaccaggaggtggagtcgctgatccaggtggcgctgctgtgcacgcagggctccccgatggagcggcccaagatgtcggaggtggcgcggatgctggagggcgacgggctggcggagcggtgggagcagtggcagaaggtggaggtgatgcggcaggaggcggagctcgccccgcgccacaacgactggatcgtcgactccacctacaacctcagggccgtcgaactgtccggcccgaggtagggaggtagatgatcgccgtcgggatccttgtcgtctgtgaatatgacagcggataggtagcttggtggttggtcctgtctttaatgatagctgcgaaactgtagatgaaattgtgtgctcgtcttctgtaacctgagtacctgacatctctgacattttttttctgatattagagagccgtatgacaccagcctctgttgagcc

SEQ ID NO: 17229 - DNA, 4717 bp, Zea Mays
tcaccacaccagaatgggctcaagcaagccggctgatgccgaggcgcgtcggcgcgcgcgcgcgcgtgagctgaacctgacccctcgagctcaacctcaactcctatgcttgccacacacctcctacttcgcttgccccgaagctttctttaagcacccccaagtgcccggccaaaataatccgtgcactacggcgacagtggtgctcgcctgttgtataaaagaacaaggcgaacagcgggtgctgctcgaggaggaagaagaggagcggcttttgagctctgaggtctcggtcaccgcccccccaccccaccaccaccaccaccactgggtttttagatccaatgccaaggccgtgaggaagctagctcttgcgtcgtgaggaagagccgaccagagaagctaggagcgcgtggcaatggcggagggcgatgcgggaaaggcggaggcggggagctgcagcgccgccgccgcctccggcgccggcgggtgcgacgcggtcaagaagcggccggagcagagcgtggcgttccacgagctgttcggcttcgcggacccgctggactggctgctcatggctgcggggagcgcgggcgccgtggtgcacggcgccgctatgccggtcttcttcctcctcttcggcgagctcgtcaacggcttcggcaagaaccagcacaacctccgccgcatgacggacgaggtgtccaagtattcgctctacttcgtctacctcggcctcgtcgtctgcgcctcgtcgtacctagagatcgcgtgctggatgtacacgggcgagcggcaggtgggcgcgctgcggaggcggtacctcgaggccgtgctgcggcaggacgtgggcttcttcgacaccgacgcgcgtaccggcgacgtcgtcttcagcgtctctaccgatacgctcctcgtgcaggacgccattggcgagaaggtcggcaacttcatccactacctcgcgacgttcctggccgggctggtcgtcgggttcgtctcggcgtggcggctggcgctgctcagcatcgccgtcatccccggcatcgccttcgccggcgggctgtacgcgtacacgctcactggcctgacctccaagagccgggactcgtacgccaacgccggaatcatagccgagcaggccattgcccaggtgaggactgtctactcctatgtgggtgagaccaaggccctgaattcctactcggaggcgattcagaacaccctgaagctgggttacaaggccgggatggccaaggggcttggcatcggctgcacctatggaatcgcctgtatgtcatgggcgctggtgttctggtacgccggcgtgttcatacggaacggccagacagacggtgggaaggccttcactgcgattttctcagcaatcgtcggtggcctgagcctggggcagtcgttttcgaaccttggagcgttcagcaaagggaagattgccggctacaagctgctggaagtgataaggcagaggccaacgatagttcaggacacggcagacgggaggtgcctcgacgaagtgcatggcaacatagagttcaaggaagtggccttcagctacccttcccgcccggacgtcatgattttccgagacttctccctcttcttccccgctgggaagaccgcggccgtcgtcggaggcagcgggtctgggaagagcacggttgttgctctcattgagcggttctacgatcctaatcaggggcaagttttactcgacaatgtggacatcaagacgctgcaattgaagtggcttagggaccagattggcttggtgaatcaggaacccgcacttttcgcgactacgattcttgagaacattctttatggcaagcctgatgcgacaatggcggaggtcgaggctgcggctacttcagctaatgcccatagcttcattgctctccttcctaatggctacaacactcatgtgggagatagggggcttcagctctccggtggtcagaagcaacgcatcgccatcgcccgcgcgatgctgaagaacccgaagctcctgctactagacgaggccaccagcgcactcgacgctggttcggagagcatcgtccaagaagccctcgaccggttgatggtcggcaggaccaccgtcgtggttgcccacaggctatcgaccataaggtgtgtcgacatgatcgcggtgatccagcaaggccaggtcgtggagactggcactcacgacgaactcctcgccaaaggaagctcgggagcgtacgccgcgctcatcaggttccaggagaccgccaggaaccgcgcgtgcccgtcgacccgcaagtccagcaccggcgccgacggccgcatcgagatggtttccaacgccgacaacgaccgcaagtacccggcgccgaggggctacttcttcaagctcctgaaactgaacgcgccggagtggccctacaccatactgggcgctgtcgggtccgtcctgtccgggttcatcggccccacgttcgccatcgtgatgagcaacatgatcgaggtgttctactaccggaaccccagcaagatggagagcaagaccagggagtacgtgttcatctacatcggcaccgggctgtacgccgtcgtcgcctacctcgtccagcactacttcttcagcatcatgggcgaaaacctcacaaccagggtgcggaggatgatgctcgccgtgattttgaggaacgatgttgggtggttcgatcaggaggagaacaactcgaaccttgtcgccgctcgcctctccacagacgccgccgatgtgaagtcggccattgccgagcggatatcggtgatcctgcagaacatgacgtccctgctcgtgtccttcgtggtgggcttcatcattgaatggcgggtcgccctcctcatcctcgtcaccttccctctcctcgtgctcgccaactttgcccagcaactgtcgatgaagggcttcgcgggcgacacggccaaggcccacgccaagacgagcatgatcgccggggagggcgtgagcaacatccggacggtggcggcgttcaacgcgcaggacaagatcctgtccctcttctgcagcgagctgcgcgtgccgcagatgcacagcctgcgccgcagccagatctccggcgcgctcttcggcctctcccagctctccctgtacgcgtccgaggcgctcatcctgtggttcggcgcgcacctggtccgcacccacgtgtccaccttctccaaggtcatcaaggtgttcgtggtcctggtgatcacagccaactccgtggccgagaccgtcagcctggcgccggagatcgtgcgcggcggcgagtccatccgctccgtgttctccgtgctcaacagccggacccgcatcgacccggacgacccggacgcggagcaggtggagtcggtgcgcggcgagatcgacttccggcacgtggacttcgcgtacccgacgcggcccgacgtgatggtgttcaaggacctgagcctgaggatccgggccgggcagagccaggcgctggttggggcgagcgggtccggcaagagcaccgtcatcgccctcgtcgagcgcttctacgacccgctcgccgggaaggtgatgatcgacggcaaggacatccggcgcctgaacctcaagtccctgcgcctcaggatcgggctggtgcagcaggagcccgtgctgttcgccaccagcatcctggagaacatcgcctacggcagggacggcgcgacggaggaggaggtcgtggaggcggccaaggtggccaacgtgcacggcttcgtcagcgcgctccccgacgggtacaggacgcccgtgggcgagcgcggggtgcagctgtccggcggccagaagcagcgcatcgccatcgcgcgcgcggtgctcaaggaccccgccgtgctgctgctggacgaggccaccagcgcgctggacgccgagtccgagtgcgtgctgcaggaggcgctggagcgcatcatgaagggccgcaccgccgtgctggtggcgcaccgcctgtccaccatccgcggcgtcgactccatcgccgtggtgcaggacggccgcgtggtggagcagggcagccacggggacctcgtgtcccgccccgacggcgcatactcgcggctgctgcagctgcagctacaccatggctgatcctgcgcctggaatagatactggagggcgcacggccggtgtagatactggagggcggtgttagcgtggcgtggctcaaccgtggccggagaagacgtgttttgatgtgaacgatcaggattgtgccgacaaacaagtgatgccgtattcttcttgcactcctgccggctctgccaatgtttagatcatcccctcctagtaattctcacacctttttttttcttcctttgagaagatcctagtaattctcagatggacccaattgtttgatgtgtaacggtcagaagccagggttcgtctttgctacttgtctaggagttgttgcctctaataattggcttcaaaccttacgaagggatctgcttgaaacagccttgcagttgcagcagccacggagagcgtcactggatctgggtgtccgctgccgccgacatctctagcggagtaacgagaaagcctttggatcgatccataattcgtgcaggctgctttgtaagcacgttatacagcttaaacctctatagtaatatttcgtgcaggtaccttatgttgctacggtttctctatattatatataggtcttttttt

SEQ ID NO: 17230 - DNA, 1472 bp, Zea Mays
ggaacgggcacggactttgtggccacgaagcggcccattctcccagagtcaagtccaatttcaacgcaaaactcagacaagttttctttcttctctcccaagtcccaatccacaaaaactgtctacgggcccacgtgccatgacacagacccgccgcttccgaccttcttatctcgcaagaaatgggcggacctaacgcgcaagcgcaataaaacccctgcaaaaacccgccactctcagatccgcacagcgacgccgccagccagacccgatcccctccctcgctagggttttcgtccccgcgccgccgcgctcccggatcccaccgaaacaaccatggccggcggtcccgcggcggtgtcgttcctgaccaacatcgcgaaggtggctgcggggctcggagccgcggcctcgctcgcctccgcgtcgctctacaccgtcgacggcggcgagcgcgccgtcatcttcgaccgtttccgcggggtgctcccggagaccgtcggcgagggcacccatttcctcgtgccctggctgcagaagcccttcatcttcgacatccgcacgcgcccgcacaacttctcctccctcggactcgagtacgacgacaaagtgctcccctccatcggcaacgaggtgctcaaggccgtcgtcgcccagttcaatgccgaccagctcctcaccgaccgcccccacgtctccgccctcgtccgcgacgctctcatccgccgcgcccgcgagttcaacatcatcctcgacgacgtcgccatcacccacctctcctatggtatcgagttctcgctggccgttgagaagaagcaggtcgcgcagcaggaggccgagcgctccaagttcctcgtcgccaaggcggagcaggagaggcgggcggccatcgtgcgcgctgagggagagagcgagtccgcgcgcctcatctctgaggccacggcgatggctgggacagggctgatcgagctcaggaggatcgaggcggccaaggagattgccgcagagctggctcgctcaccgaatgtggcatacattccttctggggaaaacggaaagatgctgcttggtctcaatgctactggatttggccggtgattcactgtttttttagtctgcttgtgctatgtgctgatgcatgactaaaacggaggttcgaactttgaaggacagtgatatctgctatccttgcttatgttaagttttccttgtcttggaactaaatgtgtctgttgtgctccaaataagttttggtttttgactgcatatttgcaattggtagggttaatgcgacattgtgttaagcctgcatagtgcattctaattttcccttacattgcattctcatgttaaaattcattgatatctaacattgctggaatagtagatctgtttcggtccccttcatatattatttttgcatgatgatttgtgttgttaataatcttctggatattgtttatttatgttgt

SEQ ID NO: 17231 - DNA, 1636 bp, Zea Mays
atgctgcggcagatgatcgctgaccggaggtcctctggctgcgcccgagacgacatgctggacgcgctgctcagcggcaacgagggtaccagggcgaagctcagcgacgaccagatcatcgaccttctcatcaccctcatatactctgggtacgagactgtgtcgaccacctcgatgaaggcggaagtacctgtccgacaaccccaaagctctcgacagataaggaaagagcaccttgacatcaggaaggctaagtcgccagaggatccccttgactggaacgattacaagtccatgaccttcaccaaagctattgagcttcccttacattctacagatgccagtggaagctccacgatgtatatggtagtgggggaggaaggagattattataaccgtgggatgaggcatggttccctgacgctaggcgtggttgaagctctggacgccacgagggccactgcagtcactgccgaggaagcgcgcactaccgccaaggagatggagaagaaggccgccactactgcaaagctagccgccatcgctatggacaagaggagacggggaagaagaaaacctcgcgcgggggaggcgcgagaggaatcgcgggggccggaggagcagcaaccggtggaggtggcgtgcgcggtggctgtccgagggaaatcgagccataatggagcgatcataggaggcattgtgggaggtgtagccttcatgtttcttgttgggctgctcactttcttattggtacggcgttctagaaagacaaagcctcgcagaggagatatacttggagcaacagaattacaaggcccaacaagtttccactacaatgatcttaaggctgcaaccaataatttcaatgagaaaagtaaactcggtgaaggaggttttggagatgtatataagcgtccattgcaaggaagatctaccagaggcaagacattggtgtgggtggctttcagaagatttacggtggctgcacctcaagcgcttcagcaaggtggaaagcgccaacaagtacgagaccttgctggaggtggtttaggtgatgaccgacctgaagctgatcatcaagcaggcctacatttcctccgacgacgagtgcttcatgaacgctctttttttggatttattcagagctctaaagaaaagcattctacacccaagtatgggctcatctaccatgcatcctcaattgggaaggcttctcaaaagcataatggaaaaaatctcggtctctatctgcaaaagctgctcttgctatccgataggatgcccttggtgttgatgaggacaactccattggcactaagagtcgactcaagatggccttgtgacatgttactactgaacaacttgagacacagcttcaaattattgaaggatcaacaaacgatctgccaacggtggattccatgcttagaaatagttgtaccgttaggattaatatatggttcagactttgagaatccagacttgaacctagaaggtcgtgacggttgggctggagagcacgctggtagcggaggacctcaacgactgtgcctttgtctatggcttccttagcttcctggacaagatctcttgcgtaatcatcctatttgtcttggaattgtacggagctaagtga

SEQ ID NO: 17232 - DNA, 2511 bp, Zea Mays
gtccgctcctgctgctagttctagctttctcgcgccgcatgcccgcatgcaccgtctgggttatgtgaagtgaagctgaagtgtcacgtgcgtgagatgaatacgcttgtttcccctctctcgttcgtgacatggagtagtatataaagacaagaggcggaggagattcaggattcagaacgcactagcagttccacgcggcgttccacttccacccgaaaccccaatcaagcgtgcactgcatctgcgtagcccgttcaccacgcacgcgcttccctccctaccgggcgatctatggacggcgacggcgcgacgtgggggcagccgatgctggagaagcggccgagccaccgggagcggcatttcacggcgggggaagtggtgcgggacgtcatcatgggggtgtccgacggcctcaccgtgcccttcgccctcgccgcggggctctccggcgccagcgcgccctcctcgctcgtcctcaccgccggcctcgccgaggtcgccgccggcgccatctccatgggactcggagggtaactgctcgatcaaactcttgtccacaatcgtcgcgactgatgtaagcggtagctaccagcgacttccgtttgtccttttacgctatctctggcaatgagattttacgatttcataaactcatctgtgtggcaaacagtgagttagttattgttagcagaaacggcaagaaaaaacgaagtagatcagccaacaaatcatagagcacgacacataaatttacgtggaaaaccttcaacgtgaagggaaaaatcacgggcaccagtcaaacgaaaacttcactatatgtggagtatttacggaacgtcgtccgtagacggcgactcacaagaggagtaaatgatgacgcgctgcaaactctaattaggatcactaacttcggcctaagcctcccgacgacgggcctccactgtactcgccaacacggtctccatatgcagaattttggatcatgttcatgagaaaaaaaaactcaattcatgtagtttattcgggtagtcagttcggtagttcatgttcgatgacagagatagctcttttgtaaacttaattagtttgagatcgttcttcagtgaagcgttcaaatccagtggcacctcacagccatagcgatcactaaggccttgttcagttattgctatgccacatggattcgatgagattgaaaaatagtagatattttgacttgcaatagaaccacccaattatcttcaatttaggacttttcggttattcctaaaccttatggatttgaaggctttagataaaattatgaaggatttaaacttgtggtatgaattaaaaccaactcaatctcctacaattcataagggtttttgataaaaatcgaacaaaccctcacatagaatgagataaaaacgaacaaaccctaaggtgaaaaaaaacatgagcctgtaagtttgcactgtatgttcagcagattgctgaaccaaaccccccaaaaagcaagtcgttagaacaaaagccagctcgtgatagacaagtgtgtggcccctctttcacgtgctcttccagcacgcttgggtgttagctatcacaactttttagggccgagcaaagtgggaaacaatgatttacatctttgaatctgagcacaagacaaagcaccacatcgttttcagatagaaaagggtgtccacagtccactaacggcgccatgcgtgcatggcgtgctagctaggtaccttgcggcccagagcgaggcggaccactacaagcgggagatgagaagggagcaggaggagatcatcaccgtcccagacaccgaggccgctgagattggagagatcatgtcacggtatgggctcgagccgcaggagtacggccctgtcgtcgccgggctcaggcggaaccctcaagcttggctagacttcatgatgaggttcgagctgggactggagagaccggatcccagaagggctctgcagagcgccttcacgatcgcactgtcctacgtggtcggcgggctggtccctctcctgccctacgtgctcgtctccgccgcgcaggatgccatgctcacatccgtcggagtcacgctggccgcgctgcttttcttcggctacgtcaagggccgcttcacggggaaccggccgttcgccagtgccgtccagaccgctgtcattggagcgctcgcttcggcggcggcgtacgggatggcgaaggctgttcaggcgaggtagttgtttgttggtgaggcggcgtcaggcgttttgggaaccagggctgcggtaaaactgaagaaagctgcatacttctgatcctttggggacttctcgttacagtgttaatcgcgggatctaatgctagtctactcttttgaataaatctagggaaggagataatcatagataaaatatatcttcgcctcactttggttaatgtaaagactctgaactacatattcaatcattattacaagccaattgagactgctagtctactgtttaatcattt

SEQ ID NO: 17233 - DNA, 1055 bp, Zea Mays
gccacaggacgaccattctgttcccgtgttccggacgcgaacgcgaacgcatgcactggcacgggcacggcggcggcgcgagcgtgatgtggaaaacgggcgaaacgcggcccagctcgatctgcggcgcgcgggcggactgtatatgggggagcttggattgaacttcgaagtataccgcaatgatgaactgaccatagaagatgtaaagaggaagaacccaagaggaatacttatttctccagggcctggtgaaccacaagattcagggatatcattgcagactgttcttgaattaggcccaaccatcccaattttcggagtttgcatgggcctgcagtgcattggggaggcatttggaggaaagattatccgtgctccttctggagtgatgcatgggaaaagctctccagtttattacgacgaggaattaggaaaggcattattcaatggcttgccaaacccttttacagcggcgaggtaccacagcttagtcattgagaaagaaaccttcccacatgatgctttggaggctaccgcatggactgaagatggactcatcatggctgctcgccacaagaagtacaaacacatccagggtgtccagttccatccggagagcatcatcacccctgaaggcaagaaaatcatcctcaactttgtcagattcattgaggagctggagaagcagcgttcctaatctaggggaggtatatgcgaatgcgacgggtggtttcatagatcaggcggaagcagagacataagccactgcgaagttccggcactggcagtggaagtttagctaggaatcaacgtttccctctcataattcgttgtgctcgtggtaacataatctgtgtggaccgaatgtcgaataaagtccaggcgtccagctgataaaataagcaccggtgttggttcctctaggtggatatatatatccggtaattttcggcaaggggaggcctcggcacatttttgtctgagttccggcggtagcaagaccggccgtaatagcgttagaccttgttcgacataagtttatgtcggattac

SEQ ID NO: 17234 - DNA, 3739 bp, Zea Mays
attcaaacgcgcgatcaaatgtcgccgacccaagccgcgacgcctctggccatcctctcccgcttcctctcgtcgccgccgtccccctcgccggtgctcgagttacttcgcgtccacgcgctcgccgttacctcgggcctctaccaacgccccgacctcgcagcaaagctcgtctccgcctactcctccgcggggcgccccgggctcgcggcgctcgccttctcggcttccccccgtcccgatgcattcctctggaactccctcatccgcacccaccactgcgcatccgacttcgtggccgcgctttctgcccaccgccgcatgctcgcctctggcgcgcggccttcccccttcaccgcgccgctcgctgcctccgcctccgcagagctcggcgcgctcggcgtcggcgccgccgtgcacgcgtactgcgtcaggtacggcctcctcgtcggcgatggagactccgtcgccgtcgcatcctctctggtgtacatgtacgctaggtgcggcaacgtcagagacgctgtgaaggtgttcgaggaaatgcccgagagggacgtggtcgcgtggaccgcggtgatatcagggtgcgtgcggaacggggagagtggggaggggttgcgctatctggtggagatggtcaggcttgcaggcgatggcagtgtcaggccaaactcacggacgatggagagtggcttggaggcatgcggggtgctagatgagctgaattctggtagatgcctgcacggctatgtagtgaaagtcgggattggagattcccccatggtaatttctgccctcttctctatgtactcgaagtgttacagcactgaggatgcatgcgctttattcctggagttgccagagaaagatgtggtttcctggacaagtttgattggaatatactgtcggagagggcttattacggaggctatggagttgttccagcagatgatggagtcaggtctccagccagatgagattctcgttagttgtgtgctttcagggttgggtaacaatggcaatgtacacggagggaagacatttcatgcagttataacgaagagaaactttggagatagtgttttgattggaaatgctttgatatcaatgtatggaaaatttgagatggtggacagtgcaggcagagtttttagattgttgcatcaaagagatgcggactcatggaacttgatggttgtaggatattgcaaagctggatgtgatgtcaaatgcttggagctgtatcgtgagatgcagttgagagataagtatgaattttggtgtgttgccgacagcttggtttctgcaatctcttcttgctcacggctagcagaactaagactaggtcgatcagcacactgttattcaatcaagcacttgcttgatgaggattcatcagttgcaaatgttttaattggcatgtatgggaggtgcggaaaatttgatcatgcatgcaaaatatttggcctggccaaactgaagggtgatgttgtcacatggaatacactgatatctagctatgcccatctgggacattcaaatgctgcgatgtcactttatgatcaaatgcttattgaaggcttgacacccaactcaacaaccttgattactgtcatttcagcctgtgcaaacttggttgcattggaacgtggagagaagatacattcttacgtgaaagaaatggggtgggactatgatgtatcaatcaacacagcacttattgacatgtatgctaaatgtgggcagcttggaattgcaagaaggatttttgattctatgcttcaacatgatgttgttgcatggaatgttatgatatcagggtatgggatgcatggggaagcaaaacaagcattagaattatttggtaagatggaaggaggaagtattaagcctaatggtgtaacctttcttgctattctatctgctttatgccattcagggcttcttgaggagggcaggaaggtgttcacaagaatgggaaaatactcacttgagcctaacctgaagcattatgcttgcatggtggatctcctagggaaatctgggcatctccaagaagcagaagatatggttttagccatgccaatagaacctgatggcgggatatggggaactttgcttagtgcctgcaaattgcatgacaactttgagatgggtttaaggattgcaaaaaaggcatttgcttctgacccagaaaatgagggatattacattttaatatctaattcttatggtggtgctaaaaaatgggatgagatagagaaactaagagaaacgatgaagaatcttggagttcaaaaaggtgtaggctggagtgcagttgattatggcgtgtgacttcaatttcagttatgctctttcaatatacttatattttttgcaaaacagatagtgatcttgtagacagaagtacaaatttgctgatggatgaaactatttgtttgttagcgcgaatcttaggtaactgcttggaagatttgggcaaatggatgatttgaatgccatgaagtaagattgtccggatttggggccaaatggctaactgcctcggaagtaatatatgtgaatgattacatcgtagaagttataaggccataaatcaggtgaccgtgccgtttggagaacacacaaactgctaatttaaatagaagtggaaattgctcggttatagacttgaagttgtgatcatgcacataatagaactgtgcaccaggctggctatagatgaaggctgaatcgaagcagcaccactggtctattggccatgatcatagtgtcagtgtcaatattgcagttttctgtaagaactgatggctacatttttgccatgattgtggtgccagtatcactattgcggtcttcaagaagtatggagctagtattatgttgctacagttgacttttgtcaattgcaaaagaatgatacatatctgaaattgtgtacccgactgcttatgagaagattaaacatggtgctgtggtggagtgaacacttgtccagggaaatgtactttgcagagtgcttgtgagtcatgacaaaacacaaaggagcgcatgtaaatgctaggcgacataaatgaactgctggtttggttcttcaccacttgattctgttgcatcaatttaatgggcgatgatcaaaagggacatcttaatgggtgatactcgcctctttctcctgtctggctgtcttgatgtaggagcacagaaacttcctgcagaggcagagctagcagcggcgctggtaccgacgggagcaaacgtcggcagagtagtgatcctggtcgacgagggtgaggagtgagatgaagtcatgaacgctcaccactcggctagccgtggcaacacaagctgaaaatctctgaccaacctgtcgtttttaggctaatttggaaactccattttcccgagggattcttattttcccaagggaaaataaaaatcccttggaaaaatgtggttctcaaattagtcctaactgtctgttcaagacgaatggctggcatgaaaaaaatatatatgcaagctgacaccttgtaatgacttttcttgtaatttcagatatttattcatatagtatatattcacgactagcaaacttgtatgtatgttttttcccctgattctttctttgcatcttggagttctatggcctctagatcaaacaccttacccccaactccagacgtgccacgttcaccttcgcctatcaatacaaagcatttgtagaggggag

SEQ ID NO: 17235 - DNA, 3854 bp, Zea Mays
attcaaacgcgcgatcaaatgtcgccgacccaagccgcgacgcctctggccatcctctcccgcttcctctcgtcgccgccgtccccctcgccggtgctcgagttacttcgcgtccacgcgctcgccgttacctcgggcctctaccaacgccccgacctcgcagcaaagctcgtctccgcctactcctccgcggggcgccccgggctcgcggcgctcgccttctcggcttccccccgtcccgatgcattcctctggaactccctcatccgcacccaccactgcgcatccgacttcgtggccgcgctttctgcccaccgccgcatgctcgcctctggcgcgcggccttcccccttcaccgcgccgctcgctgcctccgcctccgcagagctcggcgcgctcggcgtcggcgccgccgtgcacgcgtactgcgtcaggtacggcctcctcgtcggcgatggagactccgtcgccgtcgcatcctctctggtgtacatgtacgctaggtgcggcaacgtcagagacgctgtgaaggtgttcgaggaaatgcccgagagggacgtggtcgcgtggaccgcggtgatatcagggtgcgtgcggaacggggagagtggggaggggttgcgctatctggtggagatggtcaggcttgcaggcgatggcagtgtcaggccaaactcacggacgatggagagtggcttggaggcatgcggggtgctagatgagctgaattctggtagatgcctgcacggctatgtagtgaaagtcgggattggagattcccccatggtaatttctgccctcttctctatgtactcgaagtgttacagcactgaggatgcatgcgctttattcctggagttgccagagaaagatgtggtttcctggacaagtttgattggaatatactgtcggagagggcttattacggaggctatggagttgttccagcagatgatggagtcaggtctccagccagatgagattctcgttagttgtgtgctttcagggttgggtaacaatggcaatgtacacggagggaagacatttcatgcagttataacgaagagaaactttggagatagtgttttgattggaaatgctttgatatcaatgtatggaaaatttgagatggtggacagtgcaggcagagtttttagattgttgcatcaaagagatgcggactcatggaacttgatggttgtaggatattgcaaagctggatgtgatgtcaaatgcttggagctgtatcgtgagatgcagttgagagataagtatgaattttggtgtgttgccgacagcttggtttctgcaatctcttcttgctcacggctagcagaactaagactaggtcgatcagcacactgttattcaatcaagcacttgcttgatgaggattcatcagttgcaaatgttttaattggcatgtatgggaggtgcggaaaatttgatcatgcatgcaaaatatttggcctggccaaactgaagggtgatgttgtcacatggaatacactgatatctagctatgcccatctgggacattcaaatgctgcgatgtcactttatgatcaaatgcttattgaaggcttgacacccaactcaacaaccttgattactgtcatttcagcctgtgcaaacttggttgcattggaacgtggagagaagatacattcttacgtgaaagaaatggggtgggactatgatgtatcaatcaacacagcacttattgacatgtatgctaaatgtgggcagcttggaattgcaagaaggatttttgattctatgcttcaacatgatgttgttgcatggaatgttatgatatcagggtatgggatgcatggggaagcaaaacaagcattagaattatttggtaagatggaaggaggaagtattaagcctaatggtgtaacctttcttgctattctatctgctttatgccattcagggcttcttgaggagggcaggaaggtgttcacaagaatgggaaaatactcacttgagcctaacctgaagcattatgcttgcatggtggatctcctagggaaatctgggcatctccaagaagcagaagatatggttttagccatgccaatagaacctgatggcgggatatggggaactttgcttagtgcctgcaaattgcatgacaactttgagatgggtttaaggattgcaaaaaaggcatttgcttctgacccagaaaatgagggatattacattttaatatctaattcttatggtggtgctaaaaaatgggatgagatagagaaactaagagaaacgatgaagaatcttggagttcaaaaaggtgtaggctggagtgcagttgattatggcgtgtgacttcaatttcagttatgctctttcaatatacttatattttttgcaaaacagatagtgatcttgtagacagaagtacaaatttgctgatggatgaaactatttgtttgttagcgcgaatcttaggtaactgcttggaagatttgggcaaatggatgatttgaatgccatgaagtaagattgtccggatttggggccaaatggctaactgcctcggaagtaatatatgtgaatgattacatcgtagaagttataaggccataaatcaggtgaccgtgccgtttggagaacacacaaactgctaatttaaatagaagtggaaattgctcggttatagacttgaagttgtgatcatgcacataatagaactgtgcaccaggctggctatagatgaaggctgaatcgaagcagcaccactggtctattggccatgatcatagtgtcagtgtcaatattgcagttttctgtaagaactgatggctacatttttgccatgattgtggtgccagtatcactattgcggtcttcaagaagtatggagctagtattatgttgctacagttgacttttgtcaattgcaaaagaatgatacatatctgaaattgtgtacccgactgcttatgagaaggctatttaactataagttatgggcagattaaacatggtgctgtggtggagtgaacacttgtccagagtgcttgtgagtcatgacaaaacacaaaggagcgcatgtaaatgctaggcgacataaatgaagtcagaacccacttcagtatcacaaattcacaatcatctctgaattcttaagcatccgtccacgcgttcctgcattcctgtgcatcattcatgattgcttttgtagctgctggtttggttcttcaccacttgattctgttgcatcaatttaatgggcgatgatcaaaagggacatcttaatgggtgatactcgcctctttctcctgtctggctgtcttgatgtaggagcacagaaacttcctgcagaggcagagctagcagcggcgctggtaccgacgggagcaaacgtcggcagagtagtgatcctggtcgacgagggtgaggagtgagatgaagtcatgaacgctcaccactcggctagccgtggcaacacaagctgaaaatctctgaccaacctgtcgtttttaggctaatttggaaactccattttcccgagggattcttattttcccaagggaaaataaaaatcccttggaaaaatgtggttctcaaattagtcctaactgtctgttcaagacgaatggctggcatgaaaaaaatatatatgcaagctgacaccttgtaatgacttttcttgtaatttcagatatttattcatatagtatatattcacgactagcaaacttgtatgtatgttttttcccctgattctttctttgcatcttggagttctatggcctctagatcaaacaccttacccccaactccagacgtgccacgttcaccttcgcctatcaatacaaagcatttgtagaggggag

SEQ ID NO: 17236 - DNA, 3847 bp, Zea Mays
attcaaacgcgcgatcaaatgtcgccgacccaagccgcgacgcctctggccatcctctcccgcttcctctcgtcgccgccgtccccctcgccggtgctcgagttacttcgcgtccacgcgctcgccgttacctcgggcctctaccaacgccccgacctcgcagcaaagctcgtctccgcctactcctccgcggggcgccccgggctcgcggcgctcgccttctcggcttccccccgtcccgatgcattcctctggaactccctcatccgcacccaccactgcgcatccgacttcgtggccgcgctttctgcccaccgccgcatgctcgcctctggcgcgcggccttcccccttcaccgcgccgctcgctgcctccgcctccgcagagctcggcgcgctcggcgtcggcgccgccgtgcacgcgtactgcgtcaggtacggcctcctcgtcggcgatggagactccgtcgccgtcgcatcctctctggtgtacatgtacgctaggtgcggcaacgtcagagacgctgtgaaggtgttcgaggaaatgcccgagagggacgtggtcgcgtggaccgcggtgatatcagggtgcgtgcggaacggggagagtggggaggggttgcgctatctggtggagatggtcaggcttgcaggcgatggcagtgtcaggccaaactcacggacgatggagagtggcttggaggcatgcggggtgctagatgagctgaattctggtagatgcctgcacggctatgtagtgaaagtcgggattggagattcccccatggtaatttctgccctcttctctatgtactcgaagtgttacagcactgaggatgcatgcgctttattcctggagttgccagagaaagatgtggtttcctggacaagtttgattggaatatactgtcggagagggcttattacggaggctatggagttgttccagcagatgatggagtcaggtctccagccagatgagattctcgttagttgtgtgctttcagggttgggtaacaatggcaatgtacacggagggaagacatttcatgcagttataacgaagagaaactttggagatagtgttttgattggaaatgctttgatatcaatgtatggaaaatttgagatggtggacagtgcaggcagagtttttagattgttgcatcaaagagatgcggactcatggaacttgatggttgtaggatattgcaaagctggatgtgatgtcaaatgcttggagctgtatcgtgagatgcagttgagagataagtatgaattttggtgtgttgccgacagcttggtttctgcaatctcttcttgctcacggctagcagaactaagactaggtcgatcagcacactgttattcaatcaagcacttgcttgatgaggattcatcagttgcaaatgttttaattggcatgtatgggaggtgcggaaaatttgatcatgcatgcaaaatatttggcctggccaaactgaagggtgatgttgtcacatggaatacactgatatctagctatgcccatctgggacattcaaatgctgcgatgtcactttatgatcaaatgcttattgaaggcttgacacccaactcaacaaccttgattactgtcatttcagcctgtgcaaacttggttgcattggaacgtggagagaagatacattcttacgtgaaagaaatggggtgggactatgatgtatcaatcaacacagcacttattgacatgtatgctaaatgtgggcagcttggaattgcaagaaggatttttgattctatgcttcaacatgatgttgttgcatggaatgttatgatatcagggtatgggatgcatggggaagcaaaacaagcattagaattatttggtaagatggaaggaggaagtattaagcctaatggtgtaacctttcttgctattctatctgctttatgccattcagggcttcttgaggagggcaggaaggtgttcacaagaatgggaaaatactcacttgagcctaacctgaagcattatgcttgcatggtggatctcctagggaaatctgggcatctccaagaagcagaagatatggttttagccatgccaatagaacctgatggcgggatatggggaactttgcttagtgcctgcaaattgcatgacaactttgagatgggtttaaggattgcaaaaaaggcatttgcttctgacccagaaaatgagggatattacattttaatatctaattcttatggtggtgctaaaaaatgggatgagatagagaaactaagagaaacgatgaagaatcttggagttcaaaaaggtgtaggctggagtgcagttgattatggcgtgtgacttcaatttcagttatgctctttcaatatacttatattttttgcaaaacagatagtgatcttgtagacagaagtacaaatttgctgatggatgaaactatttgtttgttagcgcgaatcttaggtaactgcttggaagatttgggcaaatggatgatttgaatgccatgaagtaagattgtccggatttggggccaaatggctaactgcctcggaagtaatatatgtgaatgattacatcgtagaagttataaggccataaatcaggtgaccgtgccgtttggagaacacacaaactgctaatttaaatagaagtggaaattgctcggttatagacttgaagttgtgatcatgcacataatagaactgtgcaccaggctggctatagatgaaggctgaatcgaagcagcaccactggtctattggccatgatcatagtgtcagtgtcaatattgcagttttctgtaagaactgatggctacatttttgccatgattgtggtgccagtatcactattgcggtcttcaagaagtatggagctagtattatgttgctacagttgacttttgtcaattgcaaaagaatgatacatatctgaaattgtgtacccgactgcttatgagaagagattaaacatggtgctgtggtggagtgaacacttgtccagggaaatgtactttgcagagtgcttgtgagtcatgacaaaacacaaaggagcgcatgtaaatgctaggcgacataaatgaagtcagaacccacttcagtatcacaaattcacaatcatctctgaattcttaagcatccgtccacgcgttcctgcattcctgtgcatcattcatgattgcttttgtagctgctggtttggttcttcaccacttgattctgttgcatcaatttaatgggcgatgatcaaaagggacatcttaatgggtgatactcgcctctttctcctgtctggctgtcttgatgtaggagcacagaaacttcctgcagaggcagagctagcagcggcgctggtaccgacgggagcaaacgtcggcagagtagtgatcctggtcgacgagggtgaggagtgagatgaagtcatgaacgctcaccactcggctagccgtggcaacacaagctgaaaatctctgaccaacctgtcgtttttaggctaatttggaaactccattttcccgagggattcttattttcccaagggaaaataaaaatcccttggaaaaatgtggttctcaaattagtcctaactgtctgttcaagacgaatggctggcatgaaaaaaatatatatgcaagctgacaccttgtaatgacttttcttgtaatttcagatatttattcatatagtatatattcacgactagcaaacttgtatgtatgttttttcccctgattctttctttgcatcttggagttctatggcctctagatcaaacaccttacccccaactccagacgtgccacgttcaccttcgcctatcaatacaaagcatttgtagaggggag

SEQ ID NO: 17237 - DNA, 3790 bp, Zea Mays
attcaaacgcgcgatcaaatgtcgccgacccaagccgcgacgcctctggccatcctctcccgcttcctctcgtcgccgccgtccccctcgccggtgctcgagttacttcgcgtccacgcgctcgccgttacctcgggcctctaccaacgccccgacctcgcagcaaagctcgtctccgcctactcctccgcggggcgccccgggctcgcggcgctcgccttctcggcttccccccgtcccgatgcattcctctggaactccctcatccgcacccaccactgcgcatccgacttcgtggccgcgctttctgcccaccgccgcatgctcgcctctggcgcgcggccttcccccttcaccgcgccgctcgctgcctccgcctccgcagagctcggcgcgctcggcgtcggcgccgccgtgcacgcgtactgcgtcaggtacggcctcctcgtcggcgatggagactccgtcgccgtcgcatcctctctggtgtacatgtacgctaggtgcggcaacgtcagagacgctgtgaaggtgttcgaggaaatgcccgagagggacgtggtcgcgtggaccgcggtgatatcagggtgcgtgcggaacggggagagtggggaggggttgcgctatctggtggagatggtcaggcttgcaggcgatggcagtgtcaggccaaactcacggacgatggagagtggcttggaggcatgcggggtgctagatgagctgaattctggtagatgcctgcacggctatgtagtgaaagtcgggattggagattcccccatggtaatttctgccctcttctctatgtactcgaagtgttacagcactgaggatgcatgcgctttattcctggagttgccagagaaagatgtggtttcctggacaagtttgattggaatatactgtcggagagggcttattacggaggctatggagttgttccagcagatgatggagtcaggtctccagccagatgagattctcgttagttgtgtgctttcagggttgggtaacaatggcaatgtacacggagggaagacatttcatgcagttataacgaagagaaactttggagatagtgttttgattggaaatgctttgatatcaatgtatggaaaatttgagatggtggacagtgcaggcagagtttttagattgttgcatcaaagagatgcggactcatggaacttgatggttgtaggatattgcaaagctggatgtgatgtcaaatgcttggagctgtatcgtgagatgcagttgagagataagtatgaattttggtgtgttgccgacagcttggtttctgcaatctcttcttgctcacggctagcagaactaagactaggtcgatcagcacactgttattcaatcaagcacttgcttgatgaggattcatcagttgcaaatgttttaattggcatgtatgggaggtgcggaaaatttgatcatgcatgcaaaatatttggcctggccaaactgaagggtgatgttgtcacatggaatacactgatatctagctatgcccatctgggacattcaaatgctgcgatgtcactttatgatcaaatgcttattgaaggcttgacacccaactcaacaaccttgattactgtcatttcagcctgtgcaaacttggttgcattggaacgtggagagaagatacattcttacgtgaaagaaatggggtgggactatgatgtatcaatcaacacagcacttattgacatgtatgctaaatgtgggcagcttggaattgcaagaaggatttttgattctatgcttcaacatgatgttgttgcatggaatgttatgatatcagggtatgggatgcatggggaagcaaaacaagcattagaattatttggtaagatggaaggaggaagtattaagcctaatggtgtaacctttcttgctattctatctgctttatgccattcagggcttcttgaggagggcaggaaggtgttcacaagaatgggaaaatactcacttgagcctaacctgaagcattatgcttgcatggtggatctcctagggaaatctgggcatctccaagaagcagaagatatggttttagccatgccaatagaacctgatggcgggatatggggaactttgcttagtgcctgcaaattgcatgacaactttgagatgggtttaaggattgcaaaaaaggcatttgcttctgacccagaaaatgagggatattacattttaatatctaattcttatggtggtgctaaaaaatgggatgagatagagaaactaagagaaacgatgaagaatcttggagttcaaaaaggtgtaggctggagtgcagttgattatggcgtgtgacttcaatttcagttatgctctttcaatatacttatattttttgcaaaacagatagtgatcttgtagacagaagtacaaatttgctgatggatgaaactatttgtttgttagcgcgaatcttaggtaactgcttggaagatttgggcaaatggatgatttgaatgccatgaagtaagattgtccggatttggggccaaatggctaactgcctcggaagtaatatatgtgaatgattacatcgtagaagttataaggccataaatcaggtgaccgtgccgtttggagaacacacaaactgctaatttaaatagaagtggaaattgctcggttatagacttgaagttgtgatcatgcacataatagaactgtgcaccaggctggctatagatgaaggctgaatcgaagcagcaccactggtctattggccatgatcatagtgtcagtgtcaatattgcagttttctgtaagaactgatggctacatttttgccatgattgtggtgccagtatcactattgcggtcttcaagaagtatggagctagtattatgttgctacagttgacttttgtcaattgcaaaagaatgatacatatctgaaattgtgtacccgactgcttatgagaagattaaacatggtgctgtggtggagtgaacacttgtccaggttcagttgcaaattctattcaccccgctacttttctcgtgtgatgcattgggaaatgtactttgcagagtgcttgtgagtcatgacaaaacacaaaggagcgcatgtaaatgctaggcgacataaatgaactgctggtttggttcttcaccacttgattctgttgcatcaatttaatgggcgatgatcaaaagggacatcttaatgggtgatactcgcctctttctcctgtctggctgtcttgatgtaggagcacagaaacttcctgcagaggcagagctagcagcggcgctggtaccgacgggagcaaacgtcggcagagtagtgatcctggtcgacgagggtgaggagtgagatgaagtcatgaacgctcaccactcggctagccgtggcaacacaagctgaaaatctctgaccaacctgtcgtttttaggctaatttggaaactccattttcccgagggattcttattttcccaagggaaaataaaaatcccttggaaaaatgtggttctcaaattagtcctaactgtctgttcaagacgaatggctggcatgaaaaaaatatatatgcaagctgacaccttgtaatgacttttcttgtaatttcagatatttattcatatagtatatattcacgactagcaaacttgtatgtatgttttttcccctgattctttctttgcatcttggagttctatggcctctagatcaaacaccttacccccaactccagacgtgccacgttcaccttcgcctatcaatacaaagcatttgtagaggggag

SEQ ID NO: 17238 - DNA, 2042 bp, Zea Mays
tgtttgatcgatcgattgcaatttgcaaagcacggcgagcggaggccagatcaaaaagtagcacggcgcagcgagccagcgatataccacatgacacatgtccacacccctctgcgttcggtcaccaaacagtcagcgcagggcagggcagcctgaaagaaagcggcggcggcagcaggtcactggctcactgctctgtcctctcgtctccagagttcagaccaccgcatcgccatggcgccgccgcagacgatcccccggcgcggcctcttcattggcggggcctggagggagccgtgcctcgggcgccgcctgcccgtcgtcaacccggccaccgaggccaccatcggcgacatcccggcgggcacggcggaggacgtggagatcgcggtcgccgcggcgcgggacgcgttctcccgcgacggcgggaggcactggtcgcgcgcccctggggccgtgcgcgccaacttcctccgggcgatcgccgccaagattaaagacaggaaatctgagctggctttgctggagacacttgattctggaaagcctctggatgaagcaagtggagacatggacgatgtcgctgcatgctttgagtactatgctgatctggcagaagctttagatgggaagcaacagtcaccgatctctctgcctatggaaaactttaagtcgtatgtacttaaagaacccattggggttgttggactgatcactccttggaattatcctctgttgatggcaacttggaaggtcgcacctgccttggctgctgggtgtacaactatattaaaaccttcagagttggcttctgtgagctgcttagagcttggtgcaatatgtatggaaataggcctaccaccaggtgtcttgaacataattactggtctgggccctgaagctggtgctccattatcctcacattcccatgtggataaggttgcttttactggaagtacagagactggtaagaggataatgatttcagctgcccaaatggttaagcctgtttcattagagcttggtgggaaaagtcctcttattgtctttgatgacattggtgacattgacaaagctgttgaatggaccatgtttgggatcttcgcgaatgctggtcaagtctgcagtgctacttctcgtttactgctgcatgagaaaattgcaaagaaattcttggatagattggttgcatgggcaaagaatataaaagtctcagatccactggaggaaggctgcagactgggttcagttatcagtgaaggacagtacgagaagataaagaaattcatctcgactgcaagaagtgaaggtgccacaattctgtatggaggtggccgaccacagatgttagtacgtcaatgcaaatttggcaagaggaagtctttggaccagttatctgtgttaaggagtttaggacagagagtgaagctgtggaacttgcaaatgatactcactatggtttagctggtgccgtgatctccaatgatcaggagaggtgcgagcgcatttcaaaggctcttcactctggtattatttggataaattgctcgcaaccatgcttcgtccaagctccttggggagggaacaagcggagcggttttggtcgggagctcggagaatggggtcttgataactacctgacagttaagcaagtcaccaagtattgctcggatgaaccgtggggatggtaccagcctccatctaagctgtgaaggggcattcactccagggaatgtaatgcatcattaactgacagcatcagtcctgttaatggacaggagctcgtgtacagtacagtgctcgtaaaaaaagctctttgatggtaaagttgcttgctgctatcactactccagaccagaattcaggactggagagtacgatgtcatgagttgtactacttgttagtctgcactcttatcattcgaagtttggcagtggtgtgtagttgcacttggaagattgcaataataataaagataattggataattgatccattttaatcatatttcttaaaaaaagctgaataagctctggagtttc

SEQ ID NO: 17239 - DNA, 1936 bp, Zea Mays
tgtttgatcgatcgattgcaatttgcaaagcacggcgagcggaggccagatcaaaaagtagcacggcgcagcgagccagcgatataccacatgacacatgtccacacccctctgcgttcggtcaccaaacagtcagcgcagggcagggcagcctgaaagaaagcggcggcggcagcaggtcactggctcactgctctgtcctctcgtctccagagttcagaccaccgcatcgccatggcgccgccgcagacgatcccccggcgcggcctcttcattggcggggcctggagggagccgtgcctcgggcgccgcctgcccgtcgtcaacccggccaccgaggccaccatcggcgacatcccggcgggcacggcggaggacgtggagatcgcggtcgccgcggcgcgggacgcgttctcccgcgacggcgggaggcactggtcgcgcgcccctggggccgtgcgcgccaacttcctccgggcgatcgccgccaagattaaagacaggaaatctgagctggctttgctggagacacttgattctggaaagcctctggatgaagcaagtggagacatggaattatcctctgttgatggcaacttggaaggtcgcacctgccttggctgctgggtgtacaactatattaaaaccttcagagttggcttctgtgagctgcttagagcttggtgcaatatgtatggaaataggcctaccaccaggtgtcttgaacataattactggtctgggccctgaagctggtgctccattatcctcacattcccatgtggataaggttgcttttactggaagtacagagactggtaagaggataatgatttcagctgcccaaatggttaagcctgtttcattagagcttggtgggaaaagtcctcttattgtctttgatgacattggtgacattgacaaagctgttgaatggaccatgtttgggatcttcgcgaatgctggtcaagtctgcagtgctacttctcgtttactgctgcatgagaaaattgcaaagaaattcttggatagattggttgcatgggcaaagaatataaaagtctcagatccactggaggaaggctgcagactgggttcagttatcagtgaaggacagtacgagaagataaagaaattcatctcgactgcaagaagtgaaggtgccacaattctgtatggaggtggccgaccacagcatctcagaagagggttctttcttgaacctacaattataacagatgttagtacgtcaatgcaaatttggcaagaggaagtctttggaccagttatctgtgttaaggagtttaggacagagagtgaagctgtggaacttgcaaatgatactcactatggtttagctggtgccgtgatctccaatgatcaggagaggtgcgagcgcatttcaaaggctcttcactctggtattatttggataaattgctcgcaaccatgcttcgtccaagctccttggggagggaacaagcggagcggttttggtcgggagctcggagaatggggtcttgataactacctgacagttaagcaagtcaccaagtattgctcggatgaaccgtggggatggtaccagcctccatctaagctgtgaaggggcattcactccagggaatgtaatgcatcattaactgacagcatcagtcctgttaatggacaggagctcgtgtacagtacagtgctcgtaaaaaaagctctttgatggtaaagttgcttgctgctatcactactccagaccagaattcaggactggagagtacgatgtcatgagttgtactacttgttagtctgcactcttatcattcgaagtttggcagtggtgtgtagttgcacttggaagattgcaataataataaagataattggataattgatccattttaatcatatttcttaaaaaaagctgaataagctctggagtttc

SEQ ID NO: 17240 - DNA, 1942 bp, Zea Mays
tgtttgatcgatcgattgcaatttgcaaagcacggcgagcggaggccagatcaaaaagtagcacggcgcagcgagccagcgatataccacatgacacatgtccacacccctctgcgttcggtcaccaaacagtcagcgcagggcagggcagcctgaaagaaagcggcggcggcagcaggtcactggctcactgctctgtcctctcgtctccagagttcagaccaccgcatcgccatggcgccgccgcagacgatcccccggcgcggcctcttcattggcggggcctggagggagccgtgcctcgggcgccgcctgcccgtcgtcaacccggccaccgaggccaccatcgattaaagacaggaaatctgagctggctttgctggagacacttgattctggaaagcctctggatgaagcaagtggagacatggacgatgtcgctgcatgctttgagtactatgctgatctggcagaagctttagatgggaagcaacagtcaccgatctctctgcctatggaaaactttaagtcgtatgtacttaaagaacccattggggttgttggactgatcactccttggaattatcctctgttgatggcaacttggaaggtcgcacctgccttggctgctgggtgtacaactatattaaaaccttcagagttggcttctgtgagctgcttagagcttggtgcaatatgtatggaaataggcctaccaccaggtgtcttgaacataattactggtctgggccctgaagctggtgctccattatcctcacattcccatgtggataaggttgcttttactggaagtacagagactggtaagaggataatgatttcagctgcccaaatggttaagcctgtttcattagagcttggtgggaaaagtcctcttattgtctttgatgacattggtgacattgacaaagctgttgaatggaccatgtttgggatcttcgcgaatgctggtcaagtctgcagtgctacttctcgtttactgctgcatgagaaaattgcaaagaaattcttggatagattggttgcatgggcaaagaatataaaagtctcagatccactggaggaaggctgcagactgggttcagttatcagtgaaggacagtacgagaagataaagaaattcatctcgactgcaagaagtgaaggtgccacaattctgtatggaggtggccgaccacagcatctcagaagagggttctttcttgaacctacaattataacagatgttagtacgtcaatgcaaatttggcaagaggaagtctttggaccagttatctgtgttaaggagtttaggacagagagtgaagctgtggaacttgcaaatgatactcactatggtttagctggtgccgtgatctccaatgatcaggagaggtgcgagcgcatttcaaaggctcttcactctggtattatttggataaattgctcgcaaccatgcttcgtccaagctccttggggagggaacaagcggagcggttttggtcgggagctcggagaatggggtcttgataactacctgacagttaagcaagtcaccaagtattgctcggatgaaccgtggggatggtaccagcctccatctaagctgtgaaggggcattcactccagggaatgtaatgcatcattaactgacagcatcagtcctgttaatggacaggagctcgtgtacagtacagtgctcgtaaaaaaagctctttgatggtaaagttgcttgctgctatcactactccagaccagaattcaggactggagagtacgatgtcatgagttgtactacttgttagtctgcactcttatcattcgaagtttggcagtggtgtgtagttgcacttggaagattgcaataataataaagataattggataattgatccattttaatcatatttcttaaaaaaagctgaataagctctggagtttc

SEQ ID NO: 17241 - DNA, 728 bp, Zea Mays
ctagaaagaagaccagcaagcaggtcgcgcgagcccaataaaccaagatagtgagatgtgcctccatcataccacaccatgtgatgcgaggagcctcttctgcctctcatccccctacttccaagatgcaatcatgctgccccagactcctcgggcccctcggtcaccatgattgcctcaccgcctctcaggagtctcctccacctacttccaagaggaagaggccggagaagctatagtccatgaggaaattaagcggaggggcggcggccggtgtacgaggggccggaggaggaggagagagaaggggaggtggcagaaaaagctagagagagagagagagagagagagagagacagagatgcatggtgcatggcatgatgatggcgtggttgatctattcgatccagtactacttctgtcattcgagtcaagaagccatcatcagatcgctacggcggatctggaggagccagaggccaaggagtctttgagggatcttctctttccgcaaacaccagcacaccaagttggagctcgtggtcgctacgccacaggactgcacagtttctaacagagatcgaagaggagccgaagcagccgcaagttttcaacatctttgtgttttagtttttggtcaaaactaacgatgatgttgtgtgcttgtattgtttgttgcccaagttatcgtctcgtcctaaaaaaaattaagagatcctaattagtcc

SEQ ID NO: 17242 - DNA, 920 bp, Zea Mays
cggagattggccaaagtccaccataatgcactgccgtcggaaagccggagaggagacccctagaaagaagaccagcaagcaggtcgcgcgagcccaataaaccaagatagtgagatgtgcctccatcataccacaccatgtgatgcgaggagcctcttctgcctctcatccccctacttccaagatgcaatcatgctgccccagactcctcgggcccctcggtcaccatgattgcctcaccgcctctcaggagtctcctccacctacttccaagaggaagaggccggagaagctatagtccatgaggaaattaagcggaggggcggcggccggtgtacgaggggccggaggaggaggagagagaaggggaggtggcagaaaaagctagagagagagagagagagagagagagagacagagatgcatggtgcatggcatgatgatggcgtggttgatctattcgatccagtactacttctgtcattcgagtcaagaagccatcatcagatcggtgcagttctccctcctccttccagctcctcttcagcttctttgtaacactgcgcccgccatggctttggggaatcaagcgtcttggtccgaaatccttctttcctagctaggatctacgtacttgtgcaagactacggcggatctggaggagccagaggccaaggagtctttgagggatcttctctttccgcaaacaccagcacaccaagttggagctcgtggtcgctacgccacaggactgcacagtttctaacagagatcgaagaggagccgaagcagccgcaagttttcaacatctttgtgttttagtttttggtcaaaactaacgatgatgttgtgtgcttgtattgtttgttgcccaagttatcgtctcgtcctaaaaaaaattaagagatcctaattagtcc

SEQ ID NO: 17243 - DNA, 992 bp, Zea Mays
aaatgccctagctagcttcaattcggagattggccaaagtccaccataatgcactgccgtcggaaagccggagaggagacccctagaaagaagaccagcaagcaggtcgcgcgagcccaataaaccaagatagtgagatgtgcctccatcataccacaccatgtgatgcgaggagcctcttctgcctctcatccccctacttccaagatgcaatcatgctgccccagactcctcgggcccctcggtcaccatgattgcctcaccgcctctcaggagtctcctccacctacttccaagaggaagaggccggagaagctatagtccatgaggaaattaagcggaggggcggcggccggtgtacgaggggccggaggaggaggagagagaaggggaggtggcagaaaaagctagagagagagagagagagagagagagagacagagatgcatggtgcatggcatgatgatggcgtggttgatctattcgatccagtactacttctgtcattcgagtcaagaagccatcatcagatcggtgcagttctccctcctccttccagctcctcttcagcttctttgtaacactgcgcccgccatggctttggggaatcaagcgtcttggtccgaaatccttctttcctagctaggatctacgtacttgtgcaagagtcaaaaatgaacaactatgacaactatcgtttgggcattgtacaatagctacggcggatctggaggagccagaggccaaggagtctttgagggatcttctctttccgcaaacaccagcacaccaagttggagctcgtggtcgctacgccacaggactgcacagtttctaacagagatcgaagaggagccgaagcagccgcaagttttcaacatctttgtgttttagtttttggtcaaaactaacgatgatgttgtgtgcttgtattgtttgttgcccaagttatcgtctcgtcctaaaaaaaattaagagatcctaattagtcc

SEQ ID NO: 17244 - DNA, 715 bp, Zea Mays
gtccaccataatgcactgccgtcggaaagccggagaggagacccctagaaagaagaccagcaagcaggtcgcgcgagcccaataaaccaagatagtgagatgtgcctccatcataccacaccatgtgatgcgaggagcctcttctgcctctcatccccctacttccaagatgcaatcatgctgccccagactcctcgggcccctcggtcaccatgattgcctcaccgcctctcaggagtctcctccacctacttccaagaggaagaggccggagaagctatagtccatgaggaaattaagcggaggggcggcggccggtgtacgaggggccggaggaggaggagagagaaggggaggtggcagaaaaagctagagagagagagagagagagagagagagacagagatgcatggtgcatggcatgatgatggcgtggttgatctattcgatccagtactacttctgtcattcgagtcaagaagccatcatcagatcggtgcagttctccctcctccttccagctcctcttcagcttctttgtaacactgcgcccgccatggctttggggaatcaagcgtcttggtccgaaatccttctttcctagctaggatctacgtacttgtgcaagaatgccagaagactataaagaaatcaccaacactcatcacaaatgggaatataaaggggctgcctagctcaaaatcttgacggtgct

SEQ ID NO: 17245 - DNA, 1364 bp, Zea Mays
ctagttctcccttgcggaacctttatgttgtaggtccatgtctgactgggagttcaattgcagcttcatcctataatctgatcagacatcaaaaccaacgtagctctactgtgacatccagtcctgatggtcgctacgaaggtgcaccttcaaaagtcgtggatgcgccaaaattggatgcggaatctctttctgtatcgcctttgagagccgcaccgctctcgaatcaagaaaggcttgtgctaaggaagcaagcccttcaaatgaagaaaagacctgtactttccatagggaggaacaatgccatcaccggagttgcaaaaaccataaaaacgcacttcaagaagcaccctcttgctatcgtgaacatcaagaacagagcggacgggactccgattcagcagctgatatcggaactcgaggaggcgacaggatcggtgctagtgtcacgagaaaccaacaaagtgatcttgtacagaggctggggcgcagaagtggcccagaaaagctcaagggaaagtagcacagacgagggcgaaaaggaggtcatatcacctcagctccttgaagctatcaggttagagtgtggactgctccctgccgattcgggatagttggtccggataaccttcccccacagatcccgtgtttcgaaaggatcgtacaatgattgcccgcggatagatccgaagctgcataaacgcacgcaaggtgtgaaaccctccctgctcacgggcatagttgtaagagaagaacaggggcggcggcaggggtattcttaggtattccatgggatgcccttttttgtgaaagaaaagaatatgtattgtctatactaaaatatttagttctcctagtgttactggctctcgctgttctgggggaaattgttcttggaataccctggcacaggctcaccgctcacagcatcacgtctgcctccgccagtggagaagaaacgggcatagctgtagctttgtcggtgtccccacctcgtagatcttcaccctcgaacggcctgagtcgagtattgcggtaaggaactcgtcggctcacgcgtcagcgcagcgggtgacatccggcaaatggtatcgccgtctgctggaatctggcaaaagacctgccggtgatgtggagtagtacgctggaatccggctggggtgctgcccccttgctggaatccggccagggcaggagcaggggcagggcgaaacctgtggatttgtttcggcactgccgacaccaatgcaccatggttgattggttgtgctagctactactgtattttctccagatcaggctctctatctgcactctgcagtggtaaacccgactaagggctagtttgtaaactacattttttc

SEQ ID NO: 17246 - DNA, 3110 bp, Zea Mays
aagaacacaaagctagagataatgctagttagatgtttttttgtatctttgaattagattgtgtgatgtaattttacttttgttatgaacattagacaataaactgaacttacgaactttgtatacatctgattatactctttttccttctaacaaaatgcgaggtagacattgcatagatgtggtaactttaatacaaatattaagtttgattttgtataaatttatttgtcttatattttatttgttttattatttttttgaatttagggctctaatatgaattttgggccaaaaactgaatttcgggccaaaaattgaatttcaggtcctaatgtgaatttcgggcttttataattttgggccgcccgaaataagcccggcacgtttaagcaattacgggccgggccgtgggccgagggctaggcccatgggccggcccggcacggcccgaaattcaaacgggccgggccggcccaaaattcaaacaatacgggccttttcgggcttgggccggaccgggccgggcggcccgaatgtacacctatagcgacaatgtcaaaacttgagatacagcccaagtttacactccagaagatgggccctaaccatcagaccaaatcaagcacaacccaccgccgcgtgcctccaccgctccggtctgtctccagcaacggcggcggccatgcaggtgccgggccgcctccggcgcgtcctccgggcgccgccacccagaatcctactctaccgcgcgatctcctccccgccgcccggtggcggcagcggggtggcggtgaagcaggtgacgcgggggaacatggaggaagccctggagaagctgcggggacgcgtgcgggaggccgcattcgtggggttggacctggagatgagcggcgtcacgagcgcgccctggagagacaccttcgagctcgaccgcgccgacgtgcgctacctcaaactccgcgactccgcggagcggttcgccgccctacagctcggcgtctgccctttccgatgggaccctgccaagtccgccttcgttgcccatccgcataacttctttatcttccctcgcaaggagctccctagtgattgttcatctcatgagtttctttgtcagacaacttcaatcgagttcctagcaaagtaccagtttgatttcaacacatgcttccgtgaaggaatatcttatctatccagagcacaagaggaagaagcgctacagaaatttaacatgttgcatcatggccgaacagttacatcttccactaattctgaagaggatggagacatgcctttaaagagtgcttctgatattcttttcacggaaaggatgaaaatgaacttcaaggaatggcgtgatgcgatagccagcaagccaatggttgacaaccatttgtcaggaaacattaaatgtggttcaggacaattccagacagttttcttcaaaatgcgccctgctattattcttaatggattctcatcacatcaattgaagttaattcaacaggttttgagaaaaaactttagggatcttatttttgtctgtacatttggtgaggatgacacatctgaaaagaaagtagtttattcagacactgatgaggacagaatattattaatgaaagatgtgcaggaagatctactaaaaaacagggaagaaagaatcaaatcagcaataggaatccgccatgtcatcgaccttctttcatcagaaaggaaattgattgttgggcatagttgtttcctagataccaggcatcttatgtctgtcaatcaagcagttcagaaactgatgaagcacaaaagcaaatcactatcttcagctttcttattgttgtgccctgcatcttattcatctgttgagaagccatccagtcattctcctgtgacaattgaagttgaaggagatgaaacgatgtcttctcgcttcatttctggtgccaagcatgaagctgggtacgatgcatacatgactggatgcatttttgcgcagttgtgtgcttatcttggcatacaatttgagcagttctcacctctggataacctagcaacgaacactaagctgcagaaacacatcaattttttgtcccctagctggaacagtggaacagtgcttgatttgagcactggcatggagacaccagatccaggttatacgagaaggtaccctgctgctgtgtatgataacattgttgtcatctggggattcctgtctaaggttagaccgaaggaaattaaggattgcatctgcaaagtatttggttcaggttcagttacaaccgtcttctcaattgattccactgctgcccttgtgcagttcaagaaacaagagtctgtaaacgatttcttggatttgaaggctgttttggagagggcagatagtgctatctcaattctacaccccctgtcaactatattggaaggaggccaaacacgagctgcaaagtatgatacctacagagacatatgcagctcttctgaatcaaaatatctctttgctgatcaagctgaagcagtctgtgcaacctcaaagaatcaactcatagaaaatgttgatggcaatcttatatctgatgttcttgatggagtcgcactcgcctctgtaaccgaggaagatggaataataccgagttcgaagaatcaaaacgttgctgaagctacatgttaggatatagcttagatgctctatacgatggcaaaacattgtttgtgcagacgaatgtgaagctaattactactatcgacctttttcagcaggttattggcctggccttctatttgaggctcactgactaggccaatattttgatgggtattctttttaccagtatctttaggcacagtgccatctctagcatccgcacggtgcaagctctgaactacagagtaaatctatacttatgcagggaagcattcttcttgatgccatttactaggatgatcaatgcattgttacatcatctatcttgggtgtagtagctgtgaactttttattaatgtaatgacaagatagagtaaaatatggccagtccctaaacttgttacggggcatattttagttcctcaaacccccacaatgtattttcaagtttctatggttcctcaga

SEQ ID NO: 17247 - DNA, 966 bp, Zea Mays
atatggatgcatgctgaggtcctgagttcgaattcccgtggaaatgaatttcaagctgagattaaaaaaatccctttgaccgactctgcgacaaagcacggcttaaggctcggcccacgctcacatgggcaacttggccgccatgaaagggtggaggaaagaagatttagaggttttcttgatctgcatgagattttccctatcaggttcagatcgctcaggcatatgagaaaaacggagcagcatgccttagtgttcttacagatgaaaagtactttcagggaagtttttacaacttggaggctatacgcaatgctggagtccaggttcatgacgaaagagaaatggaccgtgttttagggattgatggtgtacagctcatcggcatcaataaccgtaatctcgagacatttgaagttgatattacaaacacaaaaaagcttctggaaggtgaacgaggacaggttatagctcaaaaggatgtaattgttgtaggagaatctgcgctgttcactcctgatgatatctcgttcgttcaaaacgctggggtcaaagcggttctcgtcggggaatccctcatcaagcaggaggatccagggaaagcaatcgctgggcttttcggcaaagatatctcgcatgctggtgctacctagagacgacgcagaagagcaacagaataccagaaacgctactccgggttgcatcattttgtgtaggggagaaaatcgagcgttgcaatcagaaatccaccctttcgcagagttttgatcggtcgttttgtttacctgacctgccaacttccccatgctgctatttttttgtgaccgagccatctcaataattacagattttagtgcacaagatgtatatgttcaaaaagttggatgtagtttcaagcagcttgatttttgcctatctaggcttcatctgcactattttttctaatataaaactagtaagaaaaaa

SEQ ID NO: 17248 - DNA, 1117 bp, Zea Mays
cgccgctactgctagcgctagacaggtggttcagagacgccgtctcggtaaagcagcgggaagactcgcacgcgtacaactcccaacggctaacgtccaccccaatccaattagccagcccacctctgctctgcgggcgcttcagatggaagcactagccattggatccgcgcctcgccgtccgggcgcaaggttcagatcgctcaggcatatgagaaaaacggagcagcatgccttagtgttcttacagatgaaaagtactttcagggaagtttttacaacttggaggctatacgcaatgctggagtccagtgccctcttctgtgcaaagagttcattattgatgcttggcaactttactatgcacggtccaagggtgcagatgctgttcttctaatagctgctgtattacctgaccgcgatatcaaatacatgttgaaaatttgcaaaatacttgggatggctgctttagttgaggttcatgacgaaagagaaatggaccgtgttttagggattgatggtgtacagctcatcggcatcaataaccgtaatctcgagacatttgaagttgatattacaaacacaaaaaagcttctggaaggtgaacgaggacaggttatagctcaaaaggatgtaattgttgtaggagaatctgcgctgttcactcctgatgatatctcgttcgttcaaaacgctggggtcaaagcggttctcgtcggggaatccctcatcaagcaggaggatccagggaaagcaatcgctgggcttttcggcaaagatatctcgcatgctggtgctacctagagacgacgcagaagagcaacagaataccagaaacgctactccgggttgcatcattttgtgtaggggagaaaatcgagcgttgcaatcagaaatccaccctttcgcagagttttgatcggtcgttttgtttacctgacctgccaacttccccatgctgctatttttttgtgaccgagccatctcaataattacagattttagtgcacaagatgtatatgttcaaaaagttggatgtagtttcaagcagcttgatttttgcctatctaggcttcatctgcactattttttctaatataaaactagtaagaaaaaa

SEQ ID NO: 17249 - DNA, 1541 bp, Zea Mays
cgccgctactgctagcgctagacaggtggttcagagacgccgtctcggtaaagcagcgggaagactcgcacgcgtacaactcccaacggctaacgtccaccccaatccaattagccagcccacctctgctctgcgggcgcttcagatggaagcactagccattggatccgcgcctcgccgtccgggcgcaaggtactcccaactccgccgccccggaaccctcgccgtcaccaccacagccacagttgcatgccgccccctcacggcgccctccatggacgccgccgttggccgcccgagccgcgcgcctatccgctgcaccagcgcggagacggactcggtggatgaggtcgcgacgagctcgcacgccgcggaggccaacgcggggggcaccacggagcaagagggcaacgggagccccgtggccgccgctgccgcgtactcccccgtggtcgccggcgtcgacgggataaggatccggcggcggcccgtgacggggcccgcggtgcactacgtgggcccgttccagttccgcctcgagaacgaggggaacacgccgcggaacatcctcgagaaaatcatctggaacaaggacgtcgaggtttcgcagatgaaggagaggaggcccctgtacatgctgaagggtccgcttgaggctgctccccccgctagggacttcgttggggcgctcaaggcgtcctacgatcgaactggcttgcctgctctgattgcggaggtcaagaaggcttcaccaagccggggtgttatcagggagaattttgatccgatcgctcaggcatatgagaaaaacggagcagcatgccttagtgttcttacagatgaaaagtactttcagggaagtttttacaacttggaggctatacgcaatgctggagtccaggttcatgacgaaagagaaatggaccgtgttttagggattgatggtgtacagctcatcggcatcaataaccgtaatctcgagacatttgaagttgatattacaaacacaaaaaagcttctggaaggtgaacgaggacaggttatagctcaaaaggatgtaattgttgtaggagaatctgcgctgttcactcctgatgatatctcgttcgttcaaaacgctggggtcaaagcggttctcgtcggggaatccctcatcaagcaggaggatccagggaaagcaatcgctgggcttttcggcaaagatatctcgcatgctggtgctacctagagacgacgcagaagagcaacagaataccagaaacgctactccgggttgcatcattttgtgtaggggagaaaatcgagcgttgcaatcagaaatccaccctttcgcagagttttgatcggtcgttttgtttacctgacctgccaacttccccatgctgctatttttttgtgaccgagccatctcaataattacagattttagtgcacaagatgtatatgttcaaaaagttggatgtagtttcaagcagcttgatttttgcctatctaggcttcatctgcactattttttctaatataaaactagtaagaaaaaa

SEQ ID NO: 17250 - DNA, 2291 bp, Zea Mays
acagtgccgcagtatcccaagtcccaacaaggtcaagtcgcgtggattcgccactagcgggtattgattaccttgccgccccttgaccaaaccaaataacacaagtccccattgcttgcaccctacagctcctcacacccaaggtatggaggaggcaccaacgagggagccgaagaggctgcgccaggacgccgcggttacttccgccgcggcggcggctgaggagcctcagtacgtgtacctgcctatcgccgacgccatgaaggttcccggcgtccgggtttgcctcttcgccgttgtctccgagatcggcatcaccgaccgcagccgtggcacggatttcactcttaggttgaggattgtggatcaatcatgcatggatggaatctctgtaacagtttttgctgacaaaactactctattgccttgtgtcaagtcaagtggagatgtgatcagtctccataacgtcatgataacgatgcatggggagttctttgtttcatttaacaaagaagtttcttcatttgcgctatttgaaagcaaagtagctgagtgcagcccatatcagacttctgtgaaatatcatggcagcaaacatgacaaagaacttttaacccagatgagaacgtggcttgcatataatcctctaggtctgaaagattttgaattgcagttaagaagtttaaaatctgattctacttttgatctagtatgcaaggttgttcatgtccatgaagataacgacaaattgatattttatgtttgggatggaactgatacccctgctgttgagtttcaggcaactttggatccaaaggcagttgaatcaccccctctatttgaagggccacctctacccagggaggttttgtgcacaatgccaattatcggaactgttttgaggattttttcagatatgcctatcaaggaagtatcccacatgcaaaatagggtttattgggccagattctgtaacattacttgcaaggaagagtttggcatttggaaaggcattttgctggcctctagtaaagttcggcttttatctcatgaagatggtagcgttgttgatcgtcgaaagatgtatgccattcgtaaggccaaccaagttctctgccagccgatggcaagctttccctctaatgttactgatgtagaatatgaggaagaatggcactcaacgttaatgcagtctttaactcataaagaggtgacacacaaactcaaaaccttggcccgtgttgtgggagcgtatccatgtcaagctagtggtctccgtttgctgtcaactggtaacattcatctgcggttgactcttgaggatcctacagcgagaattcatgcgtacgtccataagaattatctggttcagatcgctcaggcatatgagaaaaacggagcagcatgccttagtgttcttacagatgaaaagtactttcagggaagtttttacaacttggaggctatacgcaatgctggagtccagtgccctcttctgtgcaaagagttcattattgatgcttggcaactttactatgcacggtccaagggtgcagatgctgttcttctaatagctgctgtattacctgaccgcgatatcaaatacatgttgaaaatttgcaaaatacttgggatggctgctttagttgaggttcatgacgaaagagaaatggaccgtgttttagggattgatggtgtacagctcatcggcatcaataaccgtaatctcgagacatttgaagttgatattacaaacacaaaaaagcttctggaaggtgaacgaggacaggttatagctcaaaaggatgtaattgttgtaggagaatctgcgctgttcactcctgatgatatctcgttcgttcaaaacgctggggtcaaagcggttctcgtcggggaatccctcatcaagcaggaggatccagggaaagcaatcgctgggcttttcggcaaagatatctcgcatgctggtgctacctagagacgacgcagaagagcaacagaataccagaaacgctactccgggttgcatcattttgtgtaggggagaaaatcgagcgttgcaatcagaaatccaccctttcgcagagttttgatcggtcgttttgtttacctgacctgccaacttccccatgctgctatttttttgtgaccgagccatctcaataattacagattttagtgcacaagatgtatatgttcaaaaagttggatgtagtttcaagcagcttgatttttgcctatctaggcttcatctgcactattttttctaatataaaactagtaagaaaaaa

SEQ ID NO: 17251 - DNA, 2036 bp, Zea Mays
acagtgccgcagtatcccaagtcccaacaaggtcaagtcgcgtggattcgccactagcgggtattgattaccttgccgccccttgaccaaaccaaataacacaagtccccattgcttgcaccctacagctcctcacacccaaggtatggaggaggcaccaacgagggagccgaagaggctgcgccaggacgccgcggttacttccgccgcggcggcggctgaggagcctcagtacgtgtacctgcctatcgccgacgccatgaaggttcccggcgtccgggtttgcctcttcgccgttgtctccgagatcggcatcaccgaccgcagccgtggcacggatttcactcttaggttgaggattgtggatcaatcatgcatggatggaatctctgtaacagtttttgctgacaaaactactctattgccttgtgtcaagtcaagtggagatgtgatcagtctccataacgtcatgataacgatgcatggggagttctttgtttcatttaacaaagaagtttcttcatttgcgctatttgaaagcaaagtagctgagtgcagcccatatcagacttctgtgaaatatcatggcagcaaacatgacaaagaacttttaacccagatgagaacgtggcttgcatataatcctctaggtctgaaagattttgaattgcagttaagaagtttaaaatctgattctacttttgatctagtatgcaaggttgttcatgtccatgaagataacgacaaattgatattttatgtttgggatggaactgatacccctgctgttgagtttcaggcaactttggatccaaaggcagttgaatcaccccctctatttgaagggccacctctacccagggaggttttgtgcacaatgccaattatcggaactgttttgaggattttttcagatatgcctatcaaggaagtatcccacatgcaaaatagggtttattgggccagattctgtaacattacttgcaaggaagagtttggcatttggaaaggcattttgctggcctctagtaaagttcggcttttatctcatgaagatggtagcgttgttgatcgtcgaaagatgtatgccattcgtaaggccaaccaagttctctgccagccgatggcaagctttccctctaatgttactgatgtagaatatgaggaagaatggcactcaacgttaatgcagtctttaactcataaagaggtgacacacaaactcaaaaccttggcccgtgttgtgggagcgtatccatgtcaagctagtggtctccgtttgctgtcaactggtaacattcatctgcggttgactcttgaggatcctacagcgagaattcatgcgtacgtccataagaattatctggtccaattcttcggtggttttctgacagaagaagcgataacaaagaagatgaacaagctacttggtatcccagaaccagaggacagcgaggaaggtgcccccttgactaggaatccaccttggatatggtgctgcttgacatcattctatatggacaaaaacaatccctgggacagcagaaagtaccgaatctttgccacagagatgagggattgaggagggatgctgctcgaatatgcaggaacggccttgcaaatgaaccgaactgattctatgtagtatttctgtgtgctctcgttggcattttgcttggaggggcatcttgctgggatgcagcgagacacgctttagttgtagcctgcgtactgtcagtattattccctagatgcaatgttgttgcagtgctgctgctgaccttctgctccatccagaacactggtagcagtctgtatgcgcgcccacgctacagaactctagattatcttgtgaaatgttagtgcacacagcaccaacttttggcttggaagttggaacgtggcaagaaccccttttcttgttcggcgccttgcagttctctcggtttccacgaaatgggtatatgttccttgtgaattttcggcgctttgatatgctgcggttttcatattcagaagcttgcgatggactgctg

SEQ ID NO: 17252 - DNA, 1935 bp, Zea Mays
acagtgccgcagtatcccaagtcccaacaaggtcaagtcgcgtggattcgccactagcgggtattgattaccttgccgccccttgaccaaaccaaataacacaagtccccattgcttgcaccctacagctcctcacacccaaggtatggaggaggcaccaacgagggagccgaagaggctgcgccaggacgccgcggttacttccgccgcggcggcggctgaggagcctcagtacgtgtacctgcctatcgccgacgccatgaaggttcccggcgtccgggtttgcctcttcgccgttgtctccgagatcggcatcaccgaccgcagccgtggcacggatttcactcttaggttgaggattgtggatcaatcatgcatggatggaatctctgtaacagtttttgctgacaaaactactctattgccttgtgtcaagtcaagtggagatgtgatcagtctccataacgtcatgataacgatgcatggggagttctttgtttcatttaacaaagaagtttcttcatttgcgctatttgaaagcaaagtagctgagtgcagcccatatcagacttctgtgaaatatcatggcagcaaacatgacaaagaacttttaacccagatgagaacgtggcttgcatataatcctctaggtctgaaagattttgaattgcagttaagaagtttaaaatctgattctacttttgatctagtatgcaaggttgttcatgtccatgaagataacgacaaattgatattttatgtttgggatggaactgatacccctgctgttgagtttcaggcaacatatgcctatcaaggaagtatcccacatgcaaaatagggtttattgggccagattctgtaacattacttgcaaggaagagtttggcatttggaaaggcattttgctggcctctagtaaagttcggcttttatctcatgaagatggtagcgttgttgatcgtcgaaagatgtatgccattcgtaaggccaaccaagttctctgccagccgatggcaagctttccctctaatgttactgttctatcagatgtagaatatgaggaagaatggcactcaacgttaatgcagtctttaactcataaagaggtgacacacaaactcaaaaccttggcccgtgttgtgggagcgtatccatgtcaagctagtggtctccgtttgctgtcaactggtaacattcatctgcggttgactcttgaggatcctacagcgagaattcatgcgtacgtccataagaattatctggtccaattcttcggtggttttctgacagaagaagcgataacaaagaagatgaacaagctacttggtatcccagaaccagaggacagcgaggaaggtgcccccttgactaggaatccaccttggatatggtgctgcttgacatcattctatatggacaaaaacaatccctgggacagcagaaagtaccgaatctttgccacagagatgagggattgaggagggatgctgctcgaatatgcaggaacggccttgcaaatgaaccgaactgattctatgtagtatttctgtgtgctctcgttggcattttgcttggaggggcatcttgctgggatgcagcgagacacgctttagttgtagcctgcgtactgtcagtattattccctagatgcaatgttgttgcagtgctgctgctgaccttctgctccatccagaacactggtagcagtctgtatgcgcgcccacgctacagaactctagattatcttgtgaaatgttagtgcacacagcaccaacttttggcttggaagttggaacgtggcaagaaccccttttcttgttcggcgccttgcagttctctcggtttccacgaaatgggtatatgttccttgtgaattttcggcgctttgatatgctgcggttttcatattcagaagcttgcgatggactgctg

SEQ ID NO: 17253 - DNA, 2411 bp, Zea Mays
acagtgccgcagtatcccaagtcccaacaaggtcaagtcgcgtggattcgccactagcgggtattgattaccttgccgccccttgaccaaaccaaataacacaagtccccattgcttgcaccctacagctcctcacacccaaggtatggaggaggcaccaacgagggagccgaagaggctgcgccaggacgccgcggttacttccgccgcggcggcggctgaggagcctcagtacgtgtacctgcctatcgccgacgccatgaaggttcccggcgtccgggtttgcctcttcgccgttgtctccgagatcggcatcaccgaccgcagccgtggcacggatttcactcttaggttgaggattgtggatcaatcatgcatggatggaatctctgtaacagtttttgctgacaaaactactctattgccttgtgtcaagtcaagtggagatgtgatcagtctccataacgtcatgataacgatgcatggggagttctttgtttcatttaacaaagaagtttcttcatttgcgctatttgaaagcaaagtagctgagtgcagcccatatcagacttctgtgaaatatcatggcagcaaacatgacaaagaacttttaacccagatgagaacgtggcttgcatataatcctctaggtctgaaagattttgaattgcagttaagaagtttaaaatctgattctacttttgatctagtatgcaaggttgttcatgtccatgaagataacgacaaattgatattttatgtttgggatggaactgatacccctgctgttgagtttcaggcaactttggatccaaaggcagttgaatcaccccctctatttgaagggccacctctacccagggaggttttgtgcacaatgccaattatcggaactgttttgaggattttttcagatatgcctatcaaggaagtatcccacatgcaaaatagggtttattgggccagattctgtaacattacttgcaaggaagagtttggcatttggaaaggcattttgctggcctctagtaaagttcggcttttatctcatgaagatggtagcgttgttgatcgtcgaaagatgtatgccattcgtaaggccaaccaagttctctgccagccgatggcaagctttccctctaatgttactggtatagagcatagtccgatattttgcattgctcctgatgaaagtattctgttttatcgttcagatcatgaatttagcttctgattcagcatttaattgattaaaatagcaatatataagtttgttcatgtggccttatcttcattgttatctgaataagtgtataatatagcattttccctgttctatttgcatttgaatgttgtgcataaaaacgaacctcaattttttctctcatgtgatatgtatatatggagatctaagtgaagcacatgatggtcttgtcaaagtgcttgtttacatgcattatattgatgatgaagcgccgcataaagctgtaacacattttttgacaatctgttatcagttctatcagatgtagaatatgaggaagaatggcactcaacgttaatgcagtctttaactcataaagaggtgacacacaaactcaaaaccttggcccgtgttgtgggagcgtatccatgtcaagctagtggtctccgtttgctgtcaactggtaacattcatctgcggttgactcttgaggatcctacagcgagaattcatgcgtacgtccataagaattatctggtccaattcttcggtggttttctgacagaagaagcgataacaaagaagatgaacaagctacttggtatcccagaaccagaggacagcgaggaaggtgcccccttgactaggaatccaccttggatatggtgctgcttgacatcattctatatggacaaaaacaatccctgggacagcagaaagtaccgaatctttgccacagagatgagggattgaggagggatgctgctcgaatatgcaggaacggccttgcaaatgaaccgaactgattctatgtagtatttctgtgtgctctcgttggcattttgcttggaggggcatcttgctgggatgcagcgagacacgctttagttgtagcctgcgtactgtcagtattattccctagatgcaatgttgttgcagtgctgctgctgaccttctgctccatccagaacactggtagcagtctgtatgcgcgcccacgctacagaactctagattatcttgtgaaatgttagtgcacacagcaccaacttttggcttggaagttggaacgtggcaagaaccccttttcttgttcggcgccttgcagttctctcggtttccacgaaatgggtatatgttccttgtgaattttcggcgctttgatatgctgcggttttcatattcagaagcttgcgatggactgctg

SEQ ID NO: 17254 - DNA, 2304 bp, Zea Mays
acagtgccgcagtatcccaagtcccaacaaggtcaagtcgcgtggattcgccactagcgggtattgattaccttgccgccccttgaccaaaccaaataacacaagtccccattgcttgcaccctacagctcctcacacccaaggtatggaggaggcaccaacgagggagccgaagaggctgcgccaggacgccgcggttacttccgccgcggcggcggctgaggagcctcagtacgtgtacctgcctatcgccgacgccatgaaggttcccggcgtccgggtttgcctcttcgccgttgtctccgagatcggcatcaccgaccgcagccgtggcacggatttcactcttaggttgaggattgtggatcaatcatgcatggatggaatctctgtaacagtttttgctgacaaaactactctattgccttgtgtcaagtcaagtggagatgtgatcagtctccataacgtcatgataacgatgcatggggagttctttgtttcatttaacaaagaagtttcttcatttgcgctatttgaaagcaaagtagctgagtgcagcccatatcagacttctgtgaaatatcatggcagcaaacatgacaaagaacttttaacccagatgagaacgtggcttgcatataatcctctaggtctgaaagattttgaattgcagttaagaagtttaaaatctgattctacttttgatctagtatgcaaggttgttcatgtccatgaagataacgacaaattgatattttatgtttgggatggaactgatacccctgctgttgagtttcaggcaacgtaggattttctatgtttatttattgtttattttttcagcaataactaagaaaaccatctatgcaatataggatgatgctctagtgtttttgaaatattgttgcaagttttaactattatttggttgttcttatatggtgcactgaacattggcatgatcagtgaaaagaaaataaattttatcttagaaaaaacatttgttgatgtcagtcacgtcactattttcactttaacttacctgtttttttgtgcctctttgatattgattggtgaacatatagtttggatccaaaggcagttgaatcaccccctctatttgaagggccacctctacccagggaggttttgtgcacaatgccaattatcggaactgttttgaggattttttcagatatgcctatcaaggaagtatcccacatgcaaaatagggtttattgggccagattctgtaacattacttgcaaggaagagtttggcatttggaaaggcattttgctggcctctagtaaagttcggcttttatctcatgaagatggtagcgttgttgatcgtcgaaagatgtatgccattcgtaaggccaaccaagttctctgccagccgatggcaagctttccctctaatgttactgttctatcagatgtagaatatgaggaagaatggcactcaacgttaatgcagtctttaactcataaagaggtgacacacaaactcaaaaccttggcccgtgttgtgggagcgtatccatgtcaagctagtggtctccgtttgctgtcaactggtaacattcatctgcggttgactcttgaggatcctacagcgagaattcatgcgtccaattcttcggtggttttctgacagaagaagcgataacaaagaagatgaacaagctacttggtatcccagaaccagaggacagcgaggaaggtgcccccttgactaggaatccaccttggatatggtgctgcttgacatcattctatatggacaaaaacaatccctgggacagcagaaagtaccgaatctttgccacagagatgagggattgaggagggatgctgctcgaatatgcaggaacggccttgcaaatgaaccgaactgattctatgtagtatttctgtgtgctctcgttggcattttgcttggaggggcatcttgctgggatgcagcgagacacgctttagttgtagcctgcgtactgtcagtattattccctagatgcaatgttgttgcagtgctgctgctgaccttctgctccatccagaacactggtagcagtctgtatgcgcgcccacgctacagaactctagattatcttgtgaaatgttagtgcacacagcaccaacttttggcttggaagttggaacgtggcaagaaccccttttcttgttcggcgccttgcagttctctcggtttccacgaaatgggtatatgttccttgtgaattttcggcgctttgatatgctgcggttttcatattcagaagcttgcgatggactgctg

SEQ ID NO: 17255 - DNA, 2326 bp, Zea Mays
acagtgccgcagtatcccaagtcccaacaaggtcaagtcgcgtggattcgccactagcgggtattgattaccttgccgccccttgaccaaaccaaataacacaagtccccattgcttgcaccctacagctcctcacacccaaggtatggaggaggcaccaacgagggagccgaagaggctgcgccaggacgccgcggttacttccgccgcggcggcggctgaggagcctcagtacgtgtacctgcctatcgccgacgccatgaaggttcccggcgtccgggtttgcctcttcgccgttgtctccgagatcggcatcaccgaccgcagccgtggcacggatttcactcttaggttgaggattgtggatcaatcatgcatggatggaatctctgtaacagtttttgctgacaaaactactctattgccttgtgtcaagtcaagtggagatgtgatcagtctccataacgtcatgataacgatgcatggggagttctttgtttcatttaacaaagaagtttcttcatttgcgctatttgaaagcaaagtagctgagtgcagcccatatcagacttctgtgaaatatcatggcagcaaacatgacaaagaacttttaacccagatgagaacgtggcttgcatataatcctctaggtctgaaagattttgaattgcagttaagaagtttaaaatctgattctacttttgatctagtatgcaaggttgttcatgtccatgaagataacgacaaattgatattttatgtttgggatggaactgatacccctgctgttgagtttcaggcaacgtaggattttctatgtttatttattgtttattttttcagcaataactaagaaaaccatctatgcaatataggatgatgctctagtgtttttgaaatattgttgcaagttttaactattatttggttgttcttatatggtgcactgaacattggcatgatcagtgaaaagaaaataaattttatcttagaaaaaacatttgttgatgtcagtcacgtcactattttcactttaacttacctgtttttttgtgcctctttgatattgattggtgaacatatagtttggatccaaaggcagttgaatcaccccctctatttgaagggccacctctacccagggaggttttgtgcacaatgccaattatcggaactgttttgaggattttttcagatatgcctatcaaggaagtatcccacatgcaaaatagggtttattgggccagattctgtaacattacttgcaaggaagagtttggcatttggaaaggcattttgctggcctctagtaaagttcggcttttatctcatgaagatggtagcgttgttgatcgtcgaaagatgtatgccattcgtaaggccaaccaagttctctgccagccgatggcaagctttccctctaatgttactgttctatcagatgtagaatatgaggaagaatggcactcaacgttaatgcagtctttaactcataaagaggtgacacacaaactcaaaaccttggcccgtgttgtgggagcgtatccatgtcaagctagtggtctccgtttgctgtcaactggtaacattcatctgcggttgactcttgaggatcctacagcgagaattcatgcgtacgtccataagaattatctggtccaattcttcggtggttttctgacagaagaagcgataacaaagaagatgaacaagctacttggtatcccagaaccagaggacagcgaggaaggtgcccccttgactaggaatccaccttggatatggtgctgcttgacatcattctatatggacaaaaacaatccctgggacagcagaaagtaccgaatctttgccacagagatgagggattgaggagggatgctgctcgaatatgcaggaacggccttgcaaatgaaccgaactgattctatgtagtatttctgtgtgctctcgttggcattttgcttggaggggcatcttgctgggatgcagcgagacacgctttagttgtagcctgcgtactgtcagtattattccctagatgcaatgttgttgcagtgctgctgctgaccttctgctccatccagaacactggtagcagtctgtatgcgcgcccacgctacagaactctagattatcttgtgaaatgttagtgcacacagcaccaacttttggcttggaagttggaacgtggcaagaaccccttttcttgttcggcgccttgcagttctctcggtttccacgaaatgggtatatgttccttgtgaattttcggcgctttgatatgctgcggttttcatattcagaagcttgcgatggactgctg

SEQ ID NO: 17256 - DNA, 749 bp, Zea Mays
gctctcgttcacagtgcaagcgaggcttaattggtagtaggctgctcttgttgcgccggcagcggcaggcggcagcgcaaaacattaaaccatcatttgcggcggcggctgctgccggcgacgcgatgtccaagcaaaagtccgtgatcaggctgggcgtaccgaacgacaagaaccggtctaaggccatgcagatggcatccaagttcgagtgaactcggtggggatcgccggcgacgccaaggaccggctggaggtggtgggggagagcgtcgacatcacctgcatgatcaacctgctgcgcaagaaggtctgccgcgccgacatcgtcgtggtggaggaggtcaaggacaagaagaaggaggaggaggagaagaagaagaaggaggaggaagagaaaaagaagaaggcggaggaggaagccaagaagaagaaggaggaggaagagctcaagaagaagctctgtccgtacctgtacccgccgccgccgtgctccggtgcctgttgccgcgggccgtcgccgccgatgtttctgtgcgagccggaacagccagcgggatgccacatcatgtgacgatgaagtgaagctccgtgaataatcgtcccgtccgaacttgtgcacatgcgtggttgtggttttgctttggcatctgaattacaatcctaagtgatcatggaatttagatcactacttatatataaagtattgttttgtgagtttgtttttaagttaagatgttctaaattcg

SEQ ID NO: 17257 - DNA, 949 bp, Zea Mays
tcggaaacaaactgtgtaaagcccataattcattatcacatcgaacacggttgccgcagcggcccagctcacctgagaagacagtacgcacacgccgcatcgtctgcatctccggtggccatccatcctcctcccttctctcgtcgttccctccactcctaggcggaagcggccggcgcagagtggagatcgacccggactttgaaattgcctcttccttttgatgggtaccatgaagaggttggtttcgaccgccctcgccgcgagagggctcctgagatctcacggactgccgaccacaacttctgttatgtaccaaccagcattccagcaatttatgaactattcatcaccacatggtggtgatcccaatgcaaacacgaactcaactacaacacgaatagctgctgatcctgatacacatcaagatttcgagccaaagagcagaatttcagacatgactttgcatgacgctattgctcaggatatcaaggagaacccagtcttgatctacatgaagggttttcctgagtctccaatgtgtggcttcagtgcactggctgttaaggtcttccagcaatatggcgtccctgtctgtggtagagacattcttggggatcttaagctcaaagagtgtgttaaagcccacactaactggcctacatttccacaaatatttatcaaaggagagtttgttggggggtctgacatcatattaagcttgcaccagaagggtgagcttaaggatcttcttggggatattgcacaaagagacgaacaaaaagtgcatgctcacgattcatgaagcaatcaacaggcattttttgtggccttttcttaagagttaaagctgaggtggagcatatatcactttgctgtgcctacgaaaaacggcatcaaagttaagcaggcaactgtctaattggccattatgcttcatttgatggca

SEQ ID NO: 17258 - DNA, 1575 bp, Zea Mays
gattagtcactccacgcctaccagtttgtcgtgaatttgtcgttgtttcgagggcgacaataattccagtttattttccacgaaatctggagggttcaactaaacccctttccccacccaaagctcgtcgtcagttacacgctatccatttcgttctactattgttttgcgagagttcgctgatgctgcgatgggaatttggttgttgctgatttctccaattcgtttggcagatcccattcttaatctcattgtttgttgttgaatgcgccgttcacagggtaccatgaagaggttggtttcgaccgccctcgccgcgagagggctcctgagatctcacggactgccgaccacaacttctgtaaggttatgtaccaaccagcattccagcaatttatgaactattcatcaccacatggtggtgatcccaatgcaaacacgaactcaactacaacacgaatagctgctgatcctgatacacatcaagatttcgagccaaagagcagaatttcagacatgactttgcatgacgctattgctcaggatatcaaggagaacccagtcttgatctacatgaagggttttcctgagtctccaatgtgtggcttcagtgcactggctgttaaggtcttccagcaatatggcgtccctgtctgtggtagagacattcttggggatcttaagctcaaagagtgtgttaaagcccacactaactggcctacatttccacaaatatttatcaaaggagagtttgttggggggtctgacatcatattaagcttgcaccagaagggtgagcttaaggatcttcttggggatattgcacaaagagacgaacaaaaagtgcatgctcacgattcatgaagcaatcaacagtaggttcttttactatgcgctatctactctgccactaaaatgttctatctcggagtctttaggcgacagcgtacgtgacattgtgaactgtccctacgcattggacatggatgaccggatgtgttcccagaatcaggttgtaggcatctggtattctggaagaggcaaaataatgatctgatacccatatgccgggttctctgtcaatgaataagcgacacttttagcaatagcaatgctgttctttggtgccttgtagtactatggaacttaaattccaggattcgtaggttatgacgttatgttgcattccttttttttaatttaatcgaactgaacttatgataacagataaggctgtaaaatggttatacgcgctgctgcctgctggtgttcaaacgggtggtgtccaacctccgccgccatcagatcaacccgctcccttttaacttttatccctgtttgattttgtttgtcttgacttgtttcgatcgttcgcatttctcctcactttggtgttgtttggttcatgggcagagacgacgtaaatgacaatgataatgattcacagcggtaataagtttgaatagactgatatttatttttagtgtgatatcggattatggttggactcaaacaaacatgatttaacgttatccgttactcattacattacaattatatgaaccacaattatat

SEQ ID NO: 17259 - DNA, 1218 bp, Zea Mays
gattagtcactccacgcctaccagtttgtcgtgaatttgtcgttgtttcgagggcgacaataattccagtttattttccacgaaatctggagggttcaactaaacccctttccccacccaaagctcgtcgtcagttacacgctatccatttcgttctactattgttttgcgagagttcgctgatgctgcgatgggaatttggttgttgctgatttctccaattcgtttggcagatcccattcttaatctcattgtttgttgttgaatgcgccgttcacagggtaccatgaagaggttggtttcgaccgccctcgccgcgagagggctcctgagatctcacggactgccgaccacaacttctgttatgtaccaaccagcattccagcaatttatgaactattcatcaccacatggtggtgatcccaatgcaaacacgaactcaactacaacacgaatagctgctgatcctgatacacatcaagatttcgagccaaagagcagaatttcagacatgactttgcatgacgctattgctcaggatatcaaggagaacccagtcttgatctacatgaagggttttcctgagtctccaatgtgtggcttcagtgcactggctgttaaggtcttccagcaatatggcgtccctgtctgtggtagagacattcttggggatcttaagctcaaagagtgtgttaaagcccacactaactggcctacatttccacaaatatttatcaaaggagagtttgttggggggtctgacatcatattaagcttgcaccagaagggtgagcttaaggatcttcttggggatattgcacaaagagacgaacaaaaagtgcatgctcacgattcatgaagcaatcaacaataaggctgtaaaatggttatacgcgctgctgcctgctggtgttcaaacgggtggtgtccaacctccgccgccatcagatcaacccgctcccttttaacttttatccctgtttgattttgtttgtcttgacttgtttcgatcgttcgcatttctcctcactttggtgttgtttggttcatgggcagagacgacgtaaatgacaatgataatgattcacagcggtaataagtttgaatagactgatatttatttttagtgtgatatcggattatggttggactcaaacaaacatgatttaacgttatccgttactcattacattacaattatatgaaccacaattatat

SEQ ID NO: 17260 - DNA, 1164 bp, Zea Mays
tcggaaacaaactgtgtaaagcccataattcattatcacatcgaacacggttgccgcagcggcccagctcacctgagaagacagtacgcacacgccgcatcgtctgcatctccggtggccatccatcctcctcccttctctcgtcgttccctccactcctaggcggaagcggccggcgcagagtggagatcgacccggactttgaaattgcctcttccttttgatgggtaccatgaagaggttggtttcgaccgccctcgccgcgagagggctcctgagatctcacggactgccgaccacaacttctgttatgtaccaaccagcattccagcaatttatgaactattcatcaccacatggtggtgatcccaatgcaaacacgaactcaactacaacacgaatagctgctgatcctgatacacatcaagatttcgagccaaagagcagaatttcagacatgactttgcatgacgctattgctcaggatatcaaggagaacccagtcttgatctacatgaagggttttcctgagtctccaatgtgtggcttcagtgcactggctgttaaggtcttccagcaatatggcgtccctgtctgtggtagagacattcttggggatcttaagctcaaagagtgtgttaaagcccacactaactggcctacatttccacaaatatttatcaaaggagagtttgttggggggtctgacatcatattaagcttgcaccagaagggtgagcttaaggatcttcttggggatattgcacaaagagacgaacaaaaagtgcatgctcacgattcatgaagcaatcaacaataaggctgtaaaatggttatacgcgctgctgcctgctggtgttcaaacgggtggtgtccaacctccgccgccatcagatcaacccgctcccttttaacttttatccctgtttgattttgtttgtcttgacttgtttcgatcgttcgcatttctcctcactttggtgttgtttggttcatgggcagagacgacgtaaatgacaatgataatgattcacagcggtaataagtttgaatagactgatatttatttttagtgtgatatcggattatggttggactcaaacaaacatgatttaacgttatccgttactcattacattacaattatatgaaccacaattatat

SEQ ID NO: 17261 - DNA, 1169 bp, Zea Mays
tcggaaacaaactgtgtaaagcccataattcattatcacatcgaacacggttgccgcagcggcccagctcacctgagaagacagtacgcacacgccgcatcgtctgcatctccggtggccatccatcctcctcccttctctcgtcgttccctccactcctaggcggaagcggccggcgcagagtggagatcgacccggactttgaaattgcctcttccttttgatgggtaccatgaagaggttggtttcgaccgccctcgccgcgagagggctcctgagatctcacggactgccgaccacaacttctgtaaggttatgtaccaaccagcattccagcaatttatgaactattcatcaccacatggtggtgatcccaatgcaaacacgaactcaactacaacacgaatagctgctgatcctgatacacatcaagatttcgagccaaagagcagaatttcagacatgactttgcatgacgctattgctcaggatatcaaggagaacccagtcttgatctacatgaagggttttcctgagtctccaatgtgtggcttcagtgcactggctgttaaggtcttccagcaatatggcgtccctgtctgtggtagagacattcttggggatcttaagctcaaagagtgtgttaaagcccacactaactggcctacatttccacaaatatttatcaaaggagagtttgttggggggtctgacatcatattaagcttgcaccagaagggtgagcttaaggatcttcttggggatattgcacaaagagacgaacaaaaagtgcatgctcacgattcatgaagcaatcaacaataaggctgtaaaatggttatacgcgctgctgcctgctggtgttcaaacgggtggtgtccaacctccgccgccatcagatcaacccgctcccttttaacttttatccctgtttgattttgtttgtcttgacttgtttcgatcgttcgcatttctcctcactttggtgttgtttggttcatgggcagagacgacgtaaatgacaatgataatgattcacagcggtaataagtttgaatagactgatatttatttttagtgtgatatcggattatggttggactcaaacaaacatgatttaacgttatccgttactcattacattacaattatatgaaccacaattatat

SEQ ID NO: 17262 - DNA, 1685 bp, Zea Mays
ctttgttttgcttcaaaaagttgacatgaccctaaattttttggctacaccaatgtatttgcactaccgagcgctgatattttttgggattggggtgagcaaatgtctcatccaagaactcgcatggccaacagaaggctatgggtgagaacttgcgtgagggagtgtcaagctacagggattgttggggagaatgtcatcagccattgtcagtccaaagagaactacacttctgttggagtctcttggtataaccaggagcaaatttacatccagtggaaggaactgaactgtaggacagactgtcgctatttttgcatgatgcagagagaaggggaacgacagtcacttggtctgagccctgttaaatatcatggaaagtggccattcttacgtgtttctgtgttccaggaacccctttcaactgcactatctgctgtcaacctactgatgcacttcactggctggctttcatttttccttctagtgaattacaaattgcctcttagaccccagaccaagagaacttattatgaatacactagcctgtggcatatctatgcaatcttatcaatgaacgcatggttttggagctcaattttccatactcgagacattgagttgactgagaaactggactattcttcagctgtggccttgcttggctactcgttgatcctttcattgctaagggctttcaatgtcaaggatgaggctagcagggtgatgtttgcagcccctattttggcattcgttacaacgcacatcttgtatcttaacttctacgagcttgactatggatggaacatgaaagtctgcgtggtgatggctgcggttcaacttctgacgtgggctgtttgggctggtgtaagccggcatccatcacggctgaaactctggacggttgtttttggaggagcactggtcatgcttcttgagctctacgacttccctccatacatggggtttgccgatgcccattcactgtggcatgcaagcaccattccactcacctatctctggtggagcttcatcaaggacgatgccaaattccgcacgtcaacactcagcaagaaggcaaagtagttaagcaaagcgcgacattcttagcatagggtcagagaggatcagattccgattccgtggtctgcacgggggacattttgggggcacacgtgttgtcggacatcatggaacctcggtacatttgccctccccaaaaaagacattcatcttcatccactcaggtttttggcccacaaaagtcaacatactctttagggcgcatgttctgcccttacgaattatctctttactgacctgaacgtgcatcctgtgattgaatcggcatcttatcattgtagtgttggtggggtttgggagattttgtcatcgccgaatcagttttgtgaaatcagacagaacaatgaacatcagtggtgtgtttcctattatgtgtggagttttgtaaattcctgaagcccattttgtatgagttttccaacgttacgaaaattcctgaacaatgaacacgtgctatgtttgaaacaagagggcacggtagctaactagctggcaggcagtggtgggctacgggtttaaactttaaaccgaggacagtcgaggatattttttttgatatgtcatattgtgtataattcgaccacatagatatatagttttca

SEQ ID NO: 17263 - DNA, 1991 bp, Zea Mays
atgcctatagtcctatacttacagctgaccaggcgatcaatcacgcacgccgctggtcagcagtcagcagcaagccgcctcgtcgcctcgtcgggagtcgggagtctggtgagcgagctggtgatcagtaggtaccttggaggcctggcttgcttggacgctccattgcttcgacttcgaggtcgtcgcgggtttggatcctgtgtggagggggtaacaccgtgtagctcaactgtcccctagcgccgccgcgcgaaactccctaccggtccattttgtttgtagccattaagctcttcggaggtggagatctgggctgtcgtttccaggaccctggccgcgtcggctgtgatgggtcgaagcgccttggcggttcggttggcttcccttcttgcgtttggtttggtgctcgtctccgtcgaggccagcctcggggatgttgatccgcgctacagaacttgcgtgagggagtgtcaagctacagggattgttggggagaatgtcatcagccattgtcagtccaaagagaactacacttctgttggagtctcttggtataaccaggagcaaatttacatccagtggaaggaactgaactgtaggacagactgtcgctatttttgcatgatgcagagagaaggggaacgacagtcacttggtctgagccctgttaaatatcatggaaagtggccattcttacgtgtttctgtgttccaggaacccctttcaactgcactatctgctgtcaacctactgatgcacttcactggctggctttcatttttccttctagtgaattacaaattgcctcttagaccccagaccaagagaacttattatgaatacactagcctgtggcatatctatgcaatcttatcaatgaacgcatggttttggagctcaattttccatactcgagacattgagttgactgagaaactggactattcttcagctgtggccttgcttggctactcgttgatcctttcattgctaagggctttcaatgtcaaggatgaggctagcagggtgatgtttgcagcccctattttggcattcgttacaacgcacatcttgtatcttaacttctacgagcttgactatggatggaacatgaaagtctgcgtggtgatggctgcggttcaacttctgacgtgggctgtttgggctggtgtaagccggcatccatcacggctgaaactctggacggttgtttttggaggagcactggtcatgcttcttgagctctacgacttccctccatacatggggtttgccgatgcccattcactgtggcatgcaagcaccattccactcacctatctctggtggagcttcatcaaggacgatgccaaattccgcacgtcaacactcagcaagaaggcaaagtagttaagcaaagcgcgacattcttagcatagggtcagagaggatcagattccgattccgtggtctgcacgggggacattttgggggcacacgtgttgtcggacatcatggaacctcggtacatttgccctccccaaaaaagacattcatcttcatccactcaggtttttggcccacaaaagtcaacatactctttagggcgcatgttctgcccttacgaattatctctttactgacctgaacgtgcatcctgtgattgaatcggcatcttatcattgtagtgttggtggggtttgggagattttgtcatcgccgaatcagttttgtgaaatcagacagaacaatgaacatcagtggtgtgtttcctattatgtgtggagttttgtaaattcctgaagcccattttgtatgagttttccaacgttacgaaaattcctgaacaatgaacacgtgctatgtttgaaacaagagggcacggtagctaactagctggcaggcagtggtgggctacgggtttaaactttaaaccgaggacagtcgaggatattttttttgatatgtcatattgtgtataattcgaccacatagatatatagttttca

SEQ ID NO: 17264 - DNA, 1912 bp, Zea Mays
atgcctatagtcctatacttacagctgaccaggcgatcaatcacgcacgccgctggtcagcagtcagcagcaagccgcctcgtcgcctcgtcgggagtcgggagtctggtgagcgagctggtgatcaggtaccttggaggcctggcttgcttggacgctccattgcttcgacttcgaggtcgtcgcgggtttggatcctgtgtggagggggtaacaccgtgtagctcaactgtcccctagcgccgccgcgcgaaactccctaccggtccattttgtttgtagccattaagctcttcggaggtggagatctgggctgtcgtttccaggaccctggccgcgtcggctgtgatgggtcgaagcgccttggcggttcggttggcttcccttcttgcgtttggtttggtgctcgtctccgtcgaggccagcctcggggatgttgatccgcgctacagaacttgcgtgagggagtgtcaagctacagggattgttggggagaatgtcatcagccattgtcagtccaaagagaactacacttctgttggagtctcttggtataaccaggagcaaatttacatccagtggaaggaactgaactgtaggacagactgtcgctatttttgcatgatgcagagagaaggggaacgacagtcacttggtctgagccctgttaaatatcatggaaagtggccattcttacgtgtttctgtgttccaggaacccctttcaactgcactatctgctgtcaacctactgatgcacttcactggctggctttcatttttccttctagtgaattacaaattgcctcttagaccccagaccaagagaacttattatgaatacactagcctgtggcatatctatgcaatcttatcaatgaacgcatggttttggagctcaattttccatactcgagacattgagttgactgagaaactggactattcttcagctgtggccttgcttggctactcgttgatcctttcattgctaagggctttcaatgtcaaggatgaggctagcagggatggaacatgaaagtctgcgtggtgatggctgcggttcaacttctgacgtgggctgtttgggctggtgtaagccggcatccatcacggctgaaactctggacggttgtttttggaggagcactggtcatgcttcttgagctctacgacttccctccatacatggggtttgccgatgcccattcactgtggcatgcaagcaccattccactcacctatctctggtggagcttcatcaaggacgatgccaaattccgcacgtcaacactcagcaagaaggcaaagtagttaagcaaagcgcgacattcttagcatagggtcagagaggatcagattccgattccgtggtctgcacgggggacattttgggggcacacgtgttgtcggacatcatggaacctcggtacatttgccctccccaaaaaagacattcatcttcatccactcaggtttttggcccacaaaagtcaacatactctttagggcgcatgttctgcccttacgaattatctctttactgacctgaacgtgcatcctgtgattgaatcggcatcttatcattgtagtgttggtggggtttgggagattttgtcatcgccgaatcagttttgtgaaatcagacagaacaatgaacatcagtggtgtgtttcctattatgtgtggagttttgtaaattcctgaagcccattttgtatgagttttccaacgttacgaaaattcctgaacaatgaacacgtgctatgtttgaaacaagagggcacggtagctaactagctggcaggcagtggtgggctacgggtttaaactttaaaccgaggacagtcgaggatattttttttgatatgtcatattgtgtataattcgaccacatagatatatagttttca

SEQ ID NO: 17265 - DNA, 1697 bp, Zea Mays
atgcctatagtcctatacttacagctgaccaggcgatcaatcacgcacgccgctggtcagcagtcagcagcaagccgcctcgtcgcctcgtcgggagtcgggagtctggtgagcgagctggtgatcaggaccctggccgcgtcggctgtgatgggtcgaagcgccttggcggttcggttggcttcccttcttgcgtttggtttggtgctcgtctccgtcgaggccagcctcggggatgttgatccgcgctacagaacttgcgtgagggagtgtcaagctacagggattgttggggagaatgtcatcagccattactgtcgctatttttgcatgatgcagagagaaggggaacgacagtcacttggtctgagccctgttaaatatcatggaaagtggccattcttacgtgtttctgtgttccaggaacccctttcaactgcactatctgctgtcaacctactgatgcacttcactggctggctttcatttttccttctagtgaattacaaattgcctcttagaccccagaccaagagaacttattatgaatacactagcctgtggcatatctatgcaatcttatcaatgaacgcatggttttggagctcaattttccatactcgagacattgagttgactgagaaactggactattcttcagctgtggccttgcttggctactcgttgatcctttcattgctaagggctttcaatgtcaaggatgaggctagcagggtgatgtttgcagcccctattttggcattcgttacaacgcacatcttgtatcttaacttctacgagcttgactatggatggaacatgaaagtctgcgtggtgatggctgcggttcaacttctgacgtgggctgtttgggctggtgtaagccggcatccatcacggctgaaactctggacggttgtttttggaggagcactggtcatgcttcttgagctctacgacttccctccatacatggggtttgccgatgcccattcactgtggcatgcaagcaccattccactcacctatctctggtggagcttcatcaaggacgatgccaaattccgcacgtcaacactcagcaagaaggcaaagtagttaagcaaagcgcgacattcttagcatagggtcagagaggatcagattccgattccgtggtctgcacgggggacattttgggggcacacgtgttgtcggacatcatggaacctcggtacatttgccctccccaaaaaagacattcatcttcatccactcaggtttttggcccacaaaagtcaacatactctttagggcgcatgttctgcccttacgaattatctctttactgacctgaacgtgcatcctgtgattgaatcggcatcttatcattgtagtgttggtggggtttgggagattttgtcatcgccgaatcagttttgtgaaatcagacagaacaatgaacatcagtggtgtgtttcctattatgtgtggagttttgtaaattcctgaagcccattttgtatgagttttccaacgttacgaaaattcctgaacaatgaacacgtgctatgtttgaaacaagagggcacggtagctaactagctggcaggcagtggtgggctacgggtttaaactttaaaccgaggacagtcgaggatattttttttgatatgtcatattgtgtataattcgaccacatagatatatagttttca

SEQ ID NO: 17266 - DNA, 1788 bp, Zea Mays
atgcctatagtcctatacttacagctgaccaggcgatcaatcacgcacgccgctggtcagcagtcagcagcaagccgcctcgtcgcctcgtcgggagtcgggagtctggtgagcgagctggtgatcaggtaccttggaggcctggcttgcttggacgctccattgcttcgacttcgaggtcgtcgcgggtttggatcctgtgtggagggggtaacaccgtgtagctcaactgtcccctagcgccgccgcgcgaaactccctaccggtccattttgtttgtagccattaagctcttcggaggtggagatctgggctgtcgtttccaggaccctggccgcgtcggctgtgatgggtcgaagcgccttggcggttcggttggcttcccttcttgcgtttggtttggtgctcgtctccgtcgaggccagcctcggggatgttgatccgcgctacagaacttgcgtgagggagtgtcaagctacagggattgttggggagaatgtcatcagccattgtcagtccaaagagaactacacttctgttggagtctcttggtataaccaggagcaaatttacatccagtggaaggaactgaactgtaggacagactgtcgctatttttgcatgatgcagagagaaggggaacgacagtcacttggtctgagccctgttaaatatcatggaaagtggccattcttacgtgtttctgtgttccagagacattgagttgactgagaaactggactattcttcagctgtggccttgcttggctactcgttgatcctttcattgctaagggctttcaatgtcaaggatgaggctagcagggtgatgtttgcagcccctattttggcattcgttacaacgcacatcttgtatcttaacttctacgagcttgactatggatggaacatgaaagtctgcgtggtgatggctgcggttcaacttctgacgtgggctgtttgggctggtgtaagccggcatccatcacggctgaaactctggacggttgtttttggaggagcactggtcatgcttcttgagctctacgacttccctccatacatggggtttgccgatgcccattcactgtggcatgcaagcaccattccactcacctatctctggtggagcttcatcaaggacgatgccaaattccgcacgtcaacactcagcaagaaggcaaagtagttaagcaaagcgcgacattcttagcatagggtcagagaggatcagattccgattccgtggtctgcacgggggacattttgggggcacacgtgttgtcggacatcatggaacctcggtacatttgccctccccaaaaaagacattcatcttcatccactcaggtttttggcccacaaaagtcaacatactctttagggcgcatgttctgcccttacgaattatctctttactgacctgaacgtgcatcctgtgattgaatcggcatcttatcattgtagtgttggtggggtttgggagattttgtcatcgccgaatcagttttgtgaaatcagacagaacaatgaacatcagtggtgtgtttcctattatgtgtggagttttgtaaattcctgaagcccattttgtatgagttttccaacgttacgaaaattcctgaacaatgaacacgtgctatgtttgaaacaagagggcacggtagctaactagctggcaggcagtggtgggctacgggtttaaactttaaaccgaggacagtcgaggatattttttttgatatgtcatattgtgtataattcgaccacatagatatatagttttca

SEQ ID NO: 17267 - DNA, 1912 bp, Zea Mays
atgcctatagtcctatacttacagctgaccaggcgatcaatcacgcacgccgctggtcagcagtcagcagcaagccgcctcgtcgcctcgtcgggagtcgggagtctggtgagcgagctggtgatcaggtaccttggaggcctggcttgcttggacgctccattgcttcgacttcgaggtcgtcgcgggtttggatcctgtgtggagggggtaacaccgtgtagctcaactgtcccctagcgccgccgcgcgaaactccctaccggtccattttgtttgtagccattaagctcttcggaggtggagatctgggctgtcgtttccaggaccctggccgcgtcggctgtgatgggtcgaagcgccttggcggttcggttggcttcccttcttgcgtttggtttggtgctcgtctccgtcgaggccagcctcggggatgttgatccgcgctacagaacttgcgtgagggagtgtcaagctacagggattgttggggagaatgtcatcagccattgtcagtccaaagagaactacacttctgttggagtctcttggtataaccaggagcaaatttacatccagtggaaggaactgaactgtaggacagactgtcgctatttttgcatgatgcagagagaaggggaacgacagtcacttggtctgagccctgttaaatatcatggaaagtggccattcttacgtgtttctgtgttccagtgaattacaaattgcctcttagaccccagaccaagagaacttattatgaatacactagcctgtggcatatctatgcaatcttatcaatgaacgcatggttttggagctcaattttccatactcgagacattgagttgactgagaaactggactattcttcagctgtggccttgcttggctactcgttgatcctttcattgctaagggctttcaatgtcaaggatgaggctagcagggtgatgtttgcagcccctattttggcattcgttacaacgcacatcttgtatcttaacttctacgagcttgactatggatggaacatgaaagtctgcgtggtgatggctgcggttcaacttctgacgtgggctgtttgggctggtgtaagccggcatccatcacggctgaaactctggacggttgtttttggaggagcactggtcatgcttcttgagctctacgacttccctccatacatggggtttgccgatgcccattcactgtggcatgcaagcaccattccactcacctatctctggtggagcttcatcaaggacgatgccaaattccgcacgtcaacactcagcaagaaggcaaagtagttaagcaaagcgcgacattcttagcatagggtcagagaggatcagattccgattccgtggtctgcacgggggacattttgggggcacacgtgttgtcggacatcatggaacctcggtacatttgccctccccaaaaaagacattcatcttcatccactcaggtttttggcccacaaaagtcaacatactctttagggcgcatgttctgcccttacgaattatctctttactgacctgaacgtgcatcctgtgattgaatcggcatcttatcattgtagtgttggtggggtttgggagattttgtcatcgccgaatcagttttgtgaaatcagacagaacaatgaacatcagtggtgtgtttcctattatgtgtggagttttgtaaattcctgaagcccattttgtatgagttttccaacgttacgaaaattcctgaacaatgaacacgtgctatgtttgaaacaagagggcacggtagctaactagctggcaggcagtggtgggctacgggtttaaactttaaaccgaggacagtcgaggatattttttttgatatgtcatattgtgtataattcgaccacatagatatatagttttca

SEQ ID NO: 17268 - DNA, 1533 bp, Zea Mays
cgacagaatgcctatagtcctatacttacagctgaccaggcgatcaatcacgcacgccgctggtcagcagtcagcagcaagccgcctcgtcgcctcgtcgggagtcgggagtctggtgagcgagctggtgatcaggtaccttggaggcctggcttgcttggacgctccattgcttcgacttcgaggtcgtcgcgggtttggatcctgtgtggagggggtaacaccgtgtagctcaactgtcccctagcgccgccgcgcgaaactccctaccggtccattttgtttgtagccattaagctcttcggaggtggagatctgggctgtcgtttccaggaccctggccgcgtcggctgtgatgggtcgaagcgccttggcggttcggttggcttcccttcttgcgtttggtttggtgctcgtctccgtcgaggccagcctcggggatgttgatccgcgctacagagacattgagttgactgagaaactggactattcttcagctgtggccttgcttggctactcgttgatcctttcattgctaagggctttcaatgtcaaggatgaggctagcagggtgatgtttgcagcccctattttggcattcgttacaacgcacatcttgtatcttaacttctacgagcttgactatggatggaacatgaaagtctgcgtggtgatggctgcggttcaacttctgacgtgggctgtttgggctggtgtaagccggcatccatcacggctgaaactctggacggttgtttttggaggagcactggtcatgcttcttgagctctacgacttccctccatacatggggtttgccgatgcccattcactgtggcatgcaagcaccattccactcacctatctctggtggagcttcatcaaggacgatgccaaattccgcacgtcaacactcagcaagaaggcaaagtagttaagcaaagcgcgacattcttagcatagggtcagagaggatcagattccgattccgtggtctgcacgggggacattttgggggcacacgtgttgtcggacatcatggaacctcggtacatttgccctccccaaaaaagacattcatcttcatccactcaggtttttggcccacaaaagtcaacatactctttagggcgcatgttctgcccttacgaattatctctttactgacctgaacgtgcatcctgtgattgaatcggcatcttatcattgtagtgttggtggggtttgggagattttgtcatcgccgaatcagttttgtgaaatcagacagaacaatgaacatcagtggtgtgtttcctattatgtgtggagttttgtaaattcctgaagcccattttgtatgagttttccaacgttacgaaaattcctgaacaatgaacacgtgctatgtttgaaacaagagggcacggtagctaactagctggcaggcagtggtgggctacgggtttaaactttaaaccgaggacagtcgaggatattttttttgatatgtcatattgtgtataattcgaccacatagatatatagttttca

SEQ ID NO: 17269 - DNA, 2099 bp, Zea Mays
atggaatgagtttcatttccaaggaaacaaacgggccctaactgaaattcaaatgaatcaacccaaaatttaaataataccgatcttttcggcttagaccggaccgacagaatgcctatagtcctatacttacagctgaccaggcgatcaatcacgcacgccgctggtcagcagtcagcagcaagccgcctcgtcgcctcgtcgggagtcgggagtctggtgagcgagctggtgatcaggtaccttggaggcctggcttgcttggacgctccattgcttcgacttcgaggtcgtcgcgggtttggatcctgtgtggagggggtaacaccgtgtagctcaactgtcccctagcgccgccgcgcgaaactccctaccggtccattttgtttgtagccattaagctcttcggaggtggagatctgggctgtcgtttccaggaccctggccgcgtcggctgtgatgggtcgaagcgccttggcggttcggttggcttcccttcttgcgtttggtttggtgctcgtctccgtcgaggccagcctcggggatgttgatccgcgctacagaacttgcgtgagggagtgtcaagctacagggattgttggggagaatgtcatcagccattgtcagtccaaagagaactacacttctgttggagtctcttggtataaccaggagcaaatttacatccagtggaaggaactgaactgtaggacagactgtcgctatttttgcatgatgcagagagaaggggaacgacagtcacttggtctgagccctgttaaatatcatggaaagtggccattcttacgtgtttctgtgttccaggaacccctttcaactgcactatctgctgtcaacctactgatgcacttcactggctggctttcatttttccttctagtgaattacaaattgcctcttagaccccagaccaagagaacttattatgaatacactagcctgtggcatatctatgcaatcttatcaatgaacgcatggttttggagctcaattttccatactcgagacattgagttgactgagaaactggactattcttcagctgtggccttgcttggctactcgttgatcctttcattgctaagggctttcaatgtcaaggatgaggctagcagggtgatgtttgcagcccctattttggcattcgttacaacgcacatcttgtatcttaacttctacgagcttgactatggatggaacatgaaagtctgcgtggtgatggctgcggttcaacttctgacgtgggctgtttgggctggtgtaagccggcatccatcacggctgaaactctggacggttgtttttggaggagcactggtcatgcttcttgagctctacgacttccctccatacatggggtttgccgatgcccattcactgtggcatgcaagcaccattccactcacctatctctggtggagcttcatcaaggacgatgccaaattccgcacgtcaacactcagcaagaaggcaaagtagttaagcaaagcgcgacattcttagcatagggtcagagaggatcagattccgattccgtggtctgcacgggggacattttgggggcacacgtgttgtcggacatcatggaacctcggtacatttgccctccccaaaaaagacattcatcttcatccactcaggtttttggcccacaaaagtcaacatactctttagggcgcatgttctgcccttacgaattatctctttactgacctgaacgtgcatcctgtgattgaatcggcatcttatcattgtagtgttggtggggtttgggagattttgtcatcgccgaatcagttttgtgaaatcagacagaacaatgaacatcagtggtgtgtttcctattatgtgtggagttttgtaaattcctgaagcccattttgtatgagttttccaacgttacgaaaattcctgaacaatgaacacgtgctatgtttgaaacaagagggcacggtagctaactagctggcaggcagtggtgggctacgggtttaaactttaaaccgaggacagtcgaggatattttttttgatatgtcatattgtgtataattcgaccacatagatatatagttttca

SEQ ID NO: 17270 - DNA, 2124 bp, Zea Mays
cggatcgcgaagaggtgagggagaggacgtataagaggttgtttgatgacttgctttcgatttctacaagtggagtcagtatgaagccatttggctttgctgctaaactttcaacaaaatgtgcaaatgagaatgctcgagttgaagaattagatttgaggtcagaccagatgaaggaattacaggtggaggagcaggttattccccagaagaggagtgctaaaatccatgacttctgccttgggatcccttttggtggtcttttattctctatggggcttctaggatacatcttctccagaagcaccataagtcttgtcttgggcattgcaccagggctagccactctgctacttggcactctcagtctgaagttctggaggagcggcagatccagcttcctgcttatcttggctcaggcagcaatttctgctttcctggcatggaaatactctcatgcttacttcttgacaaatagactccttccttggggcttctacgcgtcactgagcactgcaatgggttgtttctacgcctatgtgctacttgcgggaggaaatcccccgcctaagaagttggcagccattccaccgcagtaggaagagccgaagagggattcggtttaggatcagctaggttttcattaaagttcagtacaactgggccgacaaaggcccaactaagccgctcgaaccgcttcggcgcctcccacccctcggacagaccagccttcaaactagggtttactcctcccgctccgagaaagcaaacaagcgtcagctccgccggcggcctcgcgctctctcccccgccgcaccttctctacgccaggactgccaagatgaagctcgtcagattccttatgaagctaaacaatgagacggtcaccatcgagctcaagaacggcacggttgtccacggcaccatcaccggtgttgacataagcatgaacactcatctgaagacagtgaagcttacactgaaagggaagaaccctgtaacgctggaccacctcagcgtgcgaggaaacaacatccgctattacattcttcctgacagcttaaacttggagactttgctggtagaggaaacccctagggttaagcctaagaagccgactacaggaaagcctttggggcgtgggcgcggccgtggtcgtggacgtggtcggggacgggggccgccacgctgacaggtttcccctgctgtgggctctcttgcctgacaagttccctgtacgatgtaacctctttcccccgcacgctgtgtgaaagaaccgttgcattgttacccttctgatgaacgtggactgaaatatctcaatctcaagtggttcttgtgaaatcaaccatgtctatttggtctaccattcgtgtgtgtcttagggtttacactgtagttaactcgtgatgtctttcccctggcatacataaatggtgccgcagaacttcggatgttctaggttgtatgcttgtttcacatggggattgttgatctggagatatgccttgcagtcgtgtctgcctctatttgatcttttagctctgcttgaagctgaattcccgtcgaccggagatactgattttgctgaagatctacagcttgctctcatacgacgccctgttggcatgcattgtgttttctgatgtgctgacaaacatgctcggtaaaggatgttttgtttgccggagatactgatcatctggagctgccgattctttttgtctcaggatgttttgtttgcaacgtttatagagttggtcaaaatagacaagatcagcttacgaacagagatgaagatattagtggcgtgatattgatgtgattgtacatagtaaacagtcacctgtagctccctgtgctgtgtatactctgggcccatcttccaccttgatttctcccactttggtcggcgtcacctagcgatatagatggccaaacgggccggcacggcccgacccgacacggcccgacaggcccggctagcgaagcgtgccgtgcccagatgggccggcgtgccgcggcccaggcacggcccgtgagcctgttagtcgtgccgggccggcccggtggcactatggcctatctgagtatattgtagaatttagcaaaaaatgtgtagtt

SEQ ID NO: 17271 - DNA, 2207 bp, Zea Mays
actcccaagttcaccttcctctgcctgtagatcttctagagtcccgtatacggtttcgtctttcgtgtcccacttccatggcggcggcggcgcagctgcacggatcggctgcggccacggtggcatatcgcgggactcgagcctactcagttccatcctcatgccggtggccgcagtctggttccccgaagctttcgatttctacaagtggagtcagtatgaagccatttggctttgctgctaaactttcaacaaaatgtgcaaatgagaatgctcgagttgaagaattagatttgaggtcagaccagatgaaggaattacaggtggaggagcaggttattccccagaagaggagtgctaaaatccatgacttctgccttgggatcccttttggtggtcttttattctctatggggcttctaggatacatcttctccagaagcaccataagtcttgtcttgggcattgcaccagggctagccactctgctacttggcactctcagtctgaagttctggaggagcggcagatccagcttcctgcttatcttggctcaggcagactccttccttggggcttctacgcgtcactgagcactgcaatgggttgtttctacgcctatgtgctacttgcgggaggaaatcccccgcctaagaagttggcagccattccaccgcagtaggaagagccgaagagggattcggtttaggatcagctaggttttcattaaagttcagtacaactgggccgacaaaggcccaactaagccgctcgaaccgcttcggcgcctcccacccctcggacagaccagccttcaaactagggtttactcctcccgctccgagaaagcaaacaagcgtcagctccgccggcggcctcgcgctctctcccccgccgcaccttctctacgccaggactgccaagatgaagctcgtcagattccttatgaagctaaacaatgagacggtcaccatcgagctcaagaacggcacggttgtccacggcaccatcaccggtgttgacataagcatgaacactcatctgaagacagtgaagcttacactgaaagggaagaaccctgtaacgctggaccacctcagcgtgcgaggaaacaacatccgctattacattcttcctgacagcttaaacttggagactttgctggtagaggaaacccctagggttaagcctaagaagccgactacaggaaagcctttggggcgtgggcgcggccgtggtcgtggacgtggtcggggacgggggccgccacgctgacaggtttcccctgctgtgggctctcttgcctgacaagttccctgtacgatgtaacctctttcccccgcacgctgtgtgaaagaaccgttgcattgttacccttctgatgaacgtggactgaaatatctcaatctcaagtggttcttgtgaaatcaaccatgtctatttggtctaccattcgtgtgtgtcttagggtttacactgtagttaactcgtgatgtctttcccctggcatacataaatggtgccgcagaacttcggatgttctaggttgtatgcttgtttcacatggggattgttgatctggagatatgccttgcagtcgtgtctgcctctatttgatcttttagctctgcttgaagctgaattcccgtcgaccggagatactgattttgctgaagatctacagcttgctctcatacgacgccctgttggcatgcattgtgttttctgatgtgctgacaaacatgctcggtaaaggatgttttgtttgccggagatactgatcatctggagctgccgattctttttgtctcaggatgttttgtttgcaacgtttatagagttggtcaaaatagacaagatcagcttacgaacagagatgaagatattagtggcgtgatattgatgtgattgtacatagtaaacagtcacctgtagctccctgtgctgtgtatactctgggcccatcttccaccttgatttctcccactttggtcggcgtcacctagcgatatagatggccaaacgggccggcacggcccgacccgacacggcccgacaggcccggctagcgaagcgtgccgtgcccagatgggccggcgtgccgcggcccaggcacggcccgtgagcctgttagtcgtgccgggccggcccggtggcactatggcctatctgagtatattgtagaatttagcaaaaaatgtgtagtt

SEQ ID NO: 17272 - DNA, 2242 bp, Zea Mays
actcccaagttcaccttcctctgcctgtagatcttctagagtcccgtatacggtttcgtctttcgtgtcccacttccatggcggcggcggcgcagctgcacggatcggctgcggccacggtggcatatcgcgggactcgagcctactcagttccatcctcatgccggtggccgcagtctggttccccgaagctttcgatttctacaagtggagtcagtatgaagccatttggctttgctgctaaactttcaacaaaatgtgcaaatgagaatgctcgagttgaagaattagatttgaggtcagaccagatgaaggaattacaggtggaggagcaggttattccccagaagaggagtgctaaaatccatgacttctgccttgggatcccttttggtggtcttttattctctatggggcttctaggatacatcttctccagaagcaccataagtcttgtcttgggcattgcaccagggctagccactctgctacttggcactctcagtctgaagttctggaggagcggcagatccagcttcctgcttatcttggctcagcaatttctgctttcctggcatggaaatactctcatgcttacttcttgacaaatagactccttccttggggcttctacgcgtcactgagcactgcaatgggttgtttctacgcctatgtgctacttgcgggaggaaatcccccgcctaagaagttggcagccattccaccgcagtaggaagagccgaagagggattcggtttaggatcagcttcagtacaactgggccgacaaaggcccaactaagccgctcgaaccgcttcggcgcctcccacccctcggacagaccagccttcaaactagggtttactcctcccgctccgagaaagcaaacaagcgtcagctccgccggcggcctcgcgctctctcccccgccgcaccttctctacgccaggactgccaagatgaagctcgtcagattccttatgaagctaaacaatgagacggtcaccatcgagctcaagaacggcacggttgtccacggcaccatcaccggtgttgacataagcatgaacactcatctgaagacagtgaagcttacactgaaagggaagaaccctgtaacgctggaccacctcagcgtgcgaggaaacaacatccgctattacattcttcctgacagcttaaacttggagactttgctggtagaggaaacccctagggttaagcctaagaagccgactacaggaaagcctttggggcgtgggcgcggccgtggtcgtggacgtggtcggggacgggggccgccacgctgacaggtttcccctgctgtgggctctcttgcctgacaagttccctgtacgatgtaacctctttcccccgcacgctgtgtgaaagaaccgttgcattgttacccttctgatgaacgtggactgaaatatctcaatctcaagtggttcttgtgaaatcaaccatgtctatttggtctaccattcgtgtgtgtcttagggtttacactgtagttaactcgtgatgtctttcccctggcatacataaatggtgccgcagaacttcggatgttctaggttgtatgcttgtttcacatggggattgttgatctggagatatgccttgcagtcgtgtctgcctctatttgatcttttagctctgcttgaagctgaattcccgtcgaccggagatactgattttgctgaagatctacagcttgctctcatacgacgccctgttggcatgcattgtgttttctgatgtgctgacaaacatgctcggtaaaggatgttttgtttgccggagatactgatcatctggagctgccgattctttttgtctcaggatgttttgtttgcaacgtttatagagttggtcaaaatagacaagatcagcttacgaacagagatgaagatattagtggcgtgatattgatgtgattgtacatagtaaacagtcacctgtagctccctgtgctgtgtatactctgggcccatcttccaccttgatttctcccactttggtcggcgtcacctagcgatatagatggccaaacgggccggcacggcccgacccgacacggcccgacaggcccggctagcgaagcgtgccgtgcccagatgggccggcgtgccgcggcccaggcacggcccgtgagcctgttagtcgtgccgggccggcccggtggcactatggcctatctgagtatattgtagaatttagcaaaaaatgtgtagtt

SEQ ID NO: 17273 - DNA, 2285 bp, Zea Mays
actcccaagttcaccttcctctgcctgtagatcttctagagtcccgtatacggtttcgtctttcgtgtcccacttccatggcggcggcggcgcagctgcacggatcggctgcggccacggtggcatatcgcgggactcgagcctactcagttccatcctcatgccggtggccgcagtctggttccccgaagctttcgatttctacaagtggagtcagtatgaagccatttggctttgctgctaaactttcaacaaaatgtgcaaatgagaatgctcgagttgaagaattagatttgaggtcagaccagatgaaggaattacaggtggaggagcaggttattccccagaagaggagtgctaaaatccatgacttctgccttgggatcccttttggtggtcttttattctctatggggcttctaggatacatcttctccagaagcaccataagtcttgtcttgggcattgcaccagggctagccactctgctacttggcactctcagtctgaagttctggaggagcggcagatccagcttcctgcttatcttggctcaggcagcaatttctgctttcctggcatggaaatactctcatgcttacttcttgacaaatagactccttccttggggcttctacgcgtcactgagcactgcaatgggttgtttctacgcctatgtgctacttgcgggaggaaatcccccgcctaagaagttggcagccattccaccgcagtaggaagagccgaagagggattcggtttaggatcagcgtgcgttgacccttcgctccatataggttttcattaaagttcagtacaactgggccgacaaaggcccaactaagccgctcgaaccgcttcggcgcctcccacccctcggacagaccagccttcaaactagggtttactcctcccgctccgagaaagcaaacaagcgtcagctccgccggcggcctcgcgctctctcccccgccgcaccttctctacgccaggactgccaagatgaagctcgtcagattccttatgaagctaaacaatgagacggtcaccatcgagctcaagaacggcacggttgtccacggcaccatcaccggtgttgacataagcatgaacactcatctgaagacagtgaagcttacactgaaagggaagaaccctgtaacgctggaccacctcagcgtgcgaggaaacaacatccgctattacattcttcctgacagcttaaacttggagactttgctggtagaggaaacccctagggttaagcctaagaagccgactacaggaaagcctttggggcgtgggcgcggccgtggtcgtggacgtggtcggggacgggggccgccacgctgacaggtttcccctgctgtgggctctcttgcctgacaagttccctgtacgatgtaacctctttcccccgcacgctgtgtgaaagaaccgttgcattgttacccttctgatgaacgtggactgaaatatctcaatctcaagtggttcttgtgaaatcaaccatgtctatttggtctaccattcgtgtgtgtcttagggtttacactgtagttaactcgtgatgtctttcccctggcatacataaatggtgccgcagaacttcggatgttctaggttgtatgcttgtttcacatggggattgttgatctggagatatgccttgcagtcgtgtctgcctctatttgatcttttagctctgcttgaagctgaattcccgtcgaccggagatactgattttgctgaagatctacagcttgctctcatacgacgccctgttggcatgcattgtgttttctgatgtgctgacaaacatgctcggtaaaggatgttttgtttgccggagatactgatcatctggagctgccgattctttttgtctcaggatgttttgtttgcaacgtttatagagttggtcaaaatagacaagatcagcttacgaacagagatgaagatattagtggcgtgatattgatgtgattgtacatagtaaacagtcacctgtagctccctgtgctgtgtatactctgggcccatcttccaccttgatttctcccactttggtcggcgtcacctagcgatatagatggccaaacgggccggcacggcccgacccgacacggcccgacaggcccggctagcgaagcgtgccgtgcccagatgggccggcgtgccgcggcccaggcacggcccgtgagcctgttagtcgtgccgggccggcccggtggcactatggcctatctgagtatattgtagaatttagcaaaaaatgtgtagtt

SEQ ID NO: 17274 - DNA, 2281 bp, Zea Mays
actcccaagttcaccttcctctgcctgtagatcttctagagtcccgtatacggtttcgtctttcgtgtcccacttccatggcggcggcggcgcagctgcacggatcggctgcggccacggtggcatatcgcgggactcgagcctactcagttccatcctcatgccggtggccgcagtctggttccccgaagctttcgatttctacaagtggagtcagtatgaagccatttggctttgctgctaaactttcaacaaaatgtgcaaatgagaatgctcgagttgaagaattagatttgaggtcagaccagatgaaggaattacaggtggaggagcaggttattccccagaagaggagtgctaaaatccatgacttctgccttgggatcccttttggtggtcttttattctctatggggcttctaggatacatcttctccagaagcaccataagtcttgtcttgggcattgcaccagggctagccactctgctacttggcactctcagtctgaagttctggaggagcggcagatccagcttcctgcttatcttggctcagcaatttctgctttcctggcatggaaatactctcatgcttacttcttgacaaatagactccttccttggggcttctacgcgtcactgagcactgcaatgggttgtttctacgcctatgtgctacttgcgggaggaaatcccccgcctaagaagttggcagccattccaccgcagtaggaagagccgaagagggattcggtttaggatcagcgtgcgttgacccttcgctccatataggttttcattaaagttcagtacaactgggccgacaaaggcccaactaagccgctcgaaccgcttcggcgcctcccacccctcggacagaccagccttcaaactagggtttactcctcccgctccgagaaagcaaacaagcgtcagctccgccggcggcctcgcgctctctcccccgccgcaccttctctacgccaggactgccaagatgaagctcgtcagattccttatgaagctaaacaatgagacggtcaccatcgagctcaagaacggcacggttgtccacggcaccatcaccggtgttgacataagcatgaacactcatctgaagacagtgaagcttacactgaaagggaagaaccctgtaacgctggaccacctcagcgtgcgaggaaacaacatccgctattacattcttcctgacagcttaaacttggagactttgctggtagaggaaacccctagggttaagcctaagaagccgactacaggaaagcctttggggcgtgggcgcggccgtggtcgtggacgtggtcggggacgggggccgccacgctgacaggtttcccctgctgtgggctctcttgcctgacaagttccctgtacgatgtaacctctttcccccgcacgctgtgtgaaagaaccgttgcattgttacccttctgatgaacgtggactgaaatatctcaatctcaagtggttcttgtgaaatcaaccatgtctatttggtctaccattcgtgtgtgtcttagggtttacactgtagttaactcgtgatgtctttcccctggcatacataaatggtgccgcagaacttcggatgttctaggttgtatgcttgtttcacatggggattgttgatctggagatatgccttgcagtcgtgtctgcctctatttgatcttttagctctgcttgaagctgaattcccgtcgaccggagatactgattttgctgaagatctacagcttgctctcatacgacgccctgttggcatgcattgtgttttctgatgtgctgacaaacatgctcggtaaaggatgttttgtttgccggagatactgatcatctggagctgccgattctttttgtctcaggatgttttgtttgcaacgtttatagagttggtcaaaatagacaagatcagcttacgaacagagatgaagatattagtggcgtgatattgatgtgattgtacatagtaaacagtcacctgtagctccctgtgctgtgtatactctgggcccatcttccaccttgatttctcccactttggtcggcgtcacctagcgatatagatggccaaacgggccggcacggcccgacccgacacggcccgacaggcccggctagcgaagcgtgccgtgcccagatgggccggcgtgccgcggcccaggcacggcccgtgagcctgttagtcgtgccgggccggcccggtggcactatggcctatctgagtatattgtagaatttagcaaaaaatgtgtagtt

SEQ ID NO: 17275 - DNA, 2404 bp, Zea Mays
gaatgatttggcaacagcgcctgcatacatttcgcatacagaggagccactcacaagctctcaaacagactctacagatacctacaccgtccttatcaaggaggcaggaggaggggaaaaacattacgaaacgctaaagccactttcttctcctgccaacacaagccgttttttcctccccaagtgatctagccagccacggagccaccactcgccaggtgcttcaaatagtcgccccggacaggcaggcgcacgcaacgcaactagtctccttcaccgtccgtccattcctccgatccgcaggaggattaggaacttaggatcggggaccggcggagcccgacgaccttctcggtccacccgcccggcgatcgaaccatggcgctcggcgagggcggggatcacggcgccgccctgcccctcatcgcggaccaggcgaaacatgccgccgccggtggcatcgtccgaagcgggagcatgtggacggcagcggcacacgtgatcacggcggtgatcgggtccggcgtgctgtcgctggcgtggagcatcgcgcagctggggtgggtggccgggccggccgccatgctcgtcttcgcggccgtgacggcgctccagtccacgctcttcgccgactgctaccggtcgccggaccccgagcacggccctcaccgcaaccgcacctacgccaaagccgtggaccgcaacctaggtagcaacagctcgtgggtgtgcatgcttctgcagcacacggccctgttcggctatggcatcgcctacaccatcacggcctccatcagctgcaggcaagaagcatacctgggcttgcggctcgctgcagtacgtgagcctgtacggctgcggcgtcgcctaccatcaccaccgccactagcataaggtagccgctgctggccggtaacaaaatttcccagtctctctctctctctctcaaaacttcctcacagctcaagctgcctgcagtcgtgtgcttccttccctctctttttagcgagcagggcgctgacgatggttgcttctgttgtccttctgccggttaaatttctctgaatatttttgttcttaactgcgcgtgctttgcttgtgtgttccatacgtgtcgggctgctctgctgttggatgtcgcagggcgatcctgaaggcgaactgctaccacgagcatgggcatgacgcgcactgcgactacgatggcaactactacatgctcatcttcggcggcgtccagctcctcctctccttcatacctgacttccacgacatggcgtggctctccgtcgtcgccgcggccatgtcgttctcgtacgccttcatcggcctcggcctcggcctcgcaagaaccattgctaacgggacgatcaaaggaagcataacaggtgttcggatgaggacgcctatgcagaaggtttggcgcgtctcgcaggccatcggcgacattgccttcgcgtacccctactccttgatcctcctggaaatacaggacaccctgaagtcaccgccggccgagaacaagacgatgaagagggcgtcgatgatctcgatcctcgtcacgacattcttctacctctgctgcggctgcttgggctacgccgccttcggcagcgacgcgccgggcaacctccttaccggcttcggcttgtacggtccgtactggctcatcgacttcgccaacgcgtgcatcatcctccacctgctgggcgggtaccagccagccgatattccagttcgcggagcggctcttggcggagcggttcccggacagcgggttcgtgaacggcggctcctacaccgtccggttcgcgtgcctgcgggcgtgccgggtgaacccgctgcgcgtgtgcctccggacgctgtacgtggcctccacgacggcggtggccgtggcgttaccctacttcaacgaggtgctggcgctgctgggcgcgctcagcttctggccgctggccatctacttccccgtggagatgtacttcatccagcggaacgtgcgccggtggtccgcccgctgggtcgtcctgcagaccttcagcgtcgtctgcctgctcgtcagcgccttcgcgctcgtcggctccatcgaggggctaatcagcaagaagctaggctaggctaggctagtccgatccagtggaacaccctatctgcaggtctgtcagagagtggcagcgggctcggttattttcacagtgttgccttcctcctgcatcgggttgtaagttgtaacatatatgtcgtattgatactggcgagttcagatgttcagaagaagtagaacgcgtgtgacgattctgtgttgctgaatgccgcctatgtagtttcagttccagaatttgagggtttccatatctgcagcagtttcctcaaaatatttctcctatattttactatacaggca

SEQ ID NO: 17276 - DNA, 1927 bp, Zea Mays
gaatgatttggcaacagcgcctgcatacatttcgcatacagaggagccactcacaagctctcaaacagactctacagatacctacaccgtccttatcaaggaggcaggaggaggggaaaaacattacgaaacgctaaagccactttcttctcctgccaacacaagccgttttttcctccccaagtgatctagccagccacggagccaccactcgccaggtgcttcaaatagtcgccccggacaggcaggcgcacgcaacgcaactagtctccttcaccgtccgtccattcctccgatccgcaggaggattaggaacttaggatcggggaccggcggagcccgacgaccttctcggtccacccgcccggcgatcgaaccatggcgctcggcgagggcggggatcacggcgccgccctgcccctcatcgcggaccaggcgaaacatgccgccgccggtggcatcgtccgaagcggtagcaacagctcgtgggtgtgcatgcttctgcagcacacggccctgttcggctatggcatcgcctacaccatcacggcctccatcagctgcaggcaagaagcatacctgggcttgcggctcgctgcagtacgtgagcctgtacggctgcggcgtcgcctaccatcaccaccgccactagcataagggcgatcctgaaggcgaactgctaccacgagcatgggcatgacgcgcactgcgactacgatggcaactactacatgctcatcttcggcggcgtccagctcctcctctccttcatacctgacttccacgacatggcgtggctctccgtcgtcgccgcggccatgtcgttctcgtacgccttcatcggcctcggcctcggcctcgcaagaaccattgctaacgggacgatcaaaggaagcataacaggtgttcggatgaggacgcctatgcagaaggtttggcgcgtctcgcaggccatcggcgacattgccttcgcgtacccctactccttgatcctcctggaaatacaggacaccctgaagtcaccgccggccgagaacaagacgatgaagagggcgtcgatgatctcgatcctcgtcacgacattcttctacctctgctgcggctgcttgggctacgccgccttcggcagcgacgcgccgggcaacctccttaccggcttcggcttgtacggtccgtactggctcatcgacttcgccaacgcgtgcatcatcctccacctgctgggcgggtaccaggtgtacagccagccgatattccagttcgcggagcggctcttggcggagcggttcccggacagcgggttcgtgaacggcggctcctacaccgtccggttcgcgtgcctgcgggcgtgccgggtgaacccgctgcgcgtgtgcctccggacgctgtacgtggcctccacgacggcggtggccgtggcgttaccctacttcaacgaggtgctggcgctgctgggcgcgctcagcttctggccgctggccatctacttccccgtggagatgtacttcatccagcggaacgtgcgccggtggtccgcccgctgggtcgtcctgcagaccttcagcgtcgtctgcctgctcgtcagcgccttcgcgctcgtcggctccatcgaggggctaatcagcaagaagctaggctaggctaggctagtccgatccagtggaacaccctatctgcaggtctgtcagagagtggcagcgggctcggttattttcacagtgttgccttcctcctgcatcgggttgtaagttgtaacatatatgtcgtattgatactggcgagttcagatgttcagaagaagtagaacgcgtgtgacgattctgtgttgctgaatgccgcctatgtagtttcagttccagaatttgagggtttccatatctgcagcagtttcctcaaaatatttctcctatattttactatacaggca

SEQ ID NO: 17277 - DNA, 2412 bp, Zea Mays
gaatgatttggcaacagcgcctgcatacatttcgcatacagaggagccactcacaagctctcaaacagactctacagatacctacaccgtccttatcaaggaggcaggaggaggggaaaaacattacgaaacgctaaagccactttcttctcctgccaacacaagccgttttttcctccccaagtgatctagccagccacggagccaccactcgccaggtgcttcaaatagtcgccccggacaggcaggcgcacgcaacgcaactagtctccttcaccgtccgtccattcctccgatccgcaggaggattaggaacttaggatcggggaccggcggagcccgacgaccttctcggtccacccgcccggcgatcgaaccatggcgctcggcgagggcggggatcacggcgccgccctgcccctcatcgcggaccaggcgaaacatgccgccgccggtggcatcgtccgaagcgggagcatgtggacggcagcggcacacgtgatcacggcggtgatcgggtccggcgtgctgtcgctggcgtggagcatcgcgcagctggggtgggtggccgggccggccgccatgctcgtcttcgcggccgtgacggcgctccagtccacgctcttcgccgactgctaccggtcgccggaccccgagcacggccctcaccgcaaccgcacctacgccaaagccgtggaccgcaacctaggtagcaacagctcgtgggtgtgcatgcttctgcagcacacggccctgttcggctatggcatcgcctacaccatcacggcctccatcagctgcaggcaagaagcatacctgggcttgcggctcgctgcagtacgtgagcctgtacggctgcggcgtcgcctaccatcaccaccgccactagcataaggtagccgctgctggccggtaacaaaatttcccagtctctctctctctctctcaaaacttcctcacagctcaagctgcctgcagtcgtgtgcttccttccctctctttttagcgagcagggcgctgacgatggttgcttctgttgtccttctgccggttaaatttctctgaatatttttgttcttaactgcgcgtgctttgcttgtgtgttccatacgtgtcgggctgctctgctgttggatgtcgcagggcgatcctgaaggcgaactgctaccacgagcatgggcatgacgcgcactgcgactacgatggcaactactacatgctcatcttcggcggcgtccagctcctcctctccttcatacctgacttccacgacatggcgtggctctccgtcgtcgccgcggccatgtcgttctcgtacgccttcatcggcctcggcctcggcctcgcaagaaccattgctaacgggacgatcaaaggaagcataacaggtgttcggatgaggacgcctatgcagaaggtttggcgcgtctcgcaggccatcggcgacattgccttcgcgtacccctactccttgatcctcctggaaatacaggacaccctgaagtcaccgccggccgagaacaagacgatgaagagggcgtcgatgatctcgatcctcgtcacgacattcttctacctctgctgcggctgcttgggctacgccgccttcggcagcgacgcgccgggcaacctccttaccggcttcggcttgtacggtccgtactggctcatcgacttcgccaacgcgtgcatcatcctccacctgctgggcgggtaccaggtgtacagccagccgatattccagttcgcggagcggctcttggcggagcggttcccggacagcgggttcgtgaacggcggctcctacaccgtccggttcgcgtgcctgcgggcgtgccgggtgaacccgctgcgcgtgtgcctccggacgctgtacgtggcctccacgacggcggtggccgtggcgttaccctacttcaacgaggtgctggcgctgctgggcgcgctcagcttctggccgctggccatctacttccccgtggagatgtacttcatccagcggaacgtgcgccggtggtccgcccgctgggtcgtcctgcagaccttcagcgtcgtctgcctgctcgtcagcgccttcgcgctcgtcggctccatcgaggggctaatcagcaagaagctaggctaggctaggctagtccgatccagtggaacaccctatctgcaggtctgtcagagagtggcagcgggctcggttattttcacagtgttgccttcctcctgcatcgggttgtaagttgtaacatatatgtcgtattgatactggcgagttcagatgttcagaagaagtagaacgcgtgtgacgattctgtgttgctgaatgccgcctatgtagtttcagttccagaatttgagggtttccatatctgcagcagtttcctcaaaatatttctcctatattttactatacaggca

SEQ ID NO: 17278 - DNA, 1835 bp, Zea Mays
gaatgatttggcaacagcgcctgcatacatttcgcatacagaggagccactcacaagctctcaaacagactctacagatacctacaccgtccttatcaaggaggcaggaggaggggaaaaacattacgaaacgctaaagccactttcttctcctgccaacacaagccgttttttcctccccaagtgatctagccagccacggagccaccactcgccaggtgcttcaaatagtcgccccggacaggcaggcgcacgcaacgcaactagtctccttcaccgtccgtccattcctccgatccgcaggaggattaggaacttaggatcggggaccggcggagcccgacgaccttctcggtccacccgcccggcgatcgaaccatggcgctcggcgagggcggggatcacggcgccgccctgcccctcatcgcggaccaggcgaaacatgccgccgccggtggcatcgtccgaagcggtagcaacagctcgtgggtgtgcatgcttctgcagcacacggccctgttcggctatggcatcgcctacaccatcacggcctccatcagctgcagggcgatcctgaaggcgaactgctaccacgagcatgggcatgacgcgcactgcgactacgatggcaactactacatgctcatcttcggcggcgtccagctcctcctctccttcatacctgacttccacgacatggcgtggctctccgtcgtcgccgcggccatgtcgttctcgtacgccttcatcggcctcggcctcggcctcgcaagaaccattgctaacgggacgatcaaaggaagcataacaggtgttcggatgaggacgcctatgcagaaggtttggcgcgtctcgcaggccatcggcgacattgccttcgcgtacccctactccttgatcctcctggaaatacaggacaccctgaagtcaccgccggccgagaacaagacgatgaagagggcgtcgatgatctcgatcctcgtcacgacattcttctacctctgctgcggctgcttgggctacgccgccttcggcagcgacgcgccgggcaacctccttaccggcttcggcttgtacggtccgtactggctcatcgacttcgccaacgcgtgcatcatcctccacctgctgggcgggtaccaggtgtacagccagccgatattccagttcgcggagcggctcttggcggagcggttcccggacagcgggttcgtgaacggcggctcctacaccgtccggttcgcgtgcctgcgggcgtgccgggtgaacccgctgcgcgtgtgcctccggacgctgtacgtggcctccacgacggcggtggccgtggcgttaccctacttcaacgaggtgctggcgctgctgggcgcgctcagcttctggccgctggccatctacttccccgtggagatgtacttcatccagcggaacgtgcgccggtggtccgcccgctgggtcgtcctgcagaccttcagcgtcgtctgcctgctcgtcagcgccttcgcgctcgtcggctccatcgaggggctaatcagcaagaagctaggctaggctaggctagtccgatccagtggaacaccctatctgcaggtctgtcagagagtggcagcgggctcggttattttcacagtgttgccttcctcctgcatcgggttgtaagttgtaacatatatgtcgtattgatactggcgagttcagatgttcagaagaagtagaacgcgtgtgacgattctgtgttgctgaatgccgcctatgtagtttcagttccagaatttgagggtttccatatctgcagcagtttcctcaaaatatttctcctatattttactatacaggca

SEQ ID NO: 17279 - DNA, 2164 bp, Zea Mays
gaatgatttggcaacagcgcctgcatacatttcgcatacagaggagccactcacaagctctcaaacagactctacagatacctacaccgtccttatcaaggaggcaggaggaggggaaaaacattacgaaacgctaaagccactttcttctcctgccaacacaagccgttttttcctccccaagtgatctagccagccacggagccaccactcgccaggtgcttcaaatagtcgccccggacaggcaggcgcacgcaacgcaactagtctccttcaccgtccgtccattcctccgatccgcaggaggattaggaacttaggatcggggaccggcggagcccgacgaccttctcggtccacccgcccggcgatcgaaccatggcgctcggcgagggcggggatcacggcgccgccctgcccctcatcgcggaccaggcgaaacatgccgccgccggtggcatcgtccgaagcgggagcatgtggacggcagcggcacacgtgatcacggcggtgatcgggtccggcgtgctgtcgctggcgtggagcatcgcgcagctggggtgggtggccgggccggccgccatgctcgtcttcgcggccgtgacggcgctccagtccacgctcttcgccgactgctaccggtcgccggaccccgagcacggccctcaccgcaaccgcacctacgccaaagccgtggaccgcaacctaggtagcaacagctcgtgggtgtgcatgcttctgcagcacacggccctgttcggctatggcatcgcctacaccatcacggcctccatcagctgcaggcaagaagcatacctgggcttgcggctcgctgcagtacgtgagcctgtacggctgcggcgtcgcctaccatcaccaccgccactagcataagggcgatcctgaaggcgaactgctaccacgagcatgggcatgacgcgcactgcgactacgatggcaactactacatgctcatcttcggcggcgtccagctcctcctctccttcatacctgacttccacgacatggcgtggctctccgtcgtcgccgcggccatgtcgttctcgtacgccttcatcggcctcggcctcggcctcgcaagaaccattgctaacgggacgatcaaaggaagcataacaggtgttcggatgaggacgcctatgcagaaggtttggcgcgtctcgcaggccatcggcgacattgccttcgcgtacccctactccttgatcctcctggaaatacaggacaccctgaagtcaccgccggccgagaacaagacgatgaagagggcgtcgatgatctcgatcctcgtcacgacattcttctacctctgctgcggctgcttgggctacgccgccttcggcagcgacgcgccgggcaacctccttaccggcttcggcttgtacggtccgtactggctcatcgacttcgccaacgcgtgcatcatcctccacctgctgggcgggtaccaggtgtacagccagccgatattccagttcgcggagcggctcttggcggagcggttcccggacagcgggttcgtgaacggcggctcctacaccgtccggttcgcgtgcctgcgggcgtgccgggtgaacccgctgcgcgtgtgcctccggacgctgtacgtggcctccacgacggcggtggccgtggcgttaccctacttcaacgaggtgctggcgctgctgggcgcgctcagcttctggccgctggccatctacttccccgtggagatgtacttcatccagcggaacgtgcgccggtggtccgcccgctgggtcgtcctgcagaccttcagcgtcgtctgcctgctcgtcagcgccttcgcgctcgtcggctccatcgaggggctaatcagcaagaagctaggctaggctaggctagtccgatccagtggaacaccctatctgcaggtctgtcagagagtggcagcgggctcggttattttcacagtgttgccttcctcctgcatcgggttgtaagttgtaacatatatgtcgtattgatactggcgagttcagatgttcagaagaagtagaacgcgtgtgacgattctgtgttgctgaatgccgcctatgtagtttcagttccagaatttgagggtttccatatctgcagcagtttcctcaaaatatttctcctatattttactatacaggca

SEQ ID NO: 17280 - DNA, 2181 bp, Zea Mays
gaatgatttggcaacagcgcctgcatacatttcgcatacagaggagccactcacaagctctcaaacagactctacagatacctacaccgtccttatcaaggaggcaggaggaggggaaaaacattacgaaacgctaaagccactttcttctcctgccaacacaagccgttttttcctccccaagtgatctagccagccacggagccaccactcgccaggtgcttcaaatagtcgccccggacaggcaggcgcacgcaacgcaactagtctccttcaccgtccgtccattcctccgatccgcaggaggattaggaacttaggatcggggaccggcggagcccgacgaccttctcggtccacccgcccggcgatcgaaccatggcgctcggcgagggcggggatcacggcgccgccctgcccctcatcgcggaccaggcgaaacatgccgccgccggtggcatcgtccgaagcgggagcatgtggacggcagcggcacacgtgatcacggcggtgatcgggtccggcgtgctgtcgctggcgtggagcatcgcgcagctggggtgggtggccgggccggccgccatgctcgtcttcgcggccgtgacggcgctccagtccacgctcttcgccgactgctaccggtcgccggaccccgagcacggccctcaccgcaaccgcacctacgccaaagccgtggaccgcaacctaggtagcaacagctcgtgggtgtgcatgcttctgcagcacacggccctgttcggctatggcatcgcctacaccatcacggcctccatcagctgcaggcaagaagcatacctgggcttgcggctcgctgcagtacgtgagcctgtacggctgcggcgtcgcctaccatcaccaccgccactagcataaggtagccgctgctggccgggcgatcctgaaggcgaactgctaccacgagcatgggcatgacgcgcactgcgactacgatggcaactactacatgctcatcttcggcggcgtccagctcctcctctccttcatacctgacttccacgacatggcgtggctctccgtcgtcgccgcggccatgtcgttctcgtacgccttcatcggcctcggcctcggcctcgcaagaaccattgctaacgggacgatcaaaggaagcataacaggtgttcggatgaggacgcctatgcagaaggtttggcgcgtctcgcaggccatcggcgacattgccttcgcgtacccctactccttgatcctcctggaaatacaggacaccctgaagtcaccgccggccgagaacaagacgatgaagagggcgtcgatgatctcgatcctcgtcacgacattcttctacctctgctgcggctgcttgggctacgccgccttcggcagcgacgcgccgggcaacctccttaccggcttcggcttgtacggtccgtactggctcatcgacttcgccaacgcgtgcatcatcctccacctgctgggcgggtaccaggtgtacagccagccgatattccagttcgcggagcggctcttggcggagcggttcccggacagcgggttcgtgaacggcggctcctacaccgtccggttcgcgtgcctgcgggcgtgccgggtgaacccgctgcgcgtgtgcctccggacgctgtacgtggcctccacgacggcggtggccgtggcgttaccctacttcaacgaggtgctggcgctgctgggcgcgctcagcttctggccgctggccatctacttccccgtggagatgtacttcatccagcggaacgtgcgccggtggtccgcccgctgggtcgtcctgcagaccttcagcgtcgtctgcctgctcgtcagcgccttcgcgctcgtcggctccatcgaggggctaatcagcaagaagctaggctaggctaggctagtccgatccagtggaacaccctatctgcaggtctgtcagagagtggcagcgggctcggttattttcacagtgttgccttcctcctgcatcgggttgtaagttgtaacatatatgtcgtattgatactggcgagttcagatgttcagaagaagtagaacgcgtgtgacgattctgtgttgctgaatgccgcctatgtagtttcagttccagaatttgagggtttccatatctgcagcagtttcctcaaaatatttctcctatattttactatacaggca

SEQ ID NO: 17281 - DNA, 1337 bp, Zea Mays
ctgaactcagttctcgtcatcttcttcgttttccctttcctctcctccacgaaacaacaagctactacctctctctctacctgttatctctctagaagtatcagtgacgctaacactccttatttgagttgttacatatagatccctacaacaccaattatagttggggaaggtgaacctcctccctcttgggatccggtaccaactccaaaagttctacaatgagtatgtcattgcgagatcatattagaaagaggagggaagaagaagatgatgacatgattgtttattttccctgtcttatatctgatgggttcaactagaagtgggggacaaaagaagaaacaccatacatcagatgagacatgcgaggttaaggttcgaagactccttgagggacatgtcaagaactgtcaagttacatttaggatggaaccacacatctttagagagctggcaacttatcttagaaggagaagaatcatcgttgatacaaggatcacggtcgaggagaagttggggttcttcttatacatgctaagtcacaatgcctcatatcaagatcttcaagtgtactttgggcatagtaatgataccttccatcatcacatcaaccacttctttacgaaggtcattcctatcctctctcgtcgtttcattcaaccttctgatcctagtcaagtgcatcaaaaaattcaagataatcctatattctatccattcttcaagaattgtctcggtgctattgatggaactcatattcctatttccatatctcctaagaaaatatgatgggcaaatacctagaaatgaggagcaagcaggtagaatatgaatctacaagagaaaaggaagcaagagaaaaggaggcaagagaaatggaggtaactcaaagtgatgatttctccatcaaaaggtgcatatcagttatgaacacaatagaagaagtgaccaaattggagaaggcaaaagcatattcaatcttcgccaagagcaaagagaatagagaaactttcatatgtgcttgtgaagcagatcaaaaatcagctttgatttggctaagaaatgagatgccctagcagctttgatatggatattatttggaagtcaaacatgtgttaatgtgagttgctgtcaaacaagtgaattgctaatgtgtattgtcgagtattgggaagtcaaactttgatgtcttagcagctttgaattgctgttcttagcagctatgttatgtcttagcaactttgttatgtgtattgtcaagtattgggaagacaactccgtatgtgtgaccattgttattattgtatttgcttatatagctgattacttatata

SEQ ID NO: 17282 - DNA, 1513 bp, Zea Mays
tctctcttcttccttgacgaacaccctttccttcctcggcttcgtttcgtgctttcctcaacctccccacttccgtggcgcgcagtttgtccgctgcttcacggaaattcctacgggacctgtatatattcgctgcgcaggcggccccgcctccggccgttgttgtctccgctcaccccgccagtatcccggcgtcccaattccaggaactttcgtcgcgtcaggtgatgcttttagcaactacaagcatagaacaatgttgatgcactatgatgtggatagaagtgaggaccggcaaagtgaggaggttcagtcagcatacagaagggacagtgacattggtgaggaaatgataataagtagcgaagagcaaaatgatgaaaatgaatggagctgggtgaatcaagatagagatggtggtcctcttgctgaatcggtttcttcacttcatatgacacagcaagtccttgaaaatggcactgtatttttccggtacttcgaaagttggaatttcatggtgttccaggtttgcttgctgaaagatacaaaaattatcagaacttggcaaagaacttgaggcggaggaatccacttctggtaacaaagaccaagatgtgatcgttttgccgtatgcagaggtcgatatgttgaaattgaatgagaagatggagcatcttgaacaaaaagtgaaagaagtgtcaaacaccatcagagagaaagacttaaggctttccaagcttcaaatactgatcggtactgcagatagggcaacggtggaggaggcagcagctagcatcgaccagctagagacagagttcgagcaccatctccaggagatactggaagctgaaatccagtatctggtgatgatgaaagcgaggcagaactggcaggtccgggcagaagaccagatggccttggaggagcacagggcgtctgctgccggggacaacaccaggatgctgctcaagctacgagagacggagagcaagatcgtgatgttgaaagagcaggtggacaagctggaggtccgggagaaggatctctaccggacgaccgaggtcctgaagatgcagagcaggaccttcaaagtgtccctctttggcctcgtccagctgataatgatgtgcctgtccctgaagatgttcttcgcgcaggtctcggcgccgtttgacgaggttgtgccgacatgatgatgccctgcctcgtttggatgcattcgtatccacatggattgacgtgctcagttggtgttctcttccgtctgtaacttcgttcgccgggtttgtgatgtcttaacgtgtatcttactgtagctgtaggcctgtagccagcacccagtaggtagtatagtttcttagtcgtacatgcacttgtgatgatatacgtcagaagctacgcgtgttctgtaaaaactaataatgtaggtctgtgcataaattgggttcgattgacaactaggctagctgacggtctgcagctaccaaatcatggattaattaggcaaactaaa

SEQ ID NO: 17283 - DNA, 4481 bp, Zea Mays
gtcttcttcctgctgttccctttctgcgaatcctttgcaagagttgcatgatccgtgtagacttccccttaatctgctccaagactagcccgttcaccaccttgccccgggatgatattttatgtgcttttgtgctacttcgagggtgcctgatgagaattgagatagtgggcggccaaggaagcgaagtttctcgcactccacctgttgaatttaccaacttggtatgctggagtgtaaggataagagcagacccaattgcttcacagctcttgggttcttagtgccgactgtagcagcagcagatctggggcgagcagcgaaggcgttcatcagatgttatccagtgagcagccttcaggcccctcatgttccttcaagtctactggcccgggtgtgagcactgatccggcaacctccgtggccgaggggccgccgagccaggatcccagagatctggtccaaccttatcccaagttctccataagagattatgtgtttgcttcaagaagcaaaggcatcaagagaagctggcctttccatccacattcattgcagctttgcctagagcgcggtgtgaaggatccattgcctccatttgagtctcccgatttgatccggtcacagccattaaatatttccactgactttgagcaatctgctgcttgcttagaactcaatagtgttggtctggtgaagaatagagatgctagttccttaaacgagtatacaggcaatatcaacttccagtcatgccaaccagtagatgagtcacttggacctttgccatacacatcgccagaggatgggaaatctggtatcaaccaagtgggaagtacaaatgaatcagatcatcctgatgaggttataccaatagatctacaagataatagctgtacaaaagcaagtcagcaaattgaggttgatgtgcccttgcggcggttgagaaatcttgacttatcatgcgagccatctgaaaagaagtgcaaatttgtagtcaagttaggtgccacgacggatattcggcgagcagaggatatagcatctaactctagctcagtttcagatccgatggcttcaaagacttgtcctgtttgcaaagtatttgcttcgacttcaaacaccacattgaatgcccacatagatcagtgcctttctgcagagtctaatactgagcttgttgaaacggtccttgtgaaacctaaagtgaagccaaggaagaagcgattgatggtggacatatacaagactgctcttccatgcacacttgaggatcttgatcagaggaatggcactaattgggcagttgagttgtctatgtctccagtgagcagagaggtttgcactgagaaccgaagcccagaaatggtatcatttgacagaagagatgatgaaagagaaggagatgtctatgttgattctaacggcataaaaattagaattttgtccaagtgtaatgatgtacctttggtgttgagggatgaccttggttcgaggaaagttgcgaagcatggaactggaaaaggtatactgatgagcaaaaagatgctgaagtcaaagcttttgaagaataagaagctcaagatgcatggaaagaagtacaacaagacaagccctttgaactcccaggttcaagcatatccacatgatgatattaacgaggaaacctccgaggaggagtggcatgcgcggaatccttttgaaagcaccagcaattgttgttccaggactatgcagcagtgggtgtgctccaaacgctcagatatcgccaagagtttaagcagaaaccatagtggtaaagcatttgataaagtgatacctggagcacagaaatcggataggaacaacatgcttggctttaatgattctcaagttccagaaagtcctgctggggcgttttcttcggagtcaccagaatacatggccacaacttcagaagccattggtgttgagcagagcaatggtccttcaaaagtgcttagatcgattcctacatggtcttcaaaaactcaccgtcttcagagcagtgtcatgccaaaaacacctagatcagctgctgctcttgcaaagagaaaaattaaggagattgggaggagagaagctaccaaattagataattacaatatagtgaggaatcccacttcagtgaaaagatctgaaactaggactctttccttcactgcagggccaagcaatggatcaaacaggttagcatctacctcaaagaagatccggaagcatcgatctctgttgaggaccggcaagcgtgcattttcaccttttagtactagagtagttcatggttttggtgaagagcgtgaacttgataccagacatgtaaataagaaattccggattactagtaatgaggttcccaagaagtttttgaagcatactgaagaggatactgcagataatgacttctctcttgcaagtgacatgacagtatcaggacaacagaatgatcaatatgatgttgcacaggaaacagagggtacacaaatggattgtgaaggtgaagatgctgaaactgatgtgccatatgattctgtatccagaagtgatcctgctgactgttgcaaccaaataagtgatgtttctctgagtcctgaaaataacagaacaacagatgatgatgttttagttgaaggctatagtgtagctgtggaggatccaaactccagtgagaaattagcacatgggcatgaatccaactgtgctaccaataatgaaatggatgaatggcagatggatccgacttcaacaaaggaatctagtccctgcttagttagtaacagggacatgggtcctggaggtcctcaggataactcatcaataacatcaaatggagaaaactttaatcaagagcatggtctgccactcggacaggactcactagattctcctgtatcaactgcctcaactatgtcccctccagctgctttgaaggattcaaggattaacgatgaagaacctggcccatctactggtagaactgttgaagagcaaatcactgggtgcttgaatcaagaagccaagtcaatacctatggccagagaaggtgaacttcccaaagagaagccttttcgatgttcttgccaggagaacatttccagagagtctcatcaaagtgttgttgccagaccaacgctgaattttactggaaagcaggttccgcaattgcacattggttcgagggcatcatcatctttcagcatgtaccaaagaaccagcgcaaagcccaacccctgcttagattcacatgaacatctttcagcggctaaggttgcagcggaatctgctgtcagcctcccttcttactcaacagattgcataagcccctcattacaaactcagcttccttcgccatcaaatcctatcttgaggctgatgggtaaggatttgatggtgatgaacaacgaagagagtgtgcatcctcaagcaccaagttcagactacatcttgagagggaattacgaggcacctgttggttttatgcctccaagctaccaacatctcggtaattctggatttatcagcatgccaccaaccgcagccagtcaccagattcctctaccaagtgttcaagctagcggccttgttgctcctccgttgcacagcgtttccatgatgcaacctgaacatcattcccagcagaagtcctacagaaatattatgcctgccatgcatcatccaacctacatgatgaaagaagtgattgtgatcaaggactctcctgagcgtagtagaactgagccacaagctagcatgcttttcccccctgctccacctcccgcactctcgataccaaacaatacgccaccacgtccattttactgccttccaccgcaaatcccaatcttgccaagggagagggctgctggatccatgcctgtgtacgcaaactttggcgcattggctggtgtcagtccatcaagtcaagaaagccaaacgggagtaaccaatccttacatgccgaatccgttcttcgtccagtcccgaactggttacatgaaccacccgccagtgtactactcacagaatctggggtgatgatttctcagtagctcaaatgaccagaactccatttaacttgccggtcgtcgctgtcgaagtttgtgggggatgagagtttcgtgatgggtcaaaaacatgctgagatcaatgaacctgcatgagatgtgtctgactttcatgaggattttcacataggttgctttagatttttccccctttctttctcccttaaagctacagcatgtttgccgtcaaaagtatcttaattactctctgcaaagctgcagtagtaaattacagtgtgcaattcccaatagctctgcaaaggaatatatctcagtatttatcgaaaaagctggcatttgatattcccagttgcatgtttatagtctgatgtctgttctttttacacactgttctgccggtgtttgctgcctcagcagtgttaactcgtgatagttaag

SEQ ID NO: 17284 - DNA, 4394 bp, Zea Mays
cttgcctcgcttcccctcccccgtctcctgttctcttctcccttctccgtctgcttcagcccccagaaatcgaagccaccaccaccatagagctccgagcccctcgccctcctccccgcctgttcgctgcgtggatctacaggcaggatgctcactcccgcgcgcgcgggcgccgctcggtgagcggctgtgaagaaaaggtgcctgatgagaattgagatagtgggcggccaaggaagcgaagtttctcgcactccacctgttgaatttaccaacttggtatgctggagtgtaaggataagagcagacccaattgcttcacagctcttgggttcttagtgccgactgtagcagcagcagatctggggcgagcagcgaaggcgttcatcagatgttatccaagattatgtgtttgcttcaagaagcaaaggcatcaagagaagctggcctttccatccacattcattgcagctttgcctagagcgcggtgtgaaggatccattgcctccatttgagtctcccgatttgatccggtcacagccattaaatatttccactgactttgagcaatctgctgcttgcttagaactcaatagtgttggtctggtgaagaatagagatgctagttccttaaacgagtatacaggcaatatcaacttccagtcatgccaaccagtagatgagtcacttggacctttgccatacacatcgccagaggatgggaaatctggtatcaaccaagtgggaagtacaaatgaatcagatcatcctgatgaggttataccaatagatctacaagataatagctgtacaaaagcaagtcagcaaattgaggttgatgtgcccttgcggcggttgagaaatcttgacttatcatgcgagccatctgaaaagaagtgcaaatttgtagtcaagttaggtgccacgacggatattcggcgagcagaggatatagcatctaactctagctcagtttcagatccgatggcttcaaagacttgtcctgtttgcaaagtatttgcttcgacttcaaacaccacattgaatgcccacatagatcagtgcctttctgcagagtctaatactgagcttgttgaaacggtccttgtgaaacctaaagtgaagccaaggaagaagcgattgatggtggacatatacaagactgctcttccatgcacacttgaggatcttgatcagaggaatggcactaattgggcagttgagttgtctatgtctccagtgagcagagaggtttgcactgagaaccgaagcccagaaatggtatcatttgacagaagagatgatgaaagagaaggagatgtctatgttgattctaacggcataaaaattagaattttgtccaagtgtaatgatgtacctttggtgttgagggatgaccttggttcgaggaaagttgcgaagcatggaactggaaaaggtatactgatgagcaaaaagatgctgaagtcaaagcttttgaagaataagaagctcaagatgcatggaaagaagtacaacaagacaagccctttgaactcccaggttcaagcatatccacatgatgatattaacgaggaaacctccgaggaggagtggcatgcgcggaatccttttgaaagcaccagcaattgttgttccaggactatgcagcagtgggtgtgctccaaacgctcagatatcgccaagagtttaagcagaaaccatagtggtaaagcatttgataaagtgatacctggagcacagaaatcggataggaacaacatgcttggctttaatgattctcaagttccagaaagtcctgctggggcgttttcttcggagtcaccagaatacatggccacaacttcagaagccattggtgttgagcagagcaatggtccttcaaaagtgcttagatcgattcctacatggtcttcaaaaactcaccgtcttcagagcagtgtcatgccaaaaacacctagatcagctgctgctcttgcaaagagaaaaattaaggagattgggaggagagaagctaccaaattagataattacaatatagtgaggaatcccacttcagtgaaaagatctgaaactaggactctttccttcactgcagggccaagcaatggatcaaacaggttagcatctacctcaaagaagatccggaagcatcgatctctgttgaggaccggcaagcgtgcattttcaccttttagtactagagtagttcatggttttggtgaagagcgtgaacttgataccagacatgtaaataagaaattccggattactagtaatgaggttcccaagaagtttttgaagcatactgaagaggatactgcagataatgacttctctcttgcaagtgacatgacagtatcaggacaacagaatgatcaatatgatgttgcacaggaaacagagggtacacaaatggattgtgaaggtgaagatgctgaaactgatgtgccatatgattctgtatccagaagtgatcctgctgactgttgcaaccaaataagtgatgtttctctgagtcctgaaaataacagaacaacagatgatgatgttttagttgaaggctatagtgtagctgtggaggatccaaactccagtgagaaattagcacatgggcatgaatccaactgtgctaccaataatgaaatggatgaatggcagatggatccgacttcaacaaaggaatctagtccctgcttagttagtaacagggacatgggtcctggaggtcctcaggataactcatcaataacatcaaatggagaaaactttaatcaagagcatggtctgccactcggacaggactcactagattctcctgtatcaactgcctcaactatgtcccctccagctgctttgaaggattcaaggattaacgatgaagaacctggcccatctactggtagaactgttgaagagcaaatcactgggtgcttgaatcaagaagccaagtcaatacctatggccagagaaggtgaacttcccaaagagaagccttttcgatgttcttgccaggagaacatttccagagagtctcatcaaagtgttgttgccagaccaacgctgaattttactggaaagcaggttccgcaattgcacattggttcgagggcatcatcatctttcagcatgtaccaaagaaccagcgcaaagcccaacccctgcttagattcacatgaacatctttcagcggctaaggttgcagcggaatctgctgtcagcctcccttcttactcaacagattgcataagcccctcattacaaactcagcttccttcgccatcaaatcctatcttgaggctgatgggtaaggatttgatggtgatgaacaacgaagagagtgtgcatcctcaagcaccaagttcagactacatcttgagagggaattacgaggcacctgttggttttatgcctccaagctaccaacatctcggtaattctggatttatcagcatgccaccaaccgcagccagtcaccagattcctctaccaagtgttcaagctagcggccttgttgctcctccgttgcacagcgtttccatgatgcaacctgaacatcattcccagcagaagtcctacagaaatattatgcctgccatgcatcatccaacctacatgatgaaagaagtgattgtgatcaaggactctcctgagcgtagtagaactgagccacaagctagcatgcttttcccccctgctccacctcccgcactctcgataccaaacaatacgccaccacgtccattttactgccttccaccgcaaatcccaatcttgccaagggagagggctgctggatccatgcctgtgtacgcaaactttggcgcattggctggtgtcagtccatcaagtcaagaaagccaaacgggagtaaccaatccttacatgccgaatccgttcttcgtccagtcccgaactggttacatgaaccacccgccagtgtactactcacagaatctggggtgatgatttctcagtagctcaaatgaccagaactccatttaacttgccggtcgtcgctgtcgaagtttgtgggggatgagagtttcgtgatgggtcaaaaacatgctgagatcaatgaacctgcatgagatgtgtctgactttcatgaggattttcacataggttgctttagatttttccccctttctttctcccttaaagctacagcatgtttgccgtcaaaagtatcttaattactctctgcaaagctgcagtagtaaattacagtgtgcaattcccaatagctctgcaaaggaatatatctcagtatttatcgaaaaagctggcatttgatattcccagttgcatgtttatagtctgatgtctgttctttttacacactgttctgccggtgtttgctgcctcagcagtgttaactcgtgatagttaag

SEQ ID NO: 17285 - DNA, 4688 bp, Zea Mays
ataatataatgcgtcgtctaatgcgttatctatcttgccaccgagcgagtagagtattcggctattcgcacacagacagcgtggtgccgagagagagaaagtggtggtggaatacatagcaagccaaaaaaaaaacatttcttccctttttccttgcctcgcttcccctcccccgtctcctgttctcttctcccttctccgtctgcttcagcccccagaaatcgaagccaccaccaccatagagctccgagcccctcgccctcctccccgcctgttcgctgcgtggatctacaggcaggatgctcactcccgcgcgcgcgggcgccgctcggtgagcggctgtgaagaaaaggtgcctgatgagaattgagatagtgggcggccaaggaagcgaagtttctcgcactccacctgttgaatttaccaacttggtatgctggagtgtaaggataagagcagacccaattgcttcacagctcttgggttcttagtgccgactgtagcagcagcagatctggggcgagcagcgaaggcgttcatcagatgttatccagtgagcagccttcaggcccctcatgttccttcaagtctactggcccgggtgtgagcactgatccggcaacctccgtggccgaggggccgccgagccaggatcccagagatctggtccaaccttatcccaagttctccataagagattatgtgtttgcttcaagaagcaaaggcatcaagagaagctggcctttccatccacattcattgcagctttgcctagagcgcggtgtgaaggatccattgcctccatttgagtctcccgatttgatccggtcacagccattaaatatttccactgactttgagcaatctgctgcttgcttagaactcaatagtgttggtctggtgaagaatagagatgctagttccttaaacgagtatacaggcaatatcaacttccagtcatgccaaccagtagatgagtcacttggacctttgccatacacatcgccagaggatgggaaatctggtatcaaccaagtgggaagtacaaatgaatcagatcatcctgatgaggttataccaatagatctacaagataatagctgtacaaaagcaagtcagcaaattgaggttgatgtgcccttgcggcggttgagaaatcttgacttatcatgcgagccatctgaaaagaagtgcaaatttgtagtcaagttaggtgccacgacggatattcggcgagcagaggatatagcatctaactctagctcagtttcagatccgatggcttcaaagacttgtcctgtttgcaaagtatttgcttcgacttcaaacaccacattgaatgcccacatagatcagtgcctttctgcagagtctaatactgagcttgttgaaacggtccttgtgaaacctaaagtgaagccaaggaagaagcgattgatggtggacatatacaagactgctcttccatgcacacttgaggatcttgatcagaggaatggcactaattgggcagttgagttgtctatgtctccagtgagcagagaggtttgcactgagaaccgaagcccagaaatggtatcatttgacagaagagatgatgaaagagaaggagatgtctatgttgattctaacggcataaaaattagaattttgtccaagtgtaatgatgtacctttggtgttgagggatgaccttggttcgaggaaagttgcgaagcatggaactggaaaaggtatactgatgagcaaaaagatgctgaagtcaaagcttttgaagaataagaagctcaagatgcatggaaagaagtacaacaagacaagccctttgaactcccaggttcaagcatatccacatgatgatattaacgaggaaacctccgaggaggagtggcatgcgcggaatccttttgaaagcaccagcaattgttgttccaggactatgcagcagtgggtgtgctccaaacgctcagatatcgccaagagtttaagcagaaaccatagtggtaaagcatttgataaagtgatacctggagcacagaaatcggataggaacaacatgcttggctttaatgattctcaagttccagaaagtcctgctggggcgttttcttcggagtcaccagaatacatggccacaacttcagaagccattggtgttgagcagagcaatggtccttcaaaagtgcttagatcgattcctacatggtcttcaaaaactcaccgtcttcagagcagtgtcatgccaaaaacacctagatcagctgctgctcttgcaaagagaaaaattaaggagattgggaggagagaagctaccaaattagataattacaatatagtgaggaatcccacttcagtgaaaagatctgaaactaggactctttccttcactgcagggccaagcaatggatcaaacaggttagcatctacctcaaagaagatccggaagcatcgatctctgttgaggaccggcaagcgtgcattttcaccttttagtactagagtagttcatggttttggtgaagagcgtgaacttgataccagacatgtaaataagaaattccggattactagtaatgaggttcccaagaagtttttgaagcatactgaagaggatactgcagataatgacttctctcttgcaagtgacatgacagtatcaggacaacagaatgatcaatatgatgttgcacaggaaacagagggtacacaaatggattgtgaaggtgaagatgctgaaactgatgtgccatatgattctgtatccagaagtgatcctgctgactgttgcaaccaaataagtgatgtttctctgagtcctgaaaataacagaacaacagatgatgatgttttagttgaaggctatagtgtagctgtggaggatccaaactccagtgagaaattagcacatgggcatgaatccaactgtgctaccaataatgaaatggatgaatggcagatggatccgacttcaacaaaggaatctagtccctgcttagttagtaacagggacatgggtcctggaggtcctcaggataactcatcaataacatcaaatggagaaaactttaatcaagagcatggtctgccactcggacaggactcactagattctcctgtatcaactgcctcaactatgtcccctccagctgctttgaaggattcaaggattaacgatgaagaacctggcccatctactggtagaactgttgaagagcaaatcactgggtgcttgaatcaagaagccaagtcaatacctatggccagagaaggtgaacttcccaaagagaagccttttcgatgttcttgccaggagaacatttccagagagtctcatcaaagtgttgttgccagaccaacgctgaattttactggaaagcaggttccgcaattgcacattggttcgagggcatcatcatctttcagcatgtaccaaagaaccagcgcaaagcccaacccctgcttagattcacatgaacatctttcagcggctaaggttgcagcggaatctgctgtcagcctcccttcttactcaacagattgcataagcccctcattacaaactcagcttccttcgccatcaaatcctatcttgaggctgatgggtaaggatttgatggtgatgaacaacgaagagagtgtgcatcctcaagcaccaagttcagactacatcttgagagggaattacgaggcacctgttggttttatgcctccaagctaccaacatctcggtaattctggatttatcagcatgccaccaaccgcagccagtcaccagattcctctaccaagtgttcaagctagcggccttgttgctcctccgttgcacagcgtttccatgatgcaacctgaacatcattcccagcagaagtcctacagaaatattatgcctgccatgcatcatccaacctacatgatgaaagaagtgattgtgatcaaggactctcctgagcgtagtagaactgagccacaagctagcatgcttttcccccctgctccacctcccgcactctcgataccaaacaatacgccaccacgtccattttactgccttccaccgcaaatcccaatcttgccaagggagagggctgctggatccatgcctgtgtacgcaaactttggcgcattggctggtgtcagtccatcaagtcaagaaagccaaacgggagtaaccaatccttacatgccgaatccgttcttcgtccagtcccgaactggttacatgaaccacccgccagtgtactactcacagaatctggggtgatgatttctcagtagctcaaatgaccagaactccatttaacttgccggtcgtcgctgtcgaagtttgtgggggatgagagtttcgtgatgggtcaaaaacatgctgagatcaatgaacctgcatgagatgtgtctgactttcatgaggattttcacataggttgctttagatttttccccctttctttctcccttaaagctacagcatgtttgccgtcaaaagtatcttaattactctctgcaaagctgcagtagtaaattacagtgtgcaattcccaatagctctgcaaaggaatatatctcagtatttatcgaaaaagctggcatttgatattcccagttgcatgtttatagtctgatgtctgttctttttacacactgttctgccggtgtttgctgcctcagcagtgttaactcgtgatagttaag

SEQ ID NO: 17286 - DNA, 867 bp, Zea Mays
accttcctctgctgtatgttcagtgcctgcctggtttctgggtttctccccttccctcctcgacctctcttccagcttccaacgcagctcatcaccagacaccactacttccccagttcccctcaccgtccctgcgctccatcgtctttggtgtccatagctttaaatacgaccacgaagccggtgcggcgactcggcgatctctccatcactgctgcggtgctgcctagctaccttctcggcctcgggtgggggcggcattgtcggtccagactccagagcgcgctgcttccggagctggccgcttgcgctgagccctctgccggaggcaatgaggagcggccgtgcctgctccgctctcgcgtcgctcctgctgctgtggctgggcgtcgccgccgcgcagaaggcctcgtcctggaagacattgagcggcaaggctccagcaatcgtagccaagggtggattctccgggttattccctgattcaagcgaatacgcttatcaatttgcgctgctcgctagctcgccggatacgatactgtactgcgatgtgcggctgaccaaggatgagattggcatttgcctgccggacatcaagatggataactgcacgaacattccagatttctatgcgcagggtcagaagagctacctcgtcaatggcgtgcctacttcgggatggttctcggtggactacaatggcactgagcttgaacaagtgactctcaagcaatcaatcaattctcggacacccagatttgattcaagtttctttccactacttgctgttgaagatgtgcagtccaaattcaaaccttctggaatttggctcaatgttcagcatgacagtttctacagccagtcaat

SEQ ID NO: 17287 - DNA, 1358 bp, Zea Mays
atggatacttcgtggattatgaacgggctgggttttgccgagaaaataagaagcgcaactcggtcgctcaccctccgattcggtgaactttttgcgagaccacgtgccagatgcaccaactgcgactgcgacattgacgttagtgatgtttctttggtgtggccagcacttcctgccggtgtcaaattcgatcctaccgacctagagcttctgcagcatctacagggaaaatccagcctgccgaattcagtgtcccattcgcttattgacgagttcatacctactatacaagagaaggaggggatctgctatacacatcccaaaaatctccctgttcggaatgcgtatgacactggtaaccgcaagcgtcgaaggatcgtcgtcgccaccgtcggcgacgacgtttctgacggcggcggcgttgctgctagcgggaacagcaggtggcataagaccggatcgtccaagcccgtattcgacgaggacggcgtgaggcagggctggaagaagatcttagtcctctacagagctcccaagaaagtcggcggcaagccagagagcgagaactgggtgatgcaccagtaccatctcggcgcaagagaggacgaaaccgacggcgagtttgcagtctgcaaagtattctaccagtcgccgttgaggaaaaacggcagacctgctaaaacagacgctgcggctgcggctgcggctgaatccgatgcgtctgttggcaaaatcaaccctaggaccccgatgacgacagatcctccccggccccgccggctcaacagcagcccgtgcaacaccgagcagtatacccccatccaggaggatcagggggaggaagaagaagaagaagaatgtggcacgtcgaagatgaaggccgaaccatccgaatgttctgcgtgctatgctgaagcatcaccgactattcctacctccgacgaacccatgcaggccacggatgatgccctggacgcaggactcgacacacctctgcccgtcgatgggcctagcatggacctgttccatgggttgcctgacctggataacgctcatccgttcactggacttggcacatggatcagtttagatgacatcctcggaccacaggatggcctcgcggcctggccggacggattcctctgatgcgacgcgaagaaggctcggagctggcggcagcagtggaaggagccagttctgttgttaatcgtcggctcgtcgccttgtgagatgatgcttcgtgcgcaagactgcattttcagaatttcatgagaagttttgtacagcagtaatagttgtagaaccgagagagcttagcagacgacttcaaaaaaaaaaagaaaaagaaaagaaaaaag

SEQ ID NO: 17288 - DNA, 1496 bp, Zea Mays
ctcactccccacaccctactactcctgcggtgcgggtgcgcggcgctcctccacgcgcagcagcagccggctccagtccagctcccgccggcggccatggatacttcgtggattatgaacgggctgggttttgccgagaaaataagaagcgcaactcggtcgctcaccctccgattcggtgaactttttgcgagaccacgtgccagatgcaccaactgcgactgcgacattgacgttagtgatgtttctttggtgtggccagcacttcctgccggtgtcaaattcgatcctaccgacctagagcttctgcagcatctacagggaaaatccagcctgccgaattcagtgtcccattcgcttattgacgagttcatacctactatacaagagaaggaggggatctgctatacacatcccaaaaatctccctggtatgaagatggacggtagctgcctccatttcttcaacagagttcggaatgcgtatgacactggtaaccgcaagcgtcgaaggatcgtcgtcgccaccgtcggcgacgacgtttctgacggcggcggcgttgctgctagcgggaacagcaggtggcataagaccggatcgtccaagcccgtattcgacgaggacggcgtgaggcagggctggaagaagatcttagtcctctacagagctcccaagaaagtcggcggcaagccagagagcgagaactgggtgatgcaccagtaccatctcggcgcaagagaggacgaaaccgacggcgagtttgcagtctgcaaagtattctaccagtcgccgttgaggaaaaacggcagacctgctaaaacagacgctgcggctgcggctgcggctgaatccgatgcgtctgttggcaaaatcaaccctaggaccccgatgacgacagatcctccccggccccgccggctcaacagcagcccgtgcaacaccgagcagtatacccccatccaggaggatcagggggaggaagaagaagaagaagaatgtggcacgtcgaagatgaaggccgaaccatccgaatgttctgcgtgctatgctgaagcatcaccgactattcctacctccgacgaacccatgcaggccacggatgatgccctggacgcaggactcgacacacctctgcccgtcgatgggcctagcatggacctgttccatgggttgcctgacctggataacgctcatccgttcactggacttggcacatggatcagtttagatgacatcctcggaccacaggatggcctcgcggcctggccggacggattcctctgatgcgacgcgaagaaggctcggagctggcggcagcagtggaaggagccagttctgttgttaatcgtcggctcgtcgccttgtgagatgatgcttcgtgcgcaagactgcattttcagaatttcatgagaagttttgtacagcagtaatagttgtagaaccgagagagcttagcagacgacttcaaaaaaaaaaagaaaaagaaaagaaaaaag

SEQ ID NO: 17289 - DNA, 1691 bp, Zea Mays
ctgccttggtgtttttcttctcccgttcaagtcgcgtgccactttcttctctcgttcacctcgcgtgcgcgaaccaactagggcgaccgctgccgccctacggcctacgcccagctgctcaggtcttattcgggcctttggcggcgagaaccgaccccgccaggataatggctcaccgtggacacctagatggactgactgcccaagctccagcactgatgcgccatggttccttcgctgcaggcagcctttctagccactcacctttggagtcttcatctacactggagatgctggagaacaagcttgccatgcagactgcagaagtggaaaagcttatcatggagaatcagcggttagcatcaagccatgtggtcttgaggcaggacattgttgatacagagaaagagatgcaaataatccgcacccacctaggtgaagttcagacagagactgatttgcatattagagatttattggagagaattagattaatggaggcagacatacatagtggtgatgcggtgaagaaggagcttcatcaagtgcatatggaggcaaagagacttattactgaaaggcagatgctgacccttgagacagaggatgtgaataaagaattacagaaactctctgcctctggtgacagtaaaagccttcctgaattgctagctgagctagatgggctaaggaaagagcatcttaatttacgatctcaatttgaatttgagaaaaatacaaacatcaagcaagttgagcagatgcggacaatggaaatgaacttgatgaccatgactaaacaagctgagaagttacgaggtgatgtggcaaatgctgaaagacgggcacaggcagctgtggctaaagcaacagggcatgcagctggtgcacaggtgacagcttcacagcctgggacagctcaagctacagcggttccagcagcagctacagacccatatgcaggtgcatatgccagttacccccctgcatatcagcagggagcccaggctggggcgtaccagcagggagcccaggctggggcgtaccaacagggagcccaagctggggcgtaccaacagggagcccaagctgggacatatcagcaaggaaaccaggctggagcatatccctatgcttatgatgctgccacggcttacacatatgcaggttattctggctatccagttgcaggctatgcgcaaagtgcagtgcccaattattcctatgctgcacctccacagccaataagcagtggtgcagctacagacgccgcaagcctgtatggtgccgttggtagcgccggatatcctactgcgcaagttcagccgagcagtggccctgcaaatgcagcgccaccacctccaccaccaccggcagcaccatatccaagcacatatgaccaaaccagaggagcccagaggtgaaatctgggatgtaaaccagatggctgtttgccatgcacatttgttgagcagacaaatatagactctgtcatgccccatttgtagactgattactggttcagttatgtagatccagttacgggtagattaatttacatcacgacggaagagttgatgtatgcgtaactgtgttggtacttgggttgatcggagcaatgcggcattaaaccacaaaatagtgtagtgtcgttgttctctattcttttataccatttattttcaagtata

SEQ ID NO: 17290 - DNA, 1728 bp, Zea Mays
ctgccttggtgtttttcttctcccgttcaagtcgcgtgccactttcttctctcgttcacctcgcgtgcgcgaaccaactagggcgaccgctgccgccctacggcctacgcccagctgctcaggtcttattcgggcctttggcggcgagaaccgaccccgccaggcagcctttctagccactcacctttggagtcttcatctacactggagatgctggagaacaagcttgccatgcagactgcagaagtggaaaagcttatcatggagaatcagcggttagcatcaagccatgtggtcttgaggcaggacattgttgatacagagaaagagatgcaaataatccgcacccacctaggtgaagttcagacagagactgatttgcatattagagatttattggagagaattagattaatggaggcagacatacatagtggtgatgcggtgaagaaggagcttcatcaagtgcatatggaggcaaagagacttattactgaaaggcagatgctgacccttgagacagaggatgtgaataaagaattacagaaactctctgcctctggtgacagtaaaagccttcctgaattgctagctgagctagatgggctaaggaaagagcatcttaatttacgatctcaatttgaatttgagaaaaatacaaacatcaagcaagttgagcagatgcggacaatggaaatgaacttgatgaccatgactaaacaagctgagaagttacgaggtgatgtggcaaatgctgaaagacgggcacaggctgtggctaaagcaacagggcatgcagctggtgcacaggtgacagcttcacagcctgggacagctcaagctacagcggttccagcagcagctacagacccatatgcaggtgcatatgccagttacccccctgcatatcagcagggagcccaggctggggcatatcagcagggagcccaggctgggacgtaccagcagggagcgggaacccaggctggggggtaccagcaaggagcccaggctggggcgtaccagcagggagcgggagcccaggctggggcgtaccagcagggagcccaggctggggcgtaccaacagggagcccaagctggggcgtaccaacagggagcccaagctgggacatatcagcaaggaaaccaggctggagcatatccctatgcttatgatgctgccacggcttacacatatgcaggttattctggctatccagttgcaggctatgcgcaaagtgcagtgcccaattattcctatgctgcacctccacagccaataagcagtggtgcagctacagacgccgcaagcctgtatggtgccgttggtagcgccggatatcctactgcgcaagttcagccgagcagtggccctgcaaatgcagcgccaccacctccaccaccaccggcagcaccatatccaagcacatatgaccaaaccagaggagcccagaggtgaaatctgggatgtaaaccagatggctgtttgccatgcacatttgttgagcagacaaatatagactctgtcatgccccatttgtagactgattactggttcagttatgtagatccagttacgggtagattaatttacatcacgacggaagagttgatgtatgcgtaactgtgttggtacttgggttgatcggagcaatgcggcattaaaccacaaaatagtgtagtgtcgttgttctctattcttttataccatttattttcaagtata

SEQ ID NO: 17291 - DNA, 1782 bp, Zea Mays
ctgccttggtgtttttcttctcccgttcaagtcgcgtgccactttcttctctcgttcacctcgcgtgcgcgaaccaactagggcgaccgctgccgccctacggcctacgcccagctgctcaggtcttattcgggcctttggcggcgagaaccgaccccgccagatggactgactgcccaagctccagcactgatgcgccatggttccttcgctgcaggcagcctttctagccactcacctttggagtcttcatctacactggagatgctggagaacaagcttgccatgcagactgcagaagtggaaaagcttatcatggagaatcagcggttagcatcaagccatgtggtcttgaggcaggacattgttgatacagagaaagagatgcaaataatccgcacccacctaggtgaagttcagacagagactgatttgcatattagagatttattggagagaattagattaatggaggcagacatacatagtggtgatgcggtgaagaaggagcttcatcaagtgcatatggaggcaaagagacttattactgaaaggcagatgctgacccttgagacagaggatgtgaataaagaattacagaaactctctgcctctggtgacagtaaaagccttcctgaattgctagctgagctagatgggctaaggaaagagcatcttaatttacgatctcaatttgaatttgagaaaaatacaaacatcaagcaagttgagcagatgcggacaatggaaatgaacttgatgaccatgactaaacaagctgagaagttacgaggtgatgtggcaaatgctgaaagacgggcacaggctgtggctaaagcaacagggcatgcagctggtgcacaggtgacagcttcacagcctgggacagctcaagctacagcggttccagcagcagctacagacccatatgcaggtgcatatgccagttacccccctgcatatcagcagggagcccaggctggggcatatcagcagggagcccaggctgggacgtaccagcagggagcgggaacccaggctggggggtaccagcaaggagcccaggctggggcgtaccagcagggagcgggagcccaggctggggcgtaccagcagggagcccaggctggggcgtaccaacagggagcccaagctggggcgtaccaacagggagcccaagctgggacatatcagcaaggaaaccaggctggagcatatccctatgcttatgatgctgccacggcttacacatatgcaggttattctggctatccagttgcaggctatgcgcaaagtgcagtgcccaattattcctatgctgcacctccacagccaataagcagtggtgcagctacagacgccgcaagcctgtatggtgccgttggtagcgccggatatcctactgcgcaagttcagccgagcagtggccctgcaaatgcagcgccaccacctccaccaccaccggcagcaccatatccaagcacatatgaccaaaccagaggagcccagaggtgaaatctgggatgtaaaccagatggctgtttgccatgcacatttgttgagcagacaaatatagactctgtcatgccccatttgtagactgattactggttcagttatgtagatccagttacgggtagattaatttacatcacgacggaagagttgatgtatgcgtaactgtgttggtacttgggttgatcggagcaatgcggcattaaaccacaaaatagtgtagtgtcgttgttctctattcttttataccatttattttcaagtata

SEQ ID NO: 17292 - DNA, 1664 bp, Zea Mays
ctgccttggtgtttttcttctcccgttcaagtcgcgtgccactttcttctctcgttcacctcgcgtgcgcgaaccaactagggcgaccgctgccgccctacggcctacgcccagctgctcaggtcttattcgggcctttggcggcgagaaccgaccccgccaggataatggctcaccgtggacacctagatggactgactgcccaagctccagcactgatgcgccatggttccttcgctgcaggcagcctttctagccactcacctttggagtcttcatctacactggagatgctggagaacaagcttgccatgcagactgcagaagtggaaaagcttatcatggagaatcagcggttagcatcaagccatgtggtcttgaggcaggacattgttgatacagagaaagagatgcaaataatccgcacccacctaggtgaagttcagacagagactgatttgcatattagagatttattggagagaattagattaatggaggcagacatacatagtggtgatgcggtgaagaaggagcttcatcaagtgcatatggaggcaaagagacttattactgaaaggcagatgctgacccttgagacagaggatgtgaataaagaattacagaaactctctgcctctggtgacagtaaaagccttcctgaattgctagctgagctagatgggctaaggaaagagcatcttaatttacgatctcaatttgaatttgagaaaaatacaaacatcaagcaagttgagcagatgcggacaatggaaatgaacttgatgaccatgactaaacaagctgagaagttacgaggtgatgtggcaaatgctgaaagacgggcacaggcagctgtggctaaagcaacagggcatgcagctggtgcacaggtgacagcttcacagcctgggacagctcaagctacagcggttccagcagcagctacagacccatatgcaggtgcatatgccagttacccccctgcatatcagcagggagcccaggctggggcgtaccaacagggagcccaagctggggcgtaccaacagggagcccaagctgggacatatcagcaaggaaaccaggctggagcatatccctatgcttatgatgctgccacggcttacacatatgcaggttattctggctatccagttgcaggctatgcgcaaagtgcagtgcccaattattcctatgctgcacctccacagccaataagcagtggtgcagctacagacgccgcaagcctgtatggtgccgttggtagcgccggatatcctactgcgcaagttcagccgagcagtggccctgcaaatgcagcgccaccacctccaccaccaccggcagcaccatatccaagcacatatgaccaaaccagaggagcccagaggtgaaatctgggatgtaaaccagatggctgtttgccatgcacatttgttgagcagacaaatatagactctgtcatgccccatttgtagactgattactggttcagttatgtagatccagttacgggtagattaatttacatcacgacggaagagttgatgtatgcgtaactgtgttggtacttgggttgatcggagcaatgcggcattaaaccacaaaatagtgtagtgtcgttgttctctattcttttataccatttattttcaagtata

SEQ ID NO: 17293 - DNA, 1523 bp, Zea Mays
aaactgtaaacagcccagaaggaaaatgattgcttcctgccttggtgtttttcttctcccgttcaagtcgcgtgccactttcttctctcgttcacctcgcgtgcgcgaaccaactagggcgaccgctgccgccctacggcctacgcccagctgctcaggtcttattcgggcctttggcggcgagaaccgaccccgccaggataatggctcaccgtggacacctagatggactgactgcccaagctccagcactgatgcgccatggttccttcgctgcaggcagcctttctagccactcacctttggagtcttcatctacactggagatgctggagaacaagcttgccatgcagactgcagaagtggaaaagcttatcatggagaatcagcggttagcatcaagccatgtggtcttgaggcaggacattgttgatacagagaaagagatgcaaataatccgcacccacctaggtgaagttcagacagagactgatttgcatattagagatttattggagagaattagattaatggaggcagacatacatagtggtgatgcggtgaagaaggagcttcatcaagtgcatatggaggcaaagagacttattactgaaaggcagatgctgacccttgagacagaggatgtgaataaagaattacagaaactctctgcctctggtgacagtaaaagccttcctgaattgctagctgagctagatgggctaaggaaagagcatcttaatttacgatctcaatttgaatttgagaaaaatacaaacatcaagcaagttgagcagatgcggacaatggaaatgaacttgatgaccatgactaaacaagctgagaagttacgaggtgatgtggcaaatgctgaaagacgggcacaggcagctgtggctaaagcaacagggcatgcagctggtgcacaggtgacagcttcacagcctgggacagctcaagctacagcggttccagcagcagctacagacccatatgcaggttattctggctatccagttgcaggctatgcgcaaagtgcagtgcccaattattcctatgctgcacctccacagccaataagcagtggtgcagctacagacgccgcaagcctgtatggtgccgttggtagcgccggatatcctactgcgcaagttcagccgagcagtggccctgcaaatgcagcgccaccacctccaccaccaccggcagcaccatatccaagcacatatgaccaaaccagaggagcccagaggtgaaatctgggatgtaaaccagatggctgtttgccatgcacatttgttgagcagacaaatatagactctgtcatgccccatttgtagactgattactggttcagttatgtagatccagttacgggtagattaatttacatcacgacggaagagttgatgtatgcgtaactgtgttggtacttgggttgatcggagcaatgcggcattaaaccacaaaatagtgtagtgtcgttgttctctattcttttataccatttattttcaagtata

SEQ ID NO: 17294 - DNA, 904 bp, Zea Mays
ctgccttggtgtttttcttctcccgttcaagtcgcgtgccactttcttctctcgttcacctcgcgtgcgcgaaccaactagggcgaccgctgccgccctacggcctacgcccagctgctcaggtcttattcgggcctttggcggcgagaaccgaccccgccaggataatggctcaccgtggacacctagatggactgactgcccaagctccagcactgatgcgccatggttccttcgctgcaggcagcctttctagccactcacctttggagtcttcatctacactggagatgctggagaacaagcttgccatgcagactgcagaagtggaaaagcttatcatggagaatcagcggttagcatcaagccatgtggtcttgaggcaggacattgttgatacagagaaagagatgcaaataatccgcacccacctaggtgaagttcagacagagactgatttgcatattagagatttattggagagaattagattaatggaggcagacatacatagtggtgatgcggtgaagaaggagcttcatcaagtgcatatggaggcaaagagacttattactgaaaggcagatgctgacccttgagacagaggatgtgaataaagaattacagaaactctctgcctctggtgacagtaaaagccttcctgaattgctagctgagctagatgggctaaggaaagagcatcttaatttacgatctcaatttgaatttgagaaaaatacaaacatcaagcaagttgagcagatgcggacaatggaaatgaacttgatgaccatgactaaacaagctgagaagttacgaggtgatgtggcaaatgctgaaagacgggcacagggtcttgccgtcttagtaggggcggagggtagtggaggtgaatctgggtctcc

SEQ ID NO: 17295 - DNA, 2067 bp, Zea Mays
gcccccacagccaaaaaaagcacgtcaagggctgatgtgacaattaaactagagaaaagctacttttttgaaagtacgttagtaaaaaattatccctttagttgtatttgggcttttctggaagtaaaagtaagtttggaagtccaaccaaaggcacccaaatcaagttcgcttcaatgtgggcccacttatcagggaccttaattattcttgggaaacaagccgaatcagggtcaattagtgacaaatgcctagaaacgcgagggctaaatcgtaaaacaacttgagtatccatctccaccttccctttctcctcctctctcccggattcccggcgacctcccttttccttccctcccgagtcgcggccgcccgcccgcctccgtgatcgcaattcgcacctgcccgcgcggccccgacccctagtcctccccacccatggcgcggcgatccgcccctctcctgcgccgcctcgtctccgcctcctcaccgcccgcgctgcagtccctcacggaccacgtcggcgtcctcgcgcggcgcacggtgacctacatgccccggcccggggacggcgcaccgcgcgccgtcacgctcatcccaggcgacggcatcggccccctagtcacgggcgccgtgcggcaggtcatggaggcgatgcacgcgcccgtctacttcgagacctacgacgtccacggagacatgcccacggtcccgccagccatcatcgaatccatccgccgcaacaaggtctgcatcaagggcgggctcgccacgcccgtcggcggcggggtctcctccctcaacatgcagctgcgcaaggagctcgatctctacgcctcactcgtccactgctccaacctccccggcctgcccaccaggcacgagggtgtcgacatcgtcgtaatcagggagaacaccgagggcgagtactcggggctcgagcacgaggtcgtacccggggtcgttgagagcctcaagttcttatctgaacctttcttccattattactcttactgaatggatttcctaggtgatcacaaagttttgctctgagaggattgccaaatatgcattcgagtatgcttaccttaacaaccgaaagaaagtcactgcagtgcataaagcaaacattatgaagcttgccgatggtttgttcttggagtcttgccgtgaagttgcttcaaaatatcctggtattcagtacaatgaaatgattgttgacaactgctctatgcaacttgtttcaaagcctgaacaatttgatgtcatggttacgcctaatctttatggcaatttggtggctaacacggctgcaggtattgttggagggacgggcatcatgcctggaggcaatgtgggtcaggactacgccatctttgagcaaggcgcttctgcaggaaatgttgggaatgagaaccttgtggagcagaagaaagcaaaccctgtcgcgctgcttctgtcatctgctatgatgttgaggcatttgcagttcccgtcatttgcggaccggctcgagacggcagtgaagcgtgtcgttgctgaaggcacgtacagaacaaaggatctgggcggtagcagcaccacccaggaagttaccgatgctgtggttgccaatctggattagattccaggtgtacacggctaaaaaaggctaattctttggggtgactagttgtctagtcttgactcctgagtgttatttatcttcttacatagattttagattgcttcacatcttcaagagggattacaaggtatcccttgtttcagattttctttagaaataatattgaggaacccacgacgattcttgttcacgtgatactttgtacttatcaaggtagaggaccttgagttgcaaagccgaagggaatggatggcagtctgaaaataacatgaattgagagttgattcagattggagctttggccctgattgccactgcatactgtcactttggattattccctgagacttactgttatggaaaaacttttctgtttgcaatgcgtttgtgaaactccagggattattcaagagggatgtgctgtttgcaatgcgtttgtg

SEQ ID NO: 17296 - DNA, 2701 bp, Zea Mays
gcccccacagccaaaaaaagcacgtcaagggctgatgtgacaattaaactagagaaaagctacttttttgaaagtacgttagtaaaaaattatccctttagttgtatttgggcttttctggaagtaaaagtaagtttggaagtccaaccaaaggcacccaaatcaagttcgcttcaatgtgggcccacttatcagggaccttaattattcttgggaaacaagccgaatcagggtcaattagtgacaaatgcctagaaacgcgagggctaaatcgtaaaacaacttgagtatccatctccaccttccctttctcctcctctctcccggattcccggcgacctcccttttccttccctcccgagtcgcggccgcccgcccgcctccgtgatcgcaattcgcacctgcccgcgcggccccgacccctagtcctccccacccatggcgcggcgatccgcccctctcctgcgccgcctcgtctccgcctcctcaccgcccgcgctgcagtccctcacggaccacgtcggcgtcctcgcgcggcgcacggtgacctacatgccccggcccggggacggcgcaccgcgcgccgtcacgctcatcccaggcgacggcatcggccccctagtcacgggcgccgtgcggcaggtcatggaggcgatgcacgcgcccgtctacttcgagacctacgacgtccacggagacatgcccacggtcccgccagccatcatcgaatccatccgccgcaacaaggtctgcatcaagggcgggctcgccacgcccgtcggcggcggggtctcctccctcaacatgcagctgcgcaaggagctcgatctctacgcctcactcgtccactgctccaacctccccggcctgcccaccaggcacgagggtgtcgacatcgtcgtaatcagggagaacaccgagggcgagtactcggggctcgagcacgaggtcgtacccggggtcgttgagagcctcaaggtgatcacaaagttttgctctgagaggattgccaaatatgcattcgagtatgcttaccttaacaaccgaaagaaagtcactgcagtgcataaagcaaacattatgaagcttgccgatggtttgttcttggagtcttgccgtgaagttgcttcaaaatatcctggtattcagtacaatgaaatgattgttgacaactgctctatgcaacttgtttcaaagcctgaacaatttgatgtcatggtatgtatctaaatttctgggcatttttctgtgtatactatttaatttggaactttacttttttgttcaaacaaaccttggattacatttctctgttctacattgagttcattttcatctggtttttacaatattggaacatcaaatgtttgtttgtattgagttgcacactagtggttccagtgctaaaattatagaactattgaatagttattattataggattgtttaagcttgctggaaggacagttcctgtgctttacaaatgcaagcatatgcgtttttttgtaaacagtaaccctttgctccttttctaattttgagatcctttttttggggtaacactagaaaacctggcactcttgggagtttgaggaacttccttcagaatgtgagagattatgggaatgctccgcttgagtaccatgcttgccatatgataaagataacatttcttgttctgaggcatatatgaaaacaatcaaacatatattgggctgatcgaaatcccattgttgctaaggaacggaaattggtattgatgcaatatataaagcatgtgcttgctaaacgtcttttctatttgtcatcacatttcttttctgctttcctaattttctcgaatgcttctttgcaaatacaccatggattaggattatctgtgggtttcaatcttttttttgtaggttacgcctaatctttatggcaatttggtggctaacacggctgcaggtattgttggagggacgggcatcatgcctggaggcaatgtgggtcaggactacgccatctttgagcaaggcgcttctgcaggaaatgttgggaatgagaaccttgtggagcagaagaaagcaaaccctgtcgcgctgcttctgtcatctgctatgatgttgaggcatttgcagttcccgtcatttgcggaccggctcgagacggcagtgaagcgtgtcgttgctgaaggcacgtacagaacaaaggatctgggcggtagcagcaccacccaggaagttaccgatgctgtggttgccaatctggattagattccaggtgtacacggctaaaaaaggctaattctttggggtgactagttgtctagtcttgactcctgagtgttatttatcttcttacatagattttagattgcttcacatcttcaagagggattacaaggtatcccttgtttcagattttctttagaaataatattgaggaacccacgacgattcttgttcacgtgatactttgtacttatcaaggtagaggaccttgagttgcaaagccgaagggaatggatggcagtctgaaaataacatgaattgagagttgattcagattggagctttggccctgattgccactgcatactgtcactttggattattccctgagacttactgttatggaaaaacttttctgtttgcaatgcgtttgtgaaactccagggattattcaagagggatgtgctgtttgcaatgcgtttgtg

SEQ ID NO: 17297 - DNA, 1077 bp, Zea Mays
atctgatttcatcgaaagcaacgacgagaaaaacgaaccggtgatcacaaagttttgctctgagaggattgccaaatatgcattcgagtatgcttaccttaacaaccgaaagaaagtcactgcagtgcataaagcaaacattatgaagcttgccgatggtttgttcttggagtcttgccgtgaagttgcttcaaaatatcctggtattcagtacaatgaaatgattgttgacaactgctctatgcaacttgtttcaaagcctgaacaatttgatgtcatggttacgcctaatctttatggcaatttggtggctaacacggctgcaggtattgttggagggacgggcatcatgcctggaggcaatgtgggtcaggactacgccatctttgagcaaggcgcttctgcaggaaatgttgggaatgagaaccttgtggagcagaagaaagcaaaccctgtcgcgctgcttctgtcatctgctatgatgttgaggcatttgcagttcccgtcatttgcggaccggctcgagacggcagtgaagcgtgtcgttgctgaaggcacgtacagaacaaaggatctgggcggtagcagcaccacccaggaagttaccgatgctgtggttgccaatctggattagattccaggtgtacacggctaaaaaaggctaattctttggggtgactagttgtctagtcttgactcctgagtgttatttatcttcttacatagattttagattgcttcacatcttcaagagggattacaaggtatcccttgtttcagattttctttagaaataatattgaggaacccacgacgattcttgttcacgtgatactttgtacttatcaaggtagaggaccttgagttgcaaagccgaagggaatggatggcagtctgaaaataacatgaattgagagttgattcagattggagctttggccctgattgccactgcatactgtcactttggattattccctgagacttactgttatggaaaaacttttctgtttgcaatgcgtttgtgaaactccagggattattcaagagggatgtgctgtttgcaatgcgtttgtg

SEQ ID NO: 17298 - DNA, 1354 bp, Zea Mays
ctgcttgcaagaagaactgcttgcatagcagtcgttgccgtatgtattatactcaaatttaaacttcccttaaagcaactccaaaggataaaaaggcaagccttgtcatccatggacttgttgataaggtcattgctggagtcatgagcaagttgagtctgcgaattcctccatacatacgtactgactttgttcagctcactctcaggcactcactgaaaaagaaatgtgttagatggactcttcgagtaacaagtattcatggcctccgagcaccattgccatttcttcagtctgtcaaggtttcctttccagaaagacctgatctgaagtctgtagtgcttaaagagcaaccattctctttgcagagggaaacatcgatgaacaaaccatttttcatgctgttgacattaaatttcagtgatggttgcagctgtttgagctcctcaattggatggcctgttgattttcagaagcgaaaagacagcttcgtcagagatagagctctagtcctacgggagttgtactctgctgcacagcgcgagtcttgcattgggcaacaagaaattctggaaagagagaacctaccaagagctgagacgtctattcatggaatcgtgacaaacatcgttaggtatgacactgaagatgaaaagttggctccacccaagaatgatttgatgaatcacagccgcagcaaccctgcaaaacggcacgtggaaggcactgattgccactcgtcattgccaaagaaactgaagtactttttgaaagacaagaagctgaactgctaaaagtgtaaaaccgtagaaggtagatagagaatgctgtaggtttgtttattttggttattagacgagttatacgtagcatagatgcatgggaagttcgcatgctaaggttgaactcttctgctgcataggaaagttggctgacttcttatattatgcgagcctagcttaggtacctcctgtggggagaagcgattgcaatacatggtagcatgttgtagagctcctcaccccagttagtcagtgactgatgatggtatcctcttaccagtcctctggtggtatcatcttttgttcacggaggtcgatgaagtactgcctccgataaaaaaaagacgcttttgacattattgctccccaaattcttattttgacggctatactttgcccagcgagtaatatctaataaatatacgttttaacgcaattacatttttttttgtccaagaaaaatatttttggaagctgttgaaggtcaagtgtcaaaattttggatagacgttgacgtagtaggttgagagcaggtacttgcgtgcttcccctgtgaagttttgtttcataat

SEQ ID NO: 17299 - DNA, 1399 bp, Zea Mays
ctcatatttgtctaaatcagaagcgaacaaagactgatggtttgcagattactcctgcatgtaatatgcctctgatgtcaatcaagaatggggggagggtggccattgtaaatcttcaggcaactccaaaggataaaaaggcaagccttgtcatccatggacttgttgataaggtcattgctggagtcatgagcaagttgagtctgcgaattcctccatacatacgtactgactttgttcagctcactctcaggcactcactgaaaaagaaatgtgttagatggactcttcgagtaacaagtattcatggcctccgagcaccattgccatttcttcagtctgtcaaggtttcctttccagaaagacctgatctgaagtctgtagtgcttaaagagcaaccattctctttgcagagggaaacatcgatgaacaaaccatttttcatgctgttgacattaaatttcagtgatggttgcagctgtttgagctcctcaattggatggcctgttgattttcagaagcgaaaagacagcttcgtcagagatagagctctagtcctacgggagttgtactctgctgcacagcgcgagtcttgcattgggcaacaagaaattctggaaagagagaacctaccaagagctgagacgtctattcatggaatcgtgacaaacatcgttaggtatgacactgaagatgaaaagttggctccacccaagaatgatttgatgaatcacagccgcagcaaccctgcaaaacggcacgtggaaggcactgattgccactcgtcattgccaaagaaactgaagtactttttgaaagacaagaagctgaactgctaaaagtgtaaaaccgtagaaggtagatagagaatgctgtaggtttgtttattttggttattagacgagttatacgtagcatagatgcatgggaagttcgcatgctaaggttgaactcttctgctgcataggaaagttggctgacttcttatattatgcgagcctagcttaggtacctcctgtggggagaagcgattgcaatacatggtagcatgttgtagagctcctcaccccagttagtcagtgactgatgatggtatcctcttaccagtcctctggtggtatcatcttttgttcacggaggtcgatgaagtactgcctccgataaaaaaaagacgcttttgacattattgctccccaaattcttattttgacggctatactttgcccagcgagtaatatctaataaatatacgttttaacgcaattacatttttttttgtccaagaaaaatatttttggaagctgttgaaggtcaagtgtcaaaattttggatagacgttgacgtagtaggttgagagcaggtacttgcgtgcttcccctgtgaagttttgtttcataat

SEQ ID NO: 17300 - DNA, 2076 bp, Zea Mays
gtctttgccggcgatgagcactaccaggacaccatggtgtcttggactgaagaagatatcagcaaagcttgaaaaggactgagagatgtcattgggctatgctgagaagctgtcctaccgggaggatgtgggtactgtgggaatgcctgagatctttgagacccctgagctagtccagaataagatagaagagcttgctgccatggtgcaaaagagtaagcatttagtggtgtttaccggggcagggatatcaacttcatcaggcatacctgattttcgagggcccatgggtgtctggaccttgcagcgtgcaggaaaaggtattcctaatgcatcacttcccttccatcatgctgttccaagcttgacacatatggcactagtcgaacttgaaagagcaggatttctaaagtttgtcataagccagaatgttgacagcctacatctccgttctggtttcccaagggagaagttggctgaattacatggcaattctttcaaggagatctgcccatgctgtaaaactgagtaccttcgtgattttgagattgagacaattggactgaaggatactccaagacgttgttctgataagaattgtggagctagattaaaggatacagttcttgactgggatgatgctttaccccctgaggagatgaatttggccacggagcattgtcgatcagctgatcttgttctatgtctaggaactagtttgcagattactcctgcatgtaatatgcctctgatgtcaatcaagaatggggggagggtggccattgtaaatcttcaggcaactccaaaggataaaaaggcaagccttgtcatccatggacttgttgataaggtcattgctggagtcatgagcaagttgagtctgcgaattcctccatacatacgtactgactttgttcagctcactctcaggcactcactgaaaaagaaatgtgttagatggactcttcgagtaacaagtattcatggcctccgagcaccattgccatttcttcagtctgtcaaggtttcctttccagaaagacctgatctgaagtctgtagtgcttaaagagcaaccattctctttgcagagggaaacatcgatgaacaaaccatttttcatgctgttgacattaaatttcagtgatggttgcagctgtttgagctcctcaattggatggcctgttgattttcagaagcgaaaagacagcttcgtcagagatagagctctagtcctacgggagttgtactctgctgcacagcgcgagtcttgcattgggcaacaagaaattctggaaagagagaacctaccaagagctgagacgtctattcatggaatcgtgacaaacatcgttaggtatgacactgaagatgaaaagttggctccacccaagaatgatttgatgaatcacagccgcagcaaccctgcaaaacggcacgtggaaggcactgattgccactcgtcattgccaaagaaactgaagtactttttgaaagacaagaagctgaactgctaaaagtgtaaaaccgtagaaggtagatagagaatgctgtaggtttgtttattttggttattagacgagttatacgtagcatagatgcatgggaagttcgcatgctaaggttgaactcttctgctgcataggaaagttggctgacttcttatattatgcgagcctagcttaggtacctcctgtggggagaagcgattgcaatacatggtagcatgttgtagagctcctcaccccagttagtcagtgactgatgatggtatcctcttaccagtcctctggtggtatcatcttttgttcacggaggtcgatgaagtactgcctccgataaaaaaaagacgcttttgacattattgctccccaaattcttattttgacggctatactttgcccagcgagtaatatctaataaatatacgttttaacgcaattacatttttttttgtccaagaaaaatatttttggaagctgttgaaggtcaagtgtcaaaattttggatagacgttgacgtagtaggttgagagcaggtacttgcgtgcttcccctgtgaagttttgtttcataat

SEQ ID NO: 17301 - DNA, 2311 bp, Zea Mays
atctgacaggtaggctctttctactcccgatccatccgcagcgggcggcggccgcctcctcggctcctcccccgcggccgagctcgctcctcgccccgccgcctcaactcgtctcgcccgcgaccgatttcctccctccgctcgccgcgccgcaacccggagataaggccgcgctcgatcgagaaccacctggggtccagcgtcatcgcgaccagctccggcgaggcgtccgccctttgcagcccggtgtctctgcgaccggcacacagctccagagggtgtcttggactgaagaagatatcagcaaagcttgaaaaggactgagagatgtcattgggctatgctgagaagctgtcctaccgggaggatgtgggtactgtgggaatgcctgagatctttgagacccctgagctagtccagaataagatagaagagcttgctgccatggtgcaaaagagtaagcatttagtggtgtttaccggggcagggatatcaacttcatcaggcatacctgattttcgagggcccatgggtgtctggaccttgcaggaaaaggtattcctaatgcatcacttcccttccatcatgctgttccaagcttgacacatatggcactagtcgaacttgaaagagcaggatttctaaagtttgtcataagccagaatgttgacagcctacatctccgttctggtttcccaagggagaagttggctgaattacatggcaattctttcaaggagatctgcccatgctgtaaaactgagtaccttcgtgattttgagattgagacaattggactgaaggatactccaagacgttgttctgataagaattgtggagctagattaaaggatacagttcttgactgggatgatgctttaccccctgaggagatgaatttggccacggagcattgtcgatcagctgatcttgttctatgtctaggaactagtttgcagattactcctgcatgtaatatgcctctgatgtcaatcaagaatggggggagggtggccattgtaaatcttcaggcaactccaaaggataaaaaggcaagccttgtcatccatggacttgttgataaggtcattgctggagtcatgagcaagttgagtctgcgaattcctccatacatacgtactgactttgttcagctcactctcaggcactcactgaaaaagaaatgtgttagatggactcttcgagtaacaagtattcatggcctccgagcaccattgccatttcttcagtctgtcaaggtttcctttccagaaagacctgatctgaagtctgtagtgcttaaagagcaaccattctctttgcagagggaaacatcgatgaacaaaccatttttcatgctgttgacattaaatttcagtgatggttgcagctgtttgagctcctcaattggatggcctgttgattttcagaagcgaaaagacagcttcgtcagagatagagctctagtcctacgggagttgtactctgctgcacagcgcgagtcttgcattgggcaacaagaaattctggaaagagagaacctaccaagagctgagacgtctattcatggaatcgtgacaaacatcgttaggtatgacactgaagatgaaaagttggctccacccaagaatgatttgatgaatcacagccgcagcaaccctgcaaaacggcacgtggaaggcactgattgccactcgtcattgccaaagaaactgaagtactttttgaaagacaagaagctgaactgctaaaagtgtaaaaccgtagaaggtagatagagaatgctgtaggtttgtttattttggttattagacgagttatacgtagcatagatgcatgggaagttcgcatgctaaggttgaactcttctgctgcataggaaagttggctgacttcttatattatgcgagcctagcttaggtacctcctgtggggagaagcgattgcaatacatggtagcatgttgtagagctcctcaccccagttagtcagtgactgatgatggtatcctcttaccagtcctctggtggtatcatcttttgttcacggaggtcgatgaagtactgcctccgataaaaaaaagacgcttttgacattattgctccccaaattcttattttgacggctatactttgcccagcgagtaatatctaataaatatacgttttaacgcaattacatttttttttgtccaagaaaaatatttttggaagctgttgaaggtcaagtgtcaaaattttggatagacgttgacgtagtaggttgagagcaggtacttgcgtgcttcccctgtgaagttttgtttcataat

SEQ ID NO: 17302 - DNA, 2076 bp, Zea Mays
ctcaattggatggcctgttgattttcagtttatagggtgtcttggactgaagaagatatcagcaaagcttgaaaaggactgagagatgtcattgggctatgctgagaagctgtcctaccgggaggatgtgggtactgtgggaatgcctgagatctttgagacccctgagctagtccagaataagatagaagagcttgctgccatggtgcaaaagagtaagcatttagtggtgtttaccggggcagggatatcaacttcatcaggcatacctgattttcgagggcccatgggtgtctggaccttgcagcgtgcaggaaaaggtattcctaatgcatcacttcccttccatcatgctgttccaagcttgacacatatggcactagtcgaacttgaaagagcaggatttctaaagtttgtcataagccagaatgttgacagcctacatctccgttctggtttcccaagggagaagttggctgaattacatggcaattctttcaaggagatctgcccatgctgtaaaactgagtaccttcgtgattttgagattgagacaattggactgaaggatactccaagacgttgttctgataagaattgtggagctagattaaaggatacagttcttgactgggatgatgctttaccccctgaggagatgaatttggccacggagcattgtcgatcagctgatcttgttctatgtctaggaactagtttgcagattactcctgcatgtaatatgcctctgatgtcaatcaagaatggggggagggtggccattgtaaatcttcaggcaactccaaaggataaaaaggcaagccttgtcatccatggacttgttgataaggtcattgctggagtcatgagcaagttgagtctgcgaattcctccatacatacgtactgactttgttcagctcactctcaggcactcactgaaaaagaaatgtgttagatggactcttcgagtaacaagtattcatggcctccgagcaccattgccatttcttcagtctgtcaaggtttcctttccagaaagacctgatctgaagtctgtagtgcttaaagagcaaccattctctttgcagagggaaacatcgatgaacaaaccatttttcatgctgttgacattaaatttcagtgatggttgcagctgtttgagctcctcaattggatggcctgttgattttcagaagcgaaaagacagcttcgtcagagatagagctctagtcctacgggagttgtactctgctgcacagcgcgagtcttgcattgggcaacaagaaattctggaaagagagaacctaccaagagctgagacgtctattcatggaatcgtgacaaacatcgttaggtatgacactgaagatgaaaagttggctccacccaagaatgatttgatgaatcacagccgcagcaaccctgcaaaacggcacgtggaaggcactgattgccactcgtcattgccaaagaaactgaagtactttttgaaagacaagaagctgaactgctaaaagtgtaaaaccgtagaaggtagatagagaatgctgtaggtttgtttattttggttattagacgagttatacgtagcatagatgcatgggaagttcgcatgctaaggttgaactcttctgctgcataggaaagttggctgacttcttatattatgcgagcctagcttaggtacctcctgtggggagaagcgattgcaatacatggtagcatgttgtagagctcctcaccccagttagtcagtgactgatgatggtatcctcttaccagtcctctggtggtatcatcttttgttcacggaggtcgatgaagtactgcctccgataaaaaaaagacgcttttgacattattgctccccaaattcttattttgacggctatactttgcccagcgagtaatatctaataaatatacgttttaacgcaattacatttttttttgtccaagaaaaatatttttggaagctgttgaaggtcaagtgtcaaaattttggatagacgttgacgtagtaggttgagagcaggtacttgcgtgcttcccctgtgaagttttgtttcataat

SEQ ID NO: 17303 - DNA, 2898 bp, Zea Mays
ttcgccttccatgcgtactagacggtgttggtcgcgctcgaggtttacttacggggctccgttagcgtcgagcccccggatgtgcctctccttcgggacctgttcctaatcgagggcaagtgtcctagttctttggaccccggtggctgccacgacacccgacacccgccgcctgctccaccgtcgcggctgctcatgccctcgctgctgacctagcgcatgcaaacctcacatttcgaggcctaaaaccctcagcgtcagtggccggcacgtggcctctctagtgcccatcggtgccatggcagctctcgcgccgtggatcctacggcggcgacccgtccgctctgtcgcttctctggtctccattcgtgattcatggcatcgaaggtgtgggtcctcttcctcatatccttcagcatcgttcaagtgtttgtggggatggtttggaccagaggcacacgggcggaggaggccgtggtttcagcagcccgtgaggtgcgggagcacgacgatcacacttgatacagatggcaagtttgcgaggtttggagtcggcgatatgggtgtcaccaagcagaagtggaggcagcagccgcctccaaagaagaagatgtcgagaaaggccaaggtcaaccagctcaagtggtaccgcctgaaggccaagaagaagatgaagtcacccaaccccgaagttaggatcagatacaagcttgaaaaggctaagaggaaggaggaatggttgattgagaagctgaggaagtatgaggtcccgaggacaccggagccagttcatgaccctgagattcttactgaggaggaaaagttttatctcaagcgaacgggggagaagaagaagaattatgttcctgttgggaggagaggggtatttggtggtgtggttctcaacatgcacctccattggaagaagcatgagaccgtgaaggtggtttgcaagccttgtcggcctggccaagtttacgagtatgctgaggaattgacaaggctcagcaaaggcacagtcattgatattaaacctaataatacgattatgttttatcgcgggaagaactatgtgcaaccaaaggtgatgtcacctcctgaaactctttcgaagcagaaggccttagagaaatatagatatctacaatcccttgagcataccagccagtttattgagaagctggagaaggagcttgaagattacaagaagcatgttgctttattcaagaaccataataagggggttgctattgagaaaatcagcaatgaagataccactgttgatgatcctgcaactacctcagattctaaatgagctaactatttggacatgctggcatgatagatctttcagtcgtcaaatcttgcaagcctacatagctcaatgttcactattcatattaaatatgctggcttcagttgtggtgatatagggagctagcttgaaaactcagattcagatagaagaagtaatagccataggattttaaaggcttgcaagattaaaatcctggttgatggaaagctgtattacttgaaaaatacctcgttcatcaatctatctctataaggaaaggctagtagcatgatactgagtgcagatcagccttttaatatttctgcaatctttcctgtaaacacttttatgataaaataggacattcttttgaattgtggcccccttttatgtaggcttttcacttcttgggccttccttgctacataaaagacaatgaaattgtaattttggagctggaatagttctgcaggaccctctcagaaatgaagacatttactgtgccacacgttcacgtactcagtattcatacaccaatgatggacgtcagaagtgcacaagatttctgtgcgtcatttgggcattggtgcatgaactttgaaacaacttgttggtctacatttgtgtgctttttgcaggtactgggccgttcctgagctgagaagatgggcatgtgcagaagcacaatgatgactttaaggatttggcttgataaaaaggaagcgaaaagacagcttcgtcagagatagagctctagtcctacgggagttgtactctgctgcacagcgcgagtcttgcattgggcaacaagaaattctggaaagagagaacctaccaagagctgagacgtctattcatggaatcgtgacaaacatcgttaggtatgacactgaagatgaaaagttggctccacccaagaatgatttgatgaatcacagccgcagcaaccctgcaaaacggcacgtggaaggcactgattgccactcgtcattgccaaagaaactgaagtactttttgaaagacaagaagctgaactgctaaaagtgtaaaaccgtagaaggtagatagagaatgctgtaggtttgtttattttggttattagacgagttatacgtagcatagatgcatgggaagttcgcatgctaaggttgaactcttctgctgcataggaaagttggctgacttcttatattatgcgagcctagcttaggtacctcctgtggggagaagcgattgcaatacatggtagcatgttgtagagctcctcaccccagttagtcagtgactgatgatggtatcctcttaccagtcctctggtggtatcatcttttgttcacggaggtcgatgaagtactgcctccgataaaaaaaagacgcttttgacattattgctccccaaattcttattttgacggctatactttgcccagcgagtaatatctaataaatatacgttttaacgcaattacatttttttttgtccaagaaaaatatttttggaagctgttgaaggtcaagtgtcaaaattttggatagacgttgacgtagtaggttgagagcaggtacttgcgtgcttcccctgtgaagttttgtttcataat

SEQ ID NO: 17304 - DNA, 4993 bp, Zea Mays
cttgccttggctgacggctcccccacggaccacggttgtttggctgcgcggcgtgtgcccttgcggtcattcgtcgtccagccagccgtccagtggccttgcccggcggccggagcgggcgagcggcggtccggccttctcggctcctcgccgtccggcgtcctccgtcactctcgctcagccgctgtgtccggccagcaggtagcagctgtgtccgtccgagtgtccgacgtcctccggcgctcagccattgtctccggcgctcagccgccttgtccggccagccggccaggccgacagggccagcgccgagcgccgctccagcctccaggctcaactccaagtcagaattgagaaataagatggaaaatgattggttgaatcatagaatggtatgctatatagagcgagatatctttgcaattattcgaagtgatgatattttataccattttcaagaattgaagagtatatgaaaaaacttgccatgcgtatgtttaaattcacgtgctaatgttgatgaagttattagaggcggggaagaaccaaatcttctctaattaggtacttttatatttttttatcaagtttattgtatttttatatgctgaattgagattaatactatcttagtctatgtttgtggtatattttgttttagcggtatatttagccgctcaatatattgggggctgtttaaagtaaacttaaagtattatagagtggcccgggacgttaattttatagagctccgccactgatcacagcagcacaagcaggcgcatcacttcgccttccatgcgtactagacggtgttggtcgcgctcgaggtttacttacggggctccgttagcgtcgagcccccggatgtgcctctccttcgggacctgttcctaatcgagggcaaggtcagtattcagtacctgtagtctcaattgctgtacttctgttgtttaatcgtattagaagtcattactgctattggtgccaaaattaagctgtggtacatgaccaaagctagccttatctcagctaagcgcatacgtagcatctaacagaaactatttggtgttttaaggtgaatgcattctcatccactgctatgttgcaacaacaaaattatattgtgttctttgtttacattaattttgatcaaatatgttggatctgtgtactgccatttgactgctggggaaggggaaccggacggtcggaagatgacggcgaggaggtgtacttggacagagggagagggagggcgtccaggtctttagtatttttgcctttttcccatgtcatgaatagtgagaacagactattgcaactaagaaatgggagcaaaagagagaaaaccctcagattcaaagagttcgtttatgcagggttaaattttcaaaggcgtgtgaattagatgtcaaatgtagaggtgcacgtattgagggttaaatattaacatttctccctcactagtcactaggtatttattttcatctcatcatgtggatcatacaaccttctgaacaattttagtccaattatcaaatcaattagaaattttatcttcgccgtagttatttctgtgtgtgatattactgggcccattctgtgtctattagggtagatgtaaaatggtttgttttctgcaaggctgcatctcggctgagtaaaacaagtactgaggcagtagactggtatttgcacatcgcacatgcttgaaattggtgattgatagattgtaaaatatgaaccggtagttgatagacaatagtaaattgtgaaatgtgaatcagtagttggtagacagtagagactagagacaaaggtttccatatgccaaaaattggtgattgacagattgtgaaatgcgacatgtttagtgtcctagttctttggaccccggtggctgccacgacacccgacacccgccgcctgctccaccgtcgcggctgctcatgccctcgctgctgacctagcgcatgcaaacctcacatttcgaggcctaaaaccctcagcgtcagtggccggcacgtggcctctctagtgcccatcggtgccatggcagctctcgcgccgtggatcctacggcggcgacccgtccgctctgtcgcttctctggtctccattcgtgattcatggcatcgaaggtgtgggtcctcttcctcatatccttcagcatcgttcaagtgtttgtggggatggtttggaccagaggcacacgggcggaggaggccgtggtttcagcagcccgtgaggtgcgggagcacgacgatcacacttgatacagatggcaagtttgcgaggtttggagtcggcgatatgggtgtcaccaagcagaagtggaggcagcagccgcctccaaagaagaagatgtcgagaaaggccaaggtcaaccagctcaagtggtaccgcctgaaggccaagaagaagatgaagtcacccaaccccgaagttaggatcagatacaagcttgaaaaggctaagaggaaggaggaatggttgattgagaagctgaggaagtatgaggtcccgaggacaccggagccagttcatgaccctgagattcttactgaggaggaaaagttttatctcaagcgaacgggggagaagaagaagaattatgttcctgttgggaggagaggggtatttggtggtgtggttctcaacatgcacctccattggaagaagcatgagaccgtgaaggtggtttgcaagccttgtcggcctggccaagtttacgagtatgctgaggaattgacaaggctcagcaaaggcacagtcattgatattaaacctaataatacgattatgttttatcgcgggaagaactatgtgcaaccaaaggtgatgtcacctcctgaaactctttcgaagcagaaggccttagagaaatatagatatctacaatcccttgagcataccagccagtttattgagaagctggagaaggagcttgaagattacaagaagcatgttgctttattcaagaaccataataagggggttgctattgagaaaatcagcaatgaagataccactgttgatgatcctgcaactacctcagattctaaatgagctaactatttggacatgctggcatgatagatctttcagtcgtcaaatcttgcaagcctacatagctcaatgttcactattcatattaaatatgctggcttcagttgtggtgatatagggagctagcttgaaaactcagattcagatagaagaagtaatagccataggattttaaaggcttgcaagattaaaatcctggttgatggaaagctgtattacttgaaaaatacctcgttcatcaatctatctctataaggaaaggctagtagcatgatactgagtgcagatcagccttttaatatttctgcaatctttcctgtaaacacttttatgataaaataggacattcttttgaattgtggcccccttttatgtaggcttttcacttcttgggccttccttgctacataaaagacaatgaaattgtaattttggagctggaatagttctgcaggaccctctcagaaatgaagacatttactgtgccacacgttcacgtactcagtattcatacaccaatgatggacgtcagaagtgcacaagatttctgtgcgtcatttgggcattggtgcatgaactttgaaacaacttgttggtctacatttgtgtgctttttgcaggtactgggccgttcctgagctgagaagatgggcatgtgcagaagcacaatgatgactttaaggatttggcttgataaaaaggaagcgaaaagacagcttcgtcagagatagagctctagtcctacgggagttgcactctgctgcacagcgcgagtcttgcattggcaacaagaaattctggaaagagagaacctaccaagagctgagacgtctattcatggaatcgtgacaaacatcgatggttgcagctttctctttccagaaagacctgatctgaagtctgtagtgcttaaagagcaaccattctctttgcagagggaaacatcgatgaacaaaccatttttcatgctgttgacattaaatttcagtgatggttgcagctgtttgagctcctcaattggatggcctgttgattttcagaagcgaaaagacagcttcgtcagagatagagctctagtcctacgggagttgtactctgctgcacagcgcgagtcttgcattgggcaacaagaaattctggaaagagagaacctaccaagagctgagacgtctattcatggaatcgtgacaaacatcgttaggtatgacactgaagatgaaaagttggctccacccaagaatgatttgatgaatcacagccgcagcaaccctgcaaaacggcacgtggaaggcactgattgccactcgtcattgccaaagaaactgaagtactttttgaaagacaagaagctgaactgctaaaagtgtaaaaccgtagaaggtagatagagaatgctgtaggtttgtttattttggttattagacgagttatacgtagcatagatgcatgggaagttcgcatgctaaggttgaactcttctgctgcataggaaagttggctgacttcttatattatgcgagcctagcttaggtacctcctgtggggagaagcgattgcaatacatggtagcatgttgtagagctcctcaccccagttagtcagtgactgatgatggtatcctcttaccagtcctctggtggtatcatcttttgttcacggaggtcgatgaagtactgcctccgataaaaaaaagacgcttttgacattattgctccccaaattcttattttgacggctatactttgcccagcgagtaatatctaataaatatacgttttaacgcaattacatttttttttgtccaagaaaaatatttttggaagctgttgaaggtcaagtgtcaaaattttggatagacgttgacgtagtaggttgagagcaggtacttgcgtgcttcccctgtgaagttttgtttcataat

SEQ ID NO: 17305 - DNA, 4584 bp, Zea Mays
cttgccttggctgacggctcccccacggaccacggttgtttggctgcgcggcgtgtgcccttgcggtcattcgtcgtccagccagccgtccagtggccttgcccggcggccggagcgggcgagcggcggtccggccttctcggctcctcgccgtccggcgtcctccgtcactctcgctcagccgctgtgtccggccagcaggtagcagctgtgtccgtccgagtgtccgacgtcctccggcgctcagccattgtctccggcgctcagccgccttgtccggccagccggccaggccgacagggccagcgccgagcgccgctccagcctccaggctcaactccaagtcagaattgagaaataagatggaaaatgattggttgaatcatagaatggtatgctatatagagcgagatatctttgcaattattcgaagtgatgatattttataccattttcaagaattgaagagtatatgaaaaaacttgccatgcgtatgtttaaattcacgtgctaatgttgatgaagttattagaggcggggaagaaccaaatcttctctaattaggtacttttatatttttttatcaagtttattgtatttttatatgctgaattgagattaatactatcttagtctatgtttgtggtatattttgttttagcggtatatttagccgctcaatatattgggggctgtttaaagtaaacttaaagtattatagagtggcccgggacgttaattttatagagctccgccactgatcacagcagcacaagcaggcgcatcacttcgccttccatgcgtactagacggtgttggtcgcgctcgaggtttacttacggggctccgttagcgtcgagcccccggatgtgcctctccttcgggacctgttcctaatcgagggcaaggtcagtattcagtacctgtagtctcaattgctgtacttctgttgtttaatcgtattagaagtcattactgctattggtgccaaaattaagctgtggtacatgaccaaagctagccttatctcagctaagcgcatacgtagcatctaacagaaactatttggtgttttaaggtgaatgcattctcatccactgctatgttgcaacaacaaaattatattgtgttctttgtttacattaattttgatcaaatatgttggatctgtgtactgccatttgactgctggggaaggggaaccggacggtcggaagatgacggcgaggaggtgtacttggacagagggagagggagggcgtccaggtctttagtatttttgcctttttcccatgtcatgaatagtgagaacagactattgcaactaagaaatgggagcaaaagagagaaaaccctcagattcaaagagttcgtttatgcagggttaaattttcaaaggcgtgtgaattagatgtcaaatgtagaggtgcacgtattgagggttaaatattaacatttctccctcactagtcactaggtatttattttcatctcatcatgtggatcatacaaccttctgaacaattttagtccaattatcaaatcaattagaaattttatcttcgccgtagttatttctgtgtgtgatattactgggcccattctgtgtctattagggtagatgtaaaatggtttgttttctgcaaggctgcatctcggctgagtaaaacaagtactgaggcagtagactggtatttgcacatcgcacatgcttgaaattggtgattgatagattgtaaaatatgaaccggtagttgatagacaatagtaaattgtgaaatgtgaatcagtagttggtagacagtagagactagagacaaaggtttccatatgccaaaaattggtgattgacagattgtgaaatgcgacatgtttagtgtcctagttctttggaccccggtggctgccacgacacccgacacccgccgcctgctccaccgtcgcggctgctcatgccctcgctgctgacctagcgcatgcaaacctcacatttcgaggcctaaaaccctcagcgtcagtggccggcacgtggcctctctagtgcccatcggtgccatggcagctctcgcgccgtggatcctacggcggcgacccgtccgctctgtcgcttctctggtctccattcgtgattcatggcatcgaaggtgtgggtcctcttcctcatatccttcagcatcgttcaagtgtttgtggggatggtttggaccagaggcacacgggcggaggaggccgtggtttcagcagcccgtgaggtgcgggagcacgacgatcacacttgatacagatggcaagtttgcgaggtttggagtcggcgatatgggtgtcaccaagcagaagtggaggcagcagccgcctccaaagaagaagatgtcgagaaaggccaaggtcaaccagctcaagtggtaccgcctgaaggccaagaagaagatgaagtcacccaaccccgaagttaggatcagatacaagcttgaaaaggctaagaggaaggaggaatggttgattgagaagctgaggaagtatgaggtcccgaggacaccggagccagttcatgaccctgagattcttactgaggaggaaaagttttatctcaagcgaacgggggagaagaagaagaattatgttcctgttgggaggagaggggtatttggtggtgtggttctcaacatgcacctccattggaagaagcatgagaccgtgaaggtggtttgcaagccttgtcggcctggccaagtttacgagtatgctgaggaattgacaaggctcagcaaaggcacagtcattgatattaaacctaataatacgattatgttttatcgcgggaagaactatgtgcaaccaaaggtgatgtcacctcctgaaactctttcgaagcagaaggccttagagaaatatagatatctacaatcccttgagcataccagccagtttattgagaagctggagaaggagcttgaagattacaagaagcatgttgctttattcaagaaccataataagggggttgctattgagaaaatcagcaatgaagataccactgttgatgatcctgcaactacctcagattctaaatgagctaactatttggacatgctggcatgatagatctttcagtcgtcaaatcttgcaagcctacatagctcaatgttcactattcatattaaatatgctggcttcagttgtggtgatatagggagctagcttgaaaactcagattcagatagaagaagtaatagccataggattttaaaggcttgcaagattaaaatcctggttgatggaaagctgtattacttgaaaaatacctcgttcatcaatctatctctataaggaaaggctagtagcatgatactgagtgcagatcagccttttaatatttctgcaatctttcctgtaaacacttttatgataaaataggacattcttttgaattgtggcccccttttatgtaggcttttcacttcttgggccttccttgctacataaaagacaatgaaattgtaattttggagctggaatagttctgcaggaccctctcagaaatgaagacatttactgtgccacacgttcacgtactcagtattcatacaccaatgatggacgtcagaagtgcacaagatttctgtactgggccgttcctgagctgagaagatgggcatgtgcagaagcacaatgatgactttaaggatttggcttgataaaaaggaagcgaaaagacagcttcgtcagagatagagctctagtcctacgggagttgtactctgctgcacagcgcgagtcttgcattgggcaacaagaaattctggaaagagagaacctaccaagagctgagacgtctattcatggaatcgtgacaaacatcgttaggtatgacactgaagatgaaaagttggctccacccaagaatgatttgatgaatcacagccgcagcaaccctgcaaaacggcacgtggaaggcactgattgccactcgtcattgccaaagaaactgaagtactttttgaaagacaagaagctgaactgctaaaagtgtaaaaccgtagaaggtagatagagaatgctgtaggtttgtttattttggttattagacgagttatacgtagcatagatgcatgggaagttcgcatgctaaggttgaactcttctgctgcataggaaagttggctgacttcttatattatgcgagcctagcttaggtacctcctgtggggagaagcgattgcaatacatggtagcatgttgtagagctcctcaccccagttagtcagtgactgatgatggtatcctcttaccagtcctctggtggtatcatcttttgttcacggaggtcgatgaagtactgcctccgataaaaaaaagacgcttttgacattattgctccccaaattcttattttgacggctatactttgcccagcgagtaatatctaataaatatacgttttaacgcaattacatttttttttgtccaagaaaaatatttttggaagctgttgaaggtcaagtgtcaaaattttggatagacgttgacgtagtaggttgagagcaggtacttgcgtgcttcccctgtgaagttttgtttcataat

SEQ ID NO: 17306 - DNA, 4209 bp, Zea Mays
cttgccttggctgacggctcccccacggaccacggttgtttggctgcgcggcgtgtgcccttgcggtcattcgtcgtccagccagccgtccagtggccttgcccggcggccggagcgggcgagcggcggtccggccttctcggctcctcgccgtccggcgtcctccgtcactctcgctcagccgctgtgtccggccagcaggtagcagctgtgtccgtccgagtgtccgacgtcctccggcgctcagccattgtctccggcgctcagccgccttgtccggccagccggccaggccgacagggccagcgccgagcgccgctccagcctccaggctcaactccaagtcagaattgagaaataagatggaaaatgattggttgaatcatagaatgcagcacaagcaggcgcatcacttcgccttccatgcgtactagacggtgttggtcgcgctcgaggtttacttacggggctccgttagcgtcgagcccccggatgtgcctctccttcgggacctgttcctaatcgagggcaaggtcagtattcagtacctgtagtctcaattgctgtacttctgttgtttaatcgtattagaagtcattactgctattggtgccaaaattaagctgtggtacatgaccaaagctagccttatctcagctaagcgcatacgtagcatctaacagaaactatttggtgttttaaggtgaatgcattctcatccactgctatgttgcaacaacaaaattatattgtgttctttgtttacattaattttgatcaaatatgttggatctgtgtactgccatttgactgctggggaaggggaaccggacggtcggaagatgacggcgaggaggtgtacttggacagagggagagggagggcgtccaggtctttagtatttttgcctttttcccatgtcatgaatagtgagaacagactattgcaactaagaaatgggagcaaaagagagaaaaccctcagattcaaagagttcgtttatgcagggttaaattttcaaaggcgtgtgaattagatgtcaaatgtagaggtgcacgtattgagggttaaatattaacatttctccctcactagtcactaggtatttattttcatctcatcatgtggatcatacaaccttctgaacaattttagtccaattatcaaatcaattagaaattttatcttcgccgtagttatttctgtgtgtgatattactgggcccattctgtgtctattagggtagatgtaaaatggtttgttttctgcaaggctgcatctcggctgagtaaaacaagtactgaggcagtagactggtatttgcacatcgcacatgcttgaaattggtgattgatagattgtaaaatatgaaccggtagttgatagacaatagtaaattgtgaaatgtgaatcagtagttggtagacagtagagactagagacaaaggtttccatatgccaaaaattggtgattgacagattgtgaaatgcgacatgtttagtgtcctagttctttggaccccggtggctgccacgacacccgacacccgccgcctgctccaccgtcgcggctgctcatgccctcgctgctgacctagcgcatgcaaacctcacatttcgaggcctaaaaccctcagcgtcagtggccggcacgtggcctctctagtgcccatcggtgccatggcagctctcgcgccgtggatcctacggcggcgacccgtccgctctgtcgcttctctggtctccattcgtgattcatggcatcgaaggtgtgggtcctcttcctcatatccttcagcatcgttcaagtgtttgtggggatggtttggaccagaggcacacgggcggaggaggccgtggtttcagcagcccgtgaggtgcgggagcacgacgatcacacttgatacagatggcaagtttgcgaggtttggagtcggcgatatgggtgtcaccaagcagaagtggaggcagcagccgcctccaaagaagaagatgtcgagaaaggccaaggtcaaccagctcaagtggtaccgcctgaaggccaagaagaagatgaagtcacccaaccccgaagttaggatcagatacaagcttgaaaaggctaagaggaaggaggaatggttgattgagaagctgaggaagtatgaggtcccgaggacaccggagccagttcatgaccctgagattcttactgaggaggaaaagttttatctcaagcgaacgggggagaagaagaagaattatgttcctgttgggaggagaggggtatttggtggtgtggttctcaacatgcacctccattggaagaagcatgagaccgtgaaggtggtttgcaagccttgtcggcctggccaagtttacgagtatgctgaggaattgacaaggctcagcaaaggcacagtcattgatattaaacctaataatacgattatgttttatcgcgggaagaactatgtgcaaccaaaggtgatgtcacctcctgaaactctttcgaagcagaaggccttagagaaatatagatatctacaatcccttgagcataccagccagtttattgagaagctggagaaggagcttgaagattacaagaagcatgttgctttattcaagaaccataataagggggttgctattgagaaaatcagcaatgaagataccactgttgatgatcctgcaactacctcagattctaaatgagctaactatttggacatgctggcatgatagatctttcagtcgtcaaatcttgcaagcctacatagctcaatgttcactattcatattaaatatgctggcttcagttgtggtgatatagggagctagcttgaaaactcagattcagatagaagaagtaatagccataggattttaaaggcttgcaagattaaaatcctggttgatggaaagctgtattacttgaaaaatacctcgttcatcaatctatctctataaggaaaggctagtagcatgatactgagtgcagatcagccttttaatatttctgcaatctttcctgtaaacacttttatgataaaataggacattcttttgaattgtggcccccttttatgtaggcttttcacttcttgggccttccttgctacataaaagacaatgaaattgtaattttggagctggaatagttctgcaggaccctctcagaaatgaagacatttactgtgccacacgttcacgtactcagtattcatacaccaatgatggacgtcagaagtgcacaagatttctgtactgggccgttcctgagctgagaagatgggcatgtgcagaagcacaatgatgactttaaggatttggcttgataaaaaggaagcgaaaagacagcttcgtcagagatagagctctagtcctacgggagttgtactctgctgcacagcgcgagtcttgcattgggcaacaagaaattctggaaagagagaacctaccaagagctgagacgtctattcatggaatcgtgacaaacatcgttaggtatgacactgaagatgaaaagttggctccacccaagaatgatttgatgaatcacagccgcagcaaccctgcaaaacggcacgtggaaggcactgattgccactcgtcattgccaaagaaactgaagtactttttgaaagacaagaagctgaactgctaaaagtgtaaaaccgtagaaggtagatagagaatgctgtaggtttgtttattttggttattagacgagttatacgtagcatagatgcatgggaagttcgcatgctaaggttgaactcttctgctgcataggaaagttggctgacttcttatattatgcgagcctagcttaggtacctcctgtggggagaagcgattgcaatacatggtagcatgttgtagagctcctcaccccagttagtcagtgactgatgatggtatcctcttaccagtcctctggtggtatcatcttttgttcacggaggtcgatgaagtactgcctccgataaaaaaaagacgcttttgacattattgctccccaaattcttattttgacggctatactttgcccagcgagtaatatctaataaatatacgttttaacgcaattacatttttttttgtccaagaaaaatatttttggaagctgttgaaggtcaagtgtcaaaattttggatagacgttgacgtagtaggttgagagcaggtacttgcgtgcttcccctgtgaagttttgtttcataat

SEQ ID NO: 17307 - DNA, 4012 bp, Zea Mays
cttgccttggctgacggctcccccacggaccacggttgtttggctgcgcggcgtgtgcccttgcggtcattcgtcgtccagccagccgtccagtggccttgcccggcggccggagcgggcgagcggcggtccggccttctcggctcctcgccgtccggcgtcctccgtcactctcgctcagccgctgtgtccggccagcaggtagcagctgtgtccgtccgagtgtccgacgtcctccggcgctcagccattgtctccggcgctcagccgccttgtccggccagccggccaggccgacagggccagcgccgagcgccgctccagcctccaggctcaactccaagtcagaattgagaaataagatggaaaatgattggttgaatcatagaatggtatgctatatagagcgagatatctttgcaattattcgaagtgatgatattttataccattttcaagaattgaagagtatatgaaaaaacttgccatgcgtatgtttaaattcacgtgctaatgttgatgaagttattagaggcggggaagaaccaaatcttctctaattaggtacttttatatttttttatcaagtttattgtatttttatatgctgaattgagattaatactatcttagtctatgtttgtggtatattttgttttagcggtatatttagccgctcaatatattgggggctgtttaaagtaaacttaaagtattatagagtggcccgggacgttaattttatagagctccgccactgatcacagcagcacaagcaggcgcatcacttcgccttccatgcgtactagacggtgttggtcgcgctcgaggtttacttacggggctccgttagcgtcgagcccccggatgtgcctctccttcgggacctgttcctaatcgagggcaaggtcagtattcagtacctgtagtctcaattgctgtacttctgttgtttaatcgtattagaagtcattactgctattggtgccaaaattaagctgtggtacatgaccaaagctagccttatctcagctaagcgcatacgtagcatctaacagaaactatttggtgttttaaggtgaatgcattctcatccactgctatgttgcaacaacaaaattatattgtgttctttgtttacattaattttgatcaaatatgttggatctgtgtactgccatttgactgctggggaaggggaaccggacggtcggaagatgacggcgaggaggtgtacttggacagagggagagggagggcgtccaggtctttagtatttttgcctttttcccatgtcatgaatagtgagaacagactattgcaactaagaaatgggagcaaaagagagaaaaccctcagattcaaagagttcgtttatgcagggttaaattttcaaaggcgtgtgaattagatgtcaaatgtagaggtgcacgtattgagggttaaatattaacatttctccctcactagtcactaggtatttattttcatctcatcatgtggatcatacaaccttctgaacaattttagtccaattatcaaatcaattagaaattttatcttcgccgtagttatttctgtgtgtgatattactgggcccattctgtgtctattagggtagatgtaaaatggtttgttttctgcaaggctgcatctcggctgagtaaaacaagtactgaggcagtagactggtatttgcacatcgcacatgcttgaaattggtgattgatagattgtaaaatatgaaccggtagttgatagacaatagtaaattgtgaaatgtgaatcagtagttggtagacagtagagactagagacaaaggtttccatatgccaaaaattggtgattgacagattgtgaaatgcgacatgtttagtgtcctagttctttggaccccggtggctgccacgacacccgacacccgccgcctgctccaccgtcgcggctgctcatgccctcgctgctgacctagcgcatgcaaacctcacatttcgaggcctaaaaccctcagcgtcagtggccggcacgtggcctctctagtgcccatcggtgccatggcagctctcgcgccgtggatcctacggcggcgacccgtccgctctgtcgcttctctggtctccattcgtgattcatggcatcgaaggtgtgggtcctcttcctcatatccttcagcatcgttcaagtgtttgtggggatggtttggaccagaggcacacgggcggaggaggccgtggtttcagcagcccgtgaggtgcgggagcacgacgatcacacttgatacagatggcaagtttgcgaggtttggagtcggcgatatgggtgtcaccaagcagaagtggaggcagcagccgcctccaaagaagaagatgtcgagaaaggccaaggtcaaccagctcaagtggtaccgcctgaaggccaagaagaagatgaagtcacccaaccccgaagttaggatcagatacaagcttgaaaaggctaagaggaaggaggaatggttgattgagaagctgaggaagtatgaggtcccgaggacaccggagccagttcatgaccctgagattcttactgaggaggaaaagttttatctcaagcgaacgggggagaagaagaagaattatgttcctgttgggaggagaggggtatttggtggtgtggttctcaacatgcacctccattggaagaagcatgagaccgtgaaggtggtttgcaagccttgtcggcctggccaagtttacgagtatgctgaggaattgacaaggctcagcaaaggcacagtcattgatattaaacctaataatacgattatgttttatcgcgggaagaactatgtgcaaccaaaggtgatgtcacctcctgaaactctttcgaagcagaaggcttttcacttcttgggccttccttgctacataaaagacaatgaaattgtaattttggagctggaatagttctgcaggaccctctcagaaatgaagacatttactgtgccacacgttcacgtactcagtattcatacaccaatgatggacgtcagaagtgcacaagatttctgtactgggccgttcctgagctgagaagatgggcatgtgcagaagcacaatgatgactttaaggatttggcttgataaaaaggaagcgaaaagacagcttcgtcagagatagagctctagtcctacgggagttgtactctgctgcacagcgcgagtcttgcattgggcaacaagaaattctggaaagagagaacctaccaagagctgagacgtctattcatggaatcgtgacaaacatcgttaggtatgacactgaagatgaaaagttggctccacccaagaatgatttgatgaatcacagccgcagcaaccctgcaaaacggcacgtggaaggcactgattgccactcgtcattgccaaagaaactgaagtactttttgaaagacaagaagctgaactgctaaaagtgtaaaaccgtagaaggtagatagagaatgctgtaggtttgtttattttggttattagacgagttatacgtagcatagatgcatgggaagttcgcatgctaaggttgaactcttctgctgcataggaaagttggctgacttcttatattatgcgagcctagcttaggtacctcctgtggggagaagcgattgcaatacatggtagcatgttgtagagctcctcaccccagttagtcagtgactgatgatggtatcctcttaccagtcctctggtggtatcatcttttgttcacggaggtcgatgaagtactgcctccgataaaaaaaagacgcttttgacattattgctccccaaattcttattttgacggctatactttgcccagcgagtaatatctaataaatatacgttttaacgcaattacatttttttttgtccaagaaaaatatttttggaagctgttgaaggtcaagtgtcaaaattttggatagacgttgacgtagtaggttgagagcaggtacttgcgtgcttcccctgtgaagttttgtttcataat

SEQ ID NO: 17308 - DNA, 3598 bp, Zea Mays
cttgccttggctgacggctcccccacggaccacggttgtttggctgcgcggcgtgtgcccttgcggtcattcgtcgtccagccagccgtccagtggccttgcccggcggccggagcgggcgagcggcggtccggccttctcggctcctcgccgtccggcgtcctccgtcactctcgctcagccgctgtgtccggccagcaggtagcagctgtgtccgtccgagtgtccgacgtcctccggcgctcagccattgtctccggcgctcagccgccttgtccggccagccggccaggccgacagggccagcgccgagcgccgctccagcctccaggctcaactccaagtcagaattgagaaataagatggaaaatgattggttgaatcatagaatgcagcacaagcaggcgcatcacttcgccttccatgcgtactagacggtgttggtcgcgctcgaggtttacttacggggctccgttagcgtcgagcccccggatgtgcctctccttcgggacctgttcctaatcgagggcaagtgtcctagttctttggaccccggtggctgccacgacacccgacacccgccgcctgctccaccgtcgcggctgctcatgccctcgctgctgacctagcgcatgcaaacctcacatttcgaggcctaaaaccctcagcgtcagtggccggcacgtggcctctctagtgcccatcggtgccatggcagctctcgcgccgtggatcctacggcggcgacccgtccgctctgtcgcttctctggtctccattcgtgattcatggcatcgaaggtgtgggtcctcttcctcatatccttcagcatcgttcaagtgtttgtggggatggtttggaccagaggcacacgggcggaggaggccgtggtttcagcagcccgtgaggtgcgggagcacgacgatcacacttgatacagatggcaagtttgcgaggtttggagtcggcgatatgggtgtcaccaagcagaagtggaggcagcagccgcctccaaagaagaagatgtcgagaaaggccaaggtcaaccagctcaagtggtaccgcctgaaggccaagaagaagatgaagtcacccaaccccgaagttaggatcagatacaagcttgaaaaggctaagaggaaggaggaatggttgattgagaagctgaggaagtatgaggtcccgaggacaccggagccagttcatgaccctgagattcttactgaggaggaaaagttttatctcaagcgaacgggggagaagaagaagaattatgttcctgttgggaggagaggggtatttggtggtgtggttctcaacatgcacctccattggaagaagcatgagaccgtgaaggtggtttgcaagccttgtcggcctggccaagtttacgagtatgctgaggaattgacaaggctcagcaaaggcacagtcattgatattaaacctaataatacgattatgttttatcgcgggaagaactatgtgcaaccaaaggtgatgtcacctcctgaaactctttcgaagcagaaggccttagagaaatatagatatctacaatcccttgagcataccagccagtttattgagaagctggagaaggagcttgaagattacaagaagcatgttgctttattcaagaaccataataagggggttgctattgagaaaatcagcaatgaagataccactgttgatgatcctgcaactacctcagattctaaatgagctaactatttggacatgctggcatgatagatctttcagtcgtcaaatcttgcaagcctacatagctcaatgttcactattcatattaaatatgctggcttcagttgtggtgatatagggagctagcttgaaaactcagattcagatagaagaagtaatagccataggattttaaaggcttgcaagattaaaatcctggttgatggaaagctgtattacttgaaaaatacctcgttcatcaatctatctctataaggaaaggctagtagcatgatactgagtgcagatcagccttttaatatttctgcaatctttcctgtaaacacttttatgataaaataggacattcttttgaattgtggcccccttttatgtaggcttttcacttcttgggccttccttgctacataaaagacaatgaaattgtaattttggagctggaatagttctgcaggaccctctcagaaatgaagacatttactgtgccacacgttcacgtactcagtattcatacaccaatgatggacgtcagaagtgcacaagatttctgtgcgtcatttgggcattggtgcatgaactttgaaacaacttgttggtctacatttgtgtgctttttgcaggtactgggccgttcctgagctgagaagatgggcatgtgcagaagcacaatgatgactttaaggatttggcttgataaaaaggaagcgaaaagacagcttcgtcagagatagagctctagtcctacgggagttgcactctgctgcacagcgcgagtcttgcattggcaacaagaaattctggaaagagagaacctaccaagagctgagacgtctattcatggaatcgtgacaaacatcgatggttgcagctttctctttccagaaagacctgatctgaagtctgtagtgcttaaagagcaaccattctctttgcagagtgatggttgcagctgtttgagctcctcaattggatggcctgttgattttcagaagcgaaaagacagcttcgtcagagatagagctctagtcctacgggagttgtactctgctgcacagcgcgagtcttgcattgggcaacaagaaattctggaaagagagaacctaccaagagctgagacgtctattcatggaatcgtgacaaacatcgttaggtatgacactgaagatgaaaagttggctccacccaagaatgatttgatgaatcacagccgcagcaaccctgcaaaacggcacgtggaaggcactgattgccactcgtcattgccaaagaaactgaagtactttttgaaagacaagaagctgaactgctaaaagtgtaaaaccgtagaaggtagatagagaatgctgtaggtttgtttattttggttattagacgagttatacgtagcatagatgcatgggaagttcgcatgctaaggttgaactcttctgctgcataggaaagttggctgacttcttatattatgcgagcctagcttaggtacctcctgtggggagaagcgattgcaatacatggtagcatgttgtagagctcctcaccccagttagtcagtgactgatgatggtatcctcttaccagtcctctggtggtatcatcttttgttcacggaggtcgatgaagtactgcctccgataaaaaaaagacgcttttgacattattgctccccaaattcttattttgacggctatactttgcccagcgagtaatatctaataaatatacgttttaacgcaattacatttttttttgtccaagaaaaatatttttggaagctgttgaaggtcaagtgtcaaaattttggatagacgttgacgtagtaggttgagagcaggtacttgcgtgcttcccctgtgaagttttgtttcataat

SEQ ID NO: 17309 - DNA, 3401 bp, Zea Mays
cttgccttggctgacggctcccccacggaccacggttgtttggctgcgcggcgtgtgcccttgcggtcattcgtcgtccagccagccgtccagtggccttgcccggcggccggagcgggcgagcggcggtccggccttctcggctcctcgccgtccggcgtcctccgtcactctcgctcagccgctgtgtccggccagcaggtagcagctgtgtccgtccgagtgtccgacgtcctccggcgctcagccattgtctccggcgctcagccgccttgtccggccagccggccaggccgacagggccagcgccgagcgccgctccagcctccaggctcaactccaagtcagaattgagaaataagatggaaaatgattggttgaatcatagaatggtatgctatatagagcgagatatctttgcaattattcgaagtgatgatattttataccattttcaagaattgaagagtatatgaaaaaacttgccatgcgtatgtttaaattcacgtgctaatgttgatgaagttattagaggcggggaagaaccaaatcttctctaattaggtacttttatatttttttatcaagtttattgtatttttatatgctgaattgagattaatactatcttagtctatgtttgtggtatattttgttttagcggtatatttagccgctcaatatattgggggctgtttaaagtaaacttaaagtattatagagtggcccgggacgttaattttatagagctccgccactgatcacagcagcacaagcaggcgcatcacttcgccttccatgcgtactagacggtgttggtcgcgctcgaggtttacttacggggctccgttagcgtcgagcccccggatgtgcctctccttcgggacctgttcctaatcgagggcaagtgtcctagttctttggaccccggtggctgccacgacacccgacacccgccgcctgctccaccgtcgcggctgctcatgccctcgctgctgacctagcgcatgcaaacctcacatttcgaggcctaaaaccctcagcgtcagtggccggcacgtggcctctctagtgcccatcggtgccatggcagctctcgcgccgtggatcctacggcggcgacccgtccgctctgtcgcttctctggtctccattcgtgattcatggcatcgaaggtgtgggtcctcttcctcatatccttcagcatcgttcaagtgtttgtggggatggtttggaccagaggcacacgggcggaggaggccgtggtttcagcagcccgtgaggtgcgggagcacgacgatcacacttgatacagatggcaagtttgcgaggtttggagtcggcgatatgggtgtcaccaagcagaagtggaggcagcagccgcctccaaagaagaagatgtcgagaaaggccaaggtcaaccagctcaagtggtaccgcctgaaggccaagaagaagatgaagtcacccaaccccgaagttaggatcagatacaagcttgaaaaggctaagaggaaggaggaatggttgattgagaagctgaggaagtatgaggtcccgaggacaccggagccagttcatgaccctgagattcttactgaggaggaaaagttttatctcaagcgaacgggggagaagaagaagaattatgttcctgttgggaggagaggggtatttggtggtgtggttctcaacatgcacctccattggaagaagcatgagaccgtgaaggtggtttgcaagccttgtcggcctggccaagtttacgagtatgctgaggaattgacaaggctcagcaaaggcacagtcattgatattaaacctaataatacgattatgttttatcgcgggaagaactatgtgcaaccaaaggtgatgtcacctcctgaaactctttcgaagcagaaggcttttcacttcttgggccttccttgctacataaaagacaatgaaattgtaattttggagctggaatagttctgcaggaccctctcagaaatgaagacatttactgtgccacacgttcacgtactcagtattcatacaccaatgatggacgtcagaagtgcacaagatttctgtgcgtcatttgggcattggtgcatgaactttgaaacaacttgttggtctacatttgtgtgctttttgcaggtactgggccgttcctgagctgagaagatgggcatgtgcagaagcacaatgatgactttaaggatttggcttgataaaaaggaagcgaaaagacagcttcgtcagagatagagctctagtcctacgggagttgcactctgctgcacagcgcgagtcttgcattggcaacaagaaattctggaaagagagaacctaccaagagctgagacgtctattcatggaatcgtgacaaacatcgatggttgcagctttctctttccagaaagacctgatctgaagtctgtagtgcttaaagagcaaccattctctttgcagagtgatggttgcagctgtttgagctcctcaattggatggcctgttgattttcagaagcgaaaagacagcttcgtcagagatagagctctagtcctacgggagttgtactctgctgcacagcgcgagtcttgcattgggcaacaagaaattctggaaagagagaacctaccaagagctgagacgtctattcatggaatcgtgacaaacatcgttaggtatgacactgaagatgaaaagttggctccacccaagaatgatttgatgaatcacagccgcagcaaccctgcaaaacggcacgtggaaggcactgattgccactcgtcattgccaaagaaactgaagtactttttgaaagacaagaagctgaactgctaaaagtgtaaaaccgtagaaggtagatagagaatgctgtaggtttgtttattttggttattagacgagttatacgtagcatagatgcatgggaagttcgcatgctaaggttgaactcttctgctgcataggaaagttggctgacttcttatattatgcgagcctagcttaggtacctcctgtggggagaagcgattgcaatacatggtagcatgttgtagagctcctcaccccagttagtcagtgactgatgatggtatcctcttaccagtcctctggtggtatcatcttttgttcacggaggtcgatgaagtactgcctccgataaaaaaaagacgcttttgacattattgctccccaaattcttattttgacggctatactttgcccagcgagtaatatctaataaatatacgttttaacgcaattacatttttttttgtccaagaaaaatatttttggaagctgttgaaggtcaagtgtcaaaattttggatagacgttgacgtagtaggttgagagcaggtacttgcgtgcttcccctgtgaagttttgtttcataat

SEQ ID NO: 17310 - DNA, 3209 bp, Zea Mays
cttgccttggctgacggctcccccacggaccacggttgtttggctgcgcggcgtgtgcccttgcggtcattcgtcgtccagccagccgtccagtggccttgcccggcggccggagcgggcgagcggcggtccggccttctcggctcctcgccgtccggcgtcctccgtcactctcgctcagccgctgtgtccggccagcaggtagcagctgtgtccgtccgagtgtccgacgtcctccggcgctcagccattgtctccggcgctcagccgccttgtccggccagccggccaggccgacagggccagcgccgagcgccgctccagcctccaggctcaactccaagtcagaattgagaaataagatggaaaatgattggttgaatcatagaatggtatgctatatagagcgagatatctttgcaattattcgaagtgatgatattttataccattttcaagaattgaagagtatatgaaaaaacttgccatgcgtatgtttaaattcacgtgctaatgttgatgaagttattagaggcggggaagaaccaaatcttctctaattaggtacttttatatttttttatcaagtttattgtatttttatatgctgaattgagattaatactatcttagtctatgtttgtggtatattttgttttagcggtatatttagccgctcaatatattgggggctgtttaaagtaaacttaaagtattatagagtggcccgggacgttaattttatagagctccgccactgatcacagcagcacaagcaggcgcatcacttcgccttccatgcgtactagacggtgttggtcgcgctcgaggtttacttacggggctccgttagcgtcgagcccccggatgtgcctctccttcgggacctgttcctaatcgagggcaagtgtcctagttctttggaccccggtggctgccacgacacccgacacccgccgcctgctccaccgtcgcggctgctcatgccctcgctgctgacctagcgcatgcaaacctcacatttcgaggcctaaaaccctcagcgtcagtggccggcacgtggcctctctagtgcccatcggtgccatggcagctctcgcgccgtggatcctacggcggcgacccgtccgctctgtcgcttctctggtctccattcgtgattcatggcatcgaaggtgtgggtcctcttcctcatatccttcagcatcgttcaagtgtttgtggggatggtttggaccagaggcacacgggcggaggaggccgtggtttcagcagcccgtgaggtgcgggagcacgacgatcacacttgatacagatggcaagtttgcgaggtttggagtcggcgatatgggtgtcaccaagcagaagtggaggcagcagccgcctccaaagaagaagatgtcgagaaaggccaaggtcaaccagctcaagtggtaccgcctgaaggccaagaagaagatgaagtcacccaaccccgaagttaggatcagatacaagcttgaaaaggctaagaggaaggaggaatggttgattgagaagctgaggaagtatgaggtcccgaggacaccggagccagttcatgaccctgagattcttactgaggaggaaaagttttatctcaagcgaacgggggagaagaagaagaattatgttcctgttgggaggagaggggtatttggtggtgtggttctcaacatgcacctccattggaagaagcatgagaccgtgaaggtggtttgcaagccttgtcggcctggccaagtttacgagtatgctgaggaattgacaaggctcagcaaaggcacagtcattgatattaaacctaataatacgattatgttttatcgcgggaagaactatgtgcaaccaaaggtgatgtcacctcctgaaactctttcgaagcagaaggtactgggccgttcctgagctgagaagatgggcatgtgcagaagcacaatgatgactttaaggatttggcttgataaaaaggaagcgaaaagacagcttcgtcagagatagagctctagtcctacgggagttgcactctgctgcacagcgcgagtcttgcattggcaacaagaaattctggaaagagagaacctaccaagagctgagacgtctattcatggaatcgtgacaaacatcgatggttgcagctttctctttccagaaagacctgatctgaagtctgtagtgcttaaagagcaaccattctctttgcagagggaaacatcgatgaacaaaccatttttcatgctgttgacattaaatttcagtgatggttgcagctgtttgagctcctcaattggatggcctgttgattttcagaagcgaaaagacagcttcgtcagagatagagctctagtcctacgggagttgtactctgctgcacagcgcgagtcttgcattgggcaacaagaaattctggaaagagagaacctaccaagagctgagacgtctattcatggaatcgtgacaaacatcgttaggtatgacactgaagatgaaaagttggctccacccaagaatgatttgatgaatcacagccgcagcaaccctgcaaaacggcacgtggaaggcactgattgccactcgtcattgccaaagaaactgaagtactttttgaaagacaagaagctgaactgctaaaagtgtaaaaccgtagaaggtagatagagaatgctgtaggtttgtttattttggttattagacgagttatacgtagcatagatgcatgggaagttcgcatgctaaggttgaactcttctgctgcataggaaagttggctgacttcttatattatgcgagcctagcttaggtacctcctgtggggagaagcgattgcaatacatggtagcatgttgtagagctcctcaccccagttagtcagtgactgatgatggtatcctcttaccagtcctctggtggtatcatcttttgttcacggaggtcgatgaagtactgcctccgataaaaaaaagacgcttttgacattattgctccccaaattcttattttgacggctatactttgcccagcgagtaatatctaataaatatacgttttaacgcaattacatttttttttgtccaagaaaaatatttttggaagctgttgaaggtcaagtgtcaaaattttggatagacgttgacgtagtaggttgagagcaggtacttgcgtgcttcccctgtgaagttttgtttcataat

SEQ ID NO: 17311 - DNA, 2347 bp, Zea Mays
cttgccttggctgacggctcccccacggaccacggttgtttggctgcgcggcgtgtgcccttgcggtcattcgtcgtccagccagccgtccagtggccttgcccggcggccggagcgggcgagcggcggtccggccttctcggctcctcgccgtccggcgtcctccgtcactctcgctcagccgctgtgtccggccagcaggtagcagctgtgtccgtccgagtgtccgacgtcctccggcgctcagccattgtctccggcgctcagccgccttgtccggccagccggccaggccgacagggccagcgccgagcgccgctccagcctccaggctcaactccaagtcagaattgagaaataagatggaaaatgattggttgaatcatagaatgcagcacaagcaggcgcatcacttcgccttccatgcgtactagacggtgttggtcgcgctcgaggtttacttacggggctccgttagcgtcgagcccccggatgtgcctctccttcgggacctgttcctaatcgagggcaagtgtcctagttctttggaccccggtggctgccacgacacccgacacccgccgcctgctccaccgtcgcggctgctcatgccctcgctgctgacctagcgcatgcaaacctcacatttcgaggcctaaaaccctcagcgtcagtggccggcacgtggcctctctagtgcccatcggtgccatggcagctctcgcgccgtggatcctacggcggcgacccgtccgctctgtcgcttctctggtctccattcgtgattcatggcatcgaaggtgtgggtcctcttcctcatatccttcagcatcgttcaagtgtttgtggggatggtttggaccagaggcacacgggcggaggaggccgtggtttcagcagcccgtgaggtgcgggagcacgacgatcacacttgatacagatggcaagtttgcgaggtttggagtcggcgatatgggtgtcaccaagcagaagtggaggcagcagccgcctccaaagaagaagatgtcgagaaaggccaaggtcaaccagctcaagtggtaccgcctgaaggccaagaagaagatgaagtcacccaaccccgaagttaggatcagatacaagcttgaaaaggctaagaggaaggaggaatggttgattgagaagctgaggaagtatgaggtcccgaggacaccggagccagttcatgaccctgagattcttactgaggaggaaaagttttatctcaagcgaacgggggagaagaagaagaattatgttcctgttgggaggagaggggtatttggtggtgtggttctcaacatgcacctccattggaagaagcatgagaccgtgaaggtggtttgcaagccttgtcggcctggccaagtttacgagtatgctgaggaattgacaaggctcagcaaaggcacagtcattgatattaaacctaataatacgattatgttttatcgcgggaagaactatgtgcaaccaaaggtgatgtcacctcctgaaactctttcgaagcagaaggccttagagaaatatagatatctacaatcccttgagcataccagccagtttattgagaagctggagaaggagcttgaagattacaagaagcatgttgctttattcaagaaccataataagggggttgctattgagaaaatcagcaatgaagataccactgttgatgatcctgcaactacctcagattctaaatgagctaactatttggacatgctggcatgatagatctttcagtcgtcaaatcttgcaagcctacatagctcaatgttcactattcatattaaatatgctggcttcagttgtggtgatatagggagctagcttgaaaactcagattcagatagaagaagtaatagccataggattttaaaggcttgcaagattaaaatcctggttgatggaaagctgtattacttgaaaaatacctcgttcatcaatctatctctataaggaaaggcttttcacttcttgggccttccttgctacataaaagacaatgaaattgtaattttggagctggaatagttctgcaggaccctctcagaaatgaagacatttactgtgccacacgttcacgtactcagtattcatacaccaatgatggacgtcagaagtgcacaagatttctgtgcgtcatttgggcattggtgcatgaactttgaaacaacttgttggtctacatttgtgtgctttttgcaggtactgggccgttcctgagctgagaagatgggcatgtgcagaagcacaatgatgactttaaggatttggcttgataaaaaggtattccgatgtttgctgagttaaagcttcttct

SEQ ID NO: 17312 - DNA, 2475 bp, Zea Mays
cttgccttggctgacggctcccccacggaccacggttgtttggctgcgcggcgtgtgcccttgcggtcattcgtcgtccagccagccgtccagtggccttgcccggcggccggagcgggcgagcggcggtccggccttctcggctcctcgccgtccggcgtcctccgtcactctcgctcagccgctgtgtccggccagcaggtagcagctgtgtccgtccgagtgtccgacgtcctccggcgctcagccattgtctccggcgctcagccgccttgtccggccagccggccaggccgacagggccagcgccgagcgccgctccagcctccaggctcaactccaagtcagaattgagaaataagatggaaaatgattggttgaatcatagaatgcagcacaagcaggcgcatcacttcgccttccatgcgtactagacggtgttggtcgcgctcgaggtttacttacggggctccgttagcgtcgagcccccggatgtgcctctccttcgggacctgttcctaatcgagggcaagtgtcctagttctttggaccccggtggctgccacgacacccgacacccgccgcctgctccaccgtcgcggctgctcatgccctcgctgctgacctagcgcatgcaaacctcacatttcgaggcctaaaaccctcagcgtcagtggccggcacgtggcctctctagtgcccatcggtgccatggcagctctcgcgccgtggatcctacggcggcgacccgtccgctctgtcgcttctctggtctccattcgtgattcatggcatcgaaggtgtgggtcctcttcctcatatccttcagcatcgttcaagtgtttgtggggatggtttggaccagaggcacacgggcggaggaggccgtggtttcagcagcccgtgaggtgcgggagcacgacgatcacacttgatacagatggcaagtttgcgaggtttggagtcggcgatatgggtgtcaccaagcagaagtggaggcagcagccgcctccaaagaagaagatgtcgagaaaggccaaggtcaaccagctcaagtggtaccgcctgaaggccaagaagaagatgaagtcacccaaccccgaagttaggatcagatacaagcttgaaaaggctaagaggaaggaggaatggttgattgagaagctgaggaagtatgaggtcccgaggacaccggagccagttcatgaccctgagattcttactgaggaggaaaagttttatctcaagcgaacgggggagaagaagaagaattatgttcctgttgggaggagaggggtatttggtggtgtggttctcaacatgcacctccattggaagaagcatgagaccgtgaaggtggtttgcaagccttgtcggcctggccaagtttacgagtatgctgaggaattgacaaggctcagcaaaggcacagtcattgatattaaacctaataatacgattatgttttatcgcgggaagaactatgtgcaaccaaaggtgatgtcacctcctgaaactctttcgaagcagaaggccttagagaaatatagatatctacaatcccttgagcataccagccagtttattgagaagctggagaaggagcttgaagattacaagaagcatgttgctttattcaagaaccataataagggggttgctattgagaaaatcagcaatgaagataccactgttgatgatcctgcaactacctcagattctaaatgagctaactatttggacatgctggcatgatagatctttcagtcgtcaaatcttgcaagcctacatagctcaatgttcactattcatattaaatatgctggcttcagttgtggtgatatagggagctagcttgaaaactcagattcagatagaagaagtaatagccataggattttaaaggcttgcaagattaaaatcctggttgatggaaagctgtattacttgaaaaatacctcgttcatcaatctatctctataaggaaaggctagtagcatgatactgagtgcagatcagccttttaatatttctgcaatctttcctgtaaacacttttatgataaaataggacattcttttgaattgtggcccccttttatgtaggcttttcacttcttgggccttccttgctacataaaagacaatgaaattgtaattttggagctggaatagttctgcaggaccctctcagaaatgaagacatttactgtgccacacgttcacgtactcagtattcatacaccaatgatggacgtcagaagtgcacaagatttctgtgcgtcatttgggcattggtgcatgaactttgaaacaacttgttggtctacatttgtgtgctttttgcaggtactgggccgttcctgagctgagaagatgggcatgtgcagaagcacaatgatgactttaaggatttggcttgataaaaaggaagcgaaaagacagcttcgtcagagatagagctctagtcctacgg

SEQ ID NO: 17313 - DNA, 3819 bp, Zea Mays
cttgccttggctgacggctcccccacggaccacggttgtttggctgcgcggcgtgtgcccttgcggtcattcgtcgtccagccagccgtccagtggccttgcccggcggccggagcgggcgagcggcggtccggccttctcggctcctcgccgtccggcgtcctccgtcactctcgctcagccgctgtgtccggccagcaggtagcagctgtgtccgtccgagtgtccgacgtcctccggcgctcagccattgtctccggcgctcagccgccttgtccggccagccggccaggccgacagggccagcgccgagcgccgctccagcctccaggctcaactccaagtcagaattgagaaataagatggaaaatgattggttgaatcatagaatggtatgctatatagagcgagatatctttgcaattattcgaagtgatgatattttataccattttcaagaattgaagagtatatgaaaaaacttgccatgcgtatgtttaaattcacgtgctaatgttgatgaagttattagaggcggggaagaaccaaatcttctctaattaggtacttttatatttttttatcaagtttattgtatttttatatgctgaattgagattaatactatcttagtctatgtttgtggtatattttgttttagcggtatatttagccgctcaatatattgggggctgtttaaagtaaacttaaagtattatagagtggcccgggacgttaattttatagagctccgccactgatcacagcagcacaagcaggcgcatcacttcgccttccatgcgtactagacggtgttggtcgcgctcgaggtttacttacggggctccgttagcgtcgagcccccggatgtgcctctccttcgggacctgttcctaatcgagggcaaggtcagtattcagtacctgtagtctcaattgctgtacttctgttgtttaatcgtattagaagtcattactgctattggtgccaaaattaagctgtggtacatgaccaaagctagccttatctcagctaagcgcatacgtagcatctaacagaaactatttggtgttttaaggtgaatgcattctcatccactgctatgttgcaacaacaaaattatattgtgttctttgtttacattaattttgatcaaatatgttggatctgtgtactgccatttgactgctggggaaggggaaccggacggtcggaagatgacggcgaggaggtgtacttggacagagggagagggagggcgtccaggtctttagtatttttgcctttttcccatgtcatgaatagtgagaacagactattgcaactaagaaatgggagcaaaagagagaaaaccctcagattcaaagagttcgtttatgcagggttaaattttcaaaggcgtgtgaattagatgtcaaatgtagaggtgcacgtattgagggttaaatattaacatttctccctcactagtcactaggtatttattttcatctcatcatgtggatcatacaaccttctgaacaattttagtccaattatcaaatcaattagaaattttatcttcgccgtagttatttctgtgtgtgatattactgggcccattctgtgtctattagggtagatgtaaaatggtttgttttctgcaaggctgcatctcggctgagtaaaacaagtactgaggcagtagactggtatttgcacatcgcacatgcttgaaattggtgattgatagattgtaaaatatgaaccggtagttgatagacaatagtaaattgtgaaatgtgaatcagtagttggtagacagtagagactagagacaaaggtttccatatgccaaaaattggtgattgacagattgtgaaatgcgacatgtttagtgtcctagttctttggaccccggtggctgccacgacacccgacacccgccgcctgctccaccgtcgcggctgctcatgccctcgctgctgacctagcgcatgcaaacctcacatttcgaggcctaaaaccctcagcgtcagtggccggcacgtggcctctctagtgcccatcggtgccatggcagctctcgcgccgtggatcctacggcggcgacccgtccgctctgtcgcttctctggtctccattcgtgattcatggcatcgaaggtgtgggtcctcttcctcatatccttcagcatcgttcaagtgtttgtggggatggtttggaccagaggcacacgggcggaggaggccgtggtttcagcagcccgtgaggtgcgggagcacgacgatcacacttgatacagatggcaagtttgcgaggtttggagtcggcgatatgggtgtcaccaagcagaagtggaggcagcagccgcctccaaagaagaagatgtcgagaaaggccaaggtcaaccagctcaagtggtaccgcctgaaggccaagaagaagatgaagtcacccaaccccgaagttaggatcagatacaagcttgaaaaggctaagaggaaggaggaatggttgattgagaagctgaggaagtatgaggtcccgaggacaccggagccagttcatgaccctgagattcttactgaggaggaaaagttttatctcaagcgaacgggggagaagaagaagaattatgttcctgttgggaggagaggggtatttggtggtgtggttctcaacatgcacctccattggaagaagcatgagaccgtgaaggtggtttgcaagccttgtcggcctggccaagtttacgagtatgctgaggaattgacaaggctcagcaaaggcacagtcattgatattaaacctaataatacgattatgttttatcgcgggaagaactatgtgcaaccaaaggtgatgtcacctcctgaaactctttcgaagcagaaggccttagagaaatatagatatctacaatcccttgagcataccagccagtttattgagaagctggagaaggagcttgaagattacaagaagcatgttgctttattcaagaaccataataagggggttgctattgagaaaatcagcaatgaagataccactgttgatgatcctgcaactacctcagattctaaatgagctaactatttggacatgctggcatgatagatctttcagtcgtcaaatcttgcaagcctacatagctcaatgttcactattcatattaaatatgctggcttcagttgtggtgatatagggagctagcttgaaaactcagattcagatagaagaagtaatagccataggattttaaaggcttgcaagattaaaatcctggttgatggaaagctgtattacttgaaaaatacctcgttcatcaatctatctctataaggaaaggctagtagcatgatactgagtgcagatcagccttttaatatttctgcaatctttcctgtaaacacttttatgataaaataggacattcttttgaattgtggcccccttttatgtaggcttttcacttcttgggccttccttgctacataaaagacaatgaaattgtaattttggagctggaatagttctgcaggaccctctcagaaatgaagacatttactgtgccacacgttcacgtactcagtattcatacaccaatgatggacgtcagaagtgcacaagatttctgtgcgtcatttgggcattggtgcatgaactttgaaacaacttgttggtctacatttgtgtgctttttgcaggtactgggccgttcctgagctgagaagatgggcatgtgcagaagcacaatgatgactttaaggatttggcttgataaaaaggaagcgaaaagacagcttcgtcagagatagagctctagtcctacgg

SEQ ID NO: 17314 - DNA, 3658 bp, Zea Mays
cttgccttggctgacggctcccccacggaccacggttgtttggctgcgcggcgtgtgcccttgcggtcattcgtcgtccagccagccgtccagtggccttgcccggcggccggagcgggcgagcggcggtccggccttctcggctcctcgccgtccggcgtcctccgtcactctcgctcagccgctgtgtccggccagcaggtagcagctgtgtccgtccgagtgtccgacgtcctccggcgctcagccattgtctccggcgctcagccgccttgtccggccagccggccaggccgacagggccagcgccgagcgccgctccagcctccaggctcaactccaagtcagaattgagaaataagatggaaaatgattggttgaatcatagaatgcagcacaagcaggcgcatcacttcgccttccatgcgtactagacggtgttggtcgcgctcgaggtttacttacggggctccgttagcgtcgagcccccggatgtgcctctccttcgggacctgttcctaatcgagggcaaggtcagtattcagtacctgtagtctcaattgctgtacttctgttgtttaatcgtattagaagtcattactgctattggtgccaaaattaagctgtggtacatgaccaaagctagccttatctcagctaagcgcatacgtagcatctaacagaaactatttggtgttttaaggtgaatgcattctcatccactgctatgttgcaacaacaaaattatattgtgttctttgtttacattaattttgatcaaatatgttggatctgtgtactgccatttgactgctggggaaggggaaccggacggtcggaagatgacggcgaggaggtgtacttggacagagggagagggagggcgtccaggtctttagtatttttgcctttttcccatgtcatgaatagtgagaacagactattgcaactaagaaatgggagcaaaagagagaaaaccctcagattcaaagagttcgtttatgcagggttaaattttcaaaggcgtgtgaattagatgtcaaatgtagaggtgcacgtattgagggttaaatattaacatttctccctcactagtcactaggtatttattttcatctcatcatgtggatcatacaaccttctgaacaattttagtccaattatcaaatcaattagaaattttatcttcgccgtagttatttctgtgtgtgatattactgggcccattctgtgtctattagggtagatgtaaaatggtttgttttctgcaaggctgcatctcggctgagtaaaacaagtactgaggcagtagactggtatttgcacatcgcacatgcttgaaattggtgattgatagattgtaaaatatgaaccggtagttgatagacaatagtaaattgtgaaatgtgaatcagtagttggtagacagtagagactagagacaaaggtttccatatgccaaaaattggtgattgacagattgtgaaatgcgacatgtttagtgtcctagttctttggaccccggtggctgccacgacacccgacacccgccgcctgctccaccgtcgcggctgctcatgccctcgctgctgacctagcgcatgcaaacctcacatttcgaggcctaaaaccctcagcgtcagtggccggcacgtggcctctctagtgcccatcggtgccatggcagctctcgcgccgtggatcctacggcggcgacccgtccgctctgtcgcttctctggtctccattcgtgattcatggcatcgaaggtgtgggtcctcttcctcatatccttcagcatcgttcaagtgtttgtggggatggtttggaccagaggcacacgggcggaggaggccgtggtttcagcagcccgtgaggtgcgggagcacgacgatcacacttgatacagatggcaagtttgcgaggtttggagtcggcgatatgggtgtcaccaagcagaagtggaggcagcagccgcctccaaagaagaagatgtcgagaaaggccaaggtcaaccagctcaagtggtaccgcctgaaggccaagaagaagatgaagtcacccaaccccgaagttaggatcagatacaagcttgaaaaggctaagaggaaggaggaatggttgattgagaagctgaggaagtatgaggtcccgaggacaccggagccagttcatgaccctgagattcttactgaggaggaaaagttttatctcaagcgaacgggggagaagaagaagaattatgttcctgttgggaggagaggggtatttggtggtgtggttctcaacatgcacctccattggaagaagcatgagaccgtgaaggtggtttgcaagccttgtcggcctggccaagtttacgagtatgctgaggaattgacaaggctcagcaaaggcacagtcattgatattaaacctaataatacgattatgttttatcgcgggaagaactatgtgcaaccaaaggtgatgtcacctcctgaaactctttcgaagcagaaggccttagagaaatatagatatctacaatcccttgagcataccagccagtttattgagaagctggagaaggagcttgaagattacaagaagcatgttgctttattcaagaaccataataagggggttgctattgagaaaatcagcaatgaagataccactgttgatgatcctgcaactacctcagattctaaatgagctaactatttggacatgctggcatgatagatctttcagtcgtcaaatcttgcaagcctacatagctcaatgttcactattcatattaaatatgctggcttcagttgtggtgatatagggagctagcttgaaaactcagattcagatagaagaagtaatagccataggattttaaaggcttgcaagattaaaatcctggttgatggaaagctgtattacttgaaaaatacctcgttcatcaatctatctctataaggaaaggctagtagcatgatactgagtgcagatcagccttttaatatttctgcaatctttcctgtaaacacttttatgataaaataggacattcttttgaattgtggcccccttttatgtaggcttttcacttcttgggccttccttgctacataaaagacaatgaaattgtaattttggagctggaatagttctgcaggaccctctcagaaatgaagacatttactgtgccacacgttcacgtactcagtattcatacaccaatgatggacgtcagaagtgcacaagatttctgtgcgtcatttgggcattggtgcatgaactttgaaacaacttgttggtctacatttgtgtgctttttgcaggtactgggccgttcctgagctgagaagatgggcatgtgcagaagcacaatgatgactttaaggatttggcttgataaaaaggaagcgaaaagacagcttcgtcagagatagagctctagtcctacgggagttgcactctgctgcacagcgcgagtcttgcattggcaacaagaaattctggaaagagagaacctaccaagagctgagacgtctattcatggaatcgtgacaaacatcgatggttgcagctttctctttccagaaagacctgatctgaagtctgtagtgcttaaagagcaaccattctctttgcagagggaaacatcgatgaacaaaccatt

SEQ ID NO: 17315 - DNA, 2947 bp, Zea Mays
cttgccttggctgacggctcccccacggaccacggttgtttggctgcgcggcgtgtgcccttgcggtcattcgtcgtccagccagccgtccagtggccttgcccggcggccggagcgggcgagcggcggtccggccttctcggctcctcgccgtccggcgtcctccgtcactctcgctcagccgctgtgtccggccagcaggtagcagctgtgtccgtccgagtgtccgacgtcctccggcgctcagccattgtctccggcgctcagccgccttgtccggccagccggccaggccgacagggccagcgccgagcgccgctccagcctccaggctcaactccaagtcagaattgagaaataagatggaaaatgattggttgaatcatagaatggtatgctatatagagcgagatatctttgcaattattcgaagtgatgatattttataccattttcaagaattgaagagtatatgaaaaaacttgccatgcgtatgtttaaattcacgtgctaatgttgatgaagttattagaggcggggaagaaccaaatcttctctaattaggtacttttatatttttttatcaagtttattgtatttttatatgctgaattgagattaatactatcttagtctatgtttgtggtatattttgttttagcggtatatttagccgctcaatatattgggggctgtttaaagtaaacttaaagtattatagagtggcccgggacgttaattttatagagctccgccactgatcacagcagcacaagcaggcgcatcacttcgccttccatgcgtactagacggtgttggtcgcgctcgaggtttacttacggggctccgttagcgtcgagcccccggatgtgcctctccttcgggacctgttcctaatcgagggcaagtgtcctagttctttggaccccggtggctgccacgacacccgacacccgccgcctgctccaccgtcgcggctgctcatgccctcgctgctgacctagcgcatgcaaacctcacatttcgaggcctaaaaccctcagcgtcagtggccggcacgtggcctctctagtgcccatcggtgccatggcagctctcgcgccgtggatcctacggcggcgacccgtccgctctgtcgcttctctggtctccattcgtgattcatggcatcgaaggtgtgggtcctcttcctcatatccttcagcatcgttcaagtgtttgtggggatggtttggaccagaggcacacgggcggaggaggccgtggtttcagcagcccgtgaggtgcgggagcacgacgatcacacttgatacagatggcaagtttgcgaggtttggagtcggcgatatgggtgtcaccaagcagaagtggaggcagcagccgcctccaaagaagaagatgtcgagaaaggccaaggtcaaccagctcaagtggtaccgcctgaaggccaagaagaagatgaagtcacccaaccccgaagttaggatcagatacaagcttgaaaaggctaagaggaaggaggaatggttgattgagaagctgaggaagtatgaggtcccgaggacaccggagccagttcatgaccctgagattcttactgaggaggaaaagttttatctcaagcgaacgggggagaagaagaagaattatgttcctgttgggaggagaggggtatttggtggtgtggttctcaacatgcacctccattggaagaagcatgagaccgtgaaggtggtttgcaagccttgtcggcctggccaagtttacgagtatgctgaggaattgacaaggctcagcaaaggcacagtcattgatattaaacctaataatacgattatgttttatcgcgggaagaactatgtgcaaccaaaggtgatgtcacctcctgaaactctttcgaagcagaaggccttagagaaatatagatatctacaatcccttgagcataccagccagtttattgagaagctggagaaggagcttgaagattacaagaagcatgttgctttattcaagaaccataataagggggttgctattgagaaaatcagcaatgaagataccactgttgatgatcctgcaactacctcagattctaaatgagctaactatttggacatgctggcatgatagatctttcagtcgtcaaatcttgcaagcctacatagctcaatgttcactattcatattaaatatgctggcttcagttgtggtgatatagggagctagcttgaaaactcagattcagatagaagaagtaatagccataggattttaaaggcttgcaagattaaaatcctggttgatggaaagctgtattacttgaaaaatacctcgttcatcaatctatctctataaggaaaggctagtagcatgatactgagtgcagatcagccttttaatatttctgcaatctttcctgtaaacacttttatgataaaataggacattcttttgaattgtggcccccttttatgtaggcttttcacttcttgggccttccttgctacataaaagacaatgaaattgtaattttggagctggaatagttctgcaggaccctctcagaaatgaagacatttactgtgccacacgttcacgtactcagtattcatacaccaatgatggacgtcagaagtgcacaagatttctgtactgggccgttcctgagctgagaagatgggcatgtgcagaagcacaatgatgactttaaggatttggcttgataaaaaggaagcgaaaagacagcttcgtcagagatagagctctagtcctacgggagttgcactctgctgcacagcgcgagtcttgcattggcaacaagaaattctggaaagagagaacctaccaagagctgagacgtctattcatggaatcgtgacaaacatcgatggttgcagctttctctttccagaaagacctgatctgaagtctgtagtgcttaaag

SEQ ID NO: 17316 - DNA, 1138 bp, Zea Mays
tgtcttttgacttgcgagctgcctttgacgagccttgccggttgcctctatatatgcacgcacacgctcgcagatgcaaggaggggtaggtgtgggagtgtggtgagaacgaacgcaggtgaggtgagatagagaagaagaatcagcagcagctagcggcagaagcatggtgtcacttgggattgcgaggctggtcgccttcgtgctcctggtagtcttagtcttcggttcatcgctgcatcaacaagagggagctggtgctactaggctgcacgagagaaggcagcagcacgcgcagcagtgggcggaggagaggaaccagctgaggtcctacatgaccatggactacgccccgtggcgccgccgcgtgcccaagcacaactgacccagctactagcacagggcgcccaggcagatctcggaaagccagatgcatgcttcgcgctggaagtcagtcagtccattgttcaggctcctccagcacggaggaaagcgccaaggacatcagcaccggcagcagagcatccatcgatgcacgcgtgcatgacgacgttgagaggccgagctttctgacgctctcagtctcagctgactgcccgttcttgtggctccagcctccagcacaagcagcatctcccggagcaagcatgatggcagacagggagagaagttgatatagtaggtgcggttcctttttctttctttcgttgtagtcgtatgtgtatctacgtgctgcccacagcgtgcagatgtacgcacgcagatttttccccctgatcacctagtggtgtcgctaagataaatatatatatatacgcagtttatttatagtactagcagtactgatcagtgtcgcgtcttactcagtttctgtagtaataagagtggtgtggtcttgtggtttggtttagctagagtttctgcttaattcttctgtaagtgcaataggatggactactagagtggaaagttcagactcggaaatgcgtgtatgtaccgagtactgaacatgtcggccataatgacggaatcagtacgctgaaggagcatttgcaacatcatatatatgactctggccatttccgtcggttctttgttttccttcaactggaggacgacatcccatcagcttattttt

SEQ ID NO: 17317 - DNA, 932 bp, Zea Mays
ctggtctgctgcccgaagcatgcacatcggcggccaggcccaaatcaaccgcgtagccatccgcggccaccaaaaccagcacagaatcaaaaatatctgcctgcctacctaccgatggccgccgcgttgtagttgtagtgtaacctagccacacgacgcatccgcggttcatcggcctcgcaggaaacgagcgtcgagcaaaaggtcgaattctcaactctcaagcaccagcaggaatcgagcgagcgagcgagcagtgtccgccccccatggccatggtcgcgtccacctccttcgcgtaccacaaggaagaacagggacggccgggacagggagcgggacggcaaggagcacaagcaccccttcaaggtcgtcgagatcacgccgcctccgcggtgcctcggcgtccgctgcttccccaccaacatccactgcggcgagagcgtgacgatcgaggggcaggcgtacacggtgtcggcggtgacgcaccggtaccagctgcgcaaggggcggtacgagccgagcgagaagcgcctcgacgtcctctccaccggcagatacatcctcaacctctacctccagaacctgctcgaccagtcctagctaccatatctgtatctgtactgtacatcagcatcgcttcactctgtatagatatacatacatatatatgttagctagtagcatcgaacacttgtcccggtgggtggcggacggagatagtgtttccctgcgtgctgctctgtgtaaactgaaaaatgcgagatgaggcataaagttcagtgaaaggttgcatacattttcttgaagaaaaaaaaagttcagtaaacgagtttggattgagtgagattggatgagtttgaatcctaaacgggctcgttcggttagctttcaattcatgtggattgagtgagattggatgagtttgaatc

SEQ ID NO: 17318 - DNA, 4905 bp, Zea Mays
cgcctttgcatctcctaaaacgtaccctgaccctcacggcttccctcgtctttgccctcgcctccctggtagcggcggccgcttgccccgctatgaccaccgccgccccgccgccgctgctaatggcacaccgcgaaggtggagacgtccccatctccctgttccttgacaccgatcttggcacccatctcgccctgctcgtcgccccggacaccgacatccgtggcctcaagtcgcaggtggctgtggaacacgctgtcgccttccccgacctcggccccgtcaccgtgaagtccttccaggtccggcggaagggtgtactgtatcgcctctctgattcaatgacagtgatgagtgccttcaccaaaatcaaaggtgggtgctttcttcatgtcaatatggcagaggctacagcagccacacactgctgccaagatgcgccagcaactgacactagaagattgaatggtgttagtcttggaatttatgaaaagaaccatgttcaggagctgcctgcagtggcaccagatgttgcttgtgatatgctccctagaggccttgaaggttgtaatgatgatgccgtgctgaatactgttcaaacacatgatgtgttgccaaattgtaccttggtgccatcctcatcacagctaaatactgaagtaccgaagaacaatgcagtgggtctggccagttatactgaagcaggaattgctcaagttattgacaaagcaaagagttacagtggccagataaaacatgctaatcaaactgaaggtgcttatattatttccacatcaaaggcatgtgttgataaatctttaaatgagagtaatatgtcacatgctgtggaggagctacatgcaagtcgagaccatggggttggtgatgatgtttctgataaaaagcaagtcatggtagaggagcaactgctggaagagatacaagcaaaggataatctttcacaagcaaaggagcacaaaaaatgtaggactagttcttttgacacatcatgtatggatctactggaaacaggcactacttctcttgtggaatctttaaacacttctaatcatcaagaagtccatgacaccttacatgaggagtccattcagctagaaaatccaagcactgttggaaagaagaagaaaaggaaaaggcgtcaattgtccccttcaaaatctgcttctgctcaagagacaacagaaccgtcagctacagcagttgatttattaatacccacaggtgaagttctgtctaataacagcccagggatacagatccataatatacatgcaatggataatctttcacaagaaaaggagcagaaaaaatctaggactagttctcctgacacatcaaataggcatttactggaaacaaaccctacttctcttagggaaactctaaacacttcaaatcatcaaggccatgacactttagatgaggagttcatccagccagaaaacccaagtgctgctggtaagaagaaaaagaaaaggcgtcaattggtcccttctaaatatgcttctgctcaaataacgacagaaccatcgtctggggcagccccagcggatttatcaaaatccacaggtgacaaagcatataatgctgaattgactagcaaaggtgaaactgtagttgaagcatctggtttgcctctttcatcatatgaacataatgatggaaaccaggggggcaaaagtgttaagtttgtgagcgatgatcaagcatctactgatttaatctctgaacaagagaagtttgatcatgctctcaagggatgtagggatcctttaattgcagatgacatttattctacaggtgtacctgaaacaagcaacatggagaaagatggcaaaagtacagatgtctctgacaagaggcaaacaagtcaaaatacctcgcaagtgaagaagcgcaagaaatcaaaggttggttctgttgacatgccttccgtggatgcttctggtgaaaaagatcatcggtatagtgaaaatgcgaccaaacaagatacagcttctactaaaagggagattgtccacgaaccttctatgcaacagatgtcaaacattgtgcatcagggggattcaaatgtaatagaaaatccaagtggtgatggaaagaaaaagaaaaaaagaagacaccattcagaatccttaaagggtatgaatcctagtcaagatctgaccaaatcttctggatttgtaacaaacgaaagctcgatacaatgcacaggtgctgctccaataaatgcaaagcaaacaaacttagtcattatagaaggagaaacagttactgggcacaggaagcttagtgaaaatctagatgtagcggcaacacatgttgttgatgaggtattggcagatctaagatctaaagacggcttaagtaaggatctggatgaaaatctattaccaggacaaactcacctaggcagcaatcagaatggaatagaagttcctgaatccattgctgttaaagttggtagtactactgcagcattacctccgaaatatcctgcaacagttcactctgcttctcctgttaactcacctagacaaaggaagtctaaggggaaaaaattgaaagtgctatccaccatggctgactcttctcatcaatcaagtggtgtacccgaagaagatgctaatagaaaattaaaagagtctgattctttgaggtttgctgataaaacaagtgatcatgaggatatagtaactgcaaatgtggttgctcaagctgatgaaaaacgcaaagccactaagcgtcaaagaaagaaaggttctgtaaagcaggtacttgatacattggacttgaaggaagtgaatgacacagaagaaaatttggttcagggaggttctgtagttgacactcccttgagcactgctgggaacgtagagcagaaagactggtcttctgagactttgagtcctaaagaacaagaaactaattgttctactcatgggctggatagtcacacagctaaggacagccaggatgagtatgtaactgacaccattgggacccatgataatgaaaatgctgcaggaaccccagccttgcatgtagttcagaaagatgccatggccctcaaatccgccagccctaattctcaaaaggagcaggaaacatctttgaactctgaactacaaagtcaggattgtcctctggaacatggttttagtgcagatttggtgaactccaggactgaaaagggagtcaggactacaagttctgctagtgctgttaaatctgattacaacaccatgtttcatcctgctaatggtagaatcaatgtccttgatcattttagccgcagcaatttgaatgatggttcatcaattgtcgcagaaagtaagcaaaacaatgaagatggaagtttaagggaagtgaagaataaaaagaagaaacgaaagcaaggtactggtagcgttgaaccaaatgatgttatagaatctcttccctcagagatagctagcttaactggtcattttggtaccagcaaagctgttgtgtcatctgttgcaacagaaaacatgaatggaggaaatgagaatgtgaataaaggcaaggagaagaagagaaagggcaaatctaatatggaagtacctactgctggaaaggaccatcctaattgtgatactcaattcattgatattggtacccaagaatcacttatttctattgtacaaaaagaaaggacaggtcaagacaatggaaaagagagcaacagtaaagctactcagaatgccagtataatgcaacatgaaccagaagatgccacttggaatcgtagccctgagaagaatcaccaccagagtgttgatgatgatcagaacaagttgctcactgaaaaggatcatgcacatataaataaagaagtgagaaaattcactcctcaaacaaaggcccatgctaagattagaaagcctgatgggtctactatcaaggaaaaggtggctccaaatcctaaacctgtaaccaaccttgtgaaggatttttccatgagcccacgagcatcaagtgacagcacagagggcatgccacaaagtgctaaccgatatagagttgcagtccggaaagtaccaagtaaaaggtatgaagagaccagtggaaactccaataaggcgagtaggaaagtaggctctggtgcaatattcaatgactctatcagcgaaggttctggtgatgaattggacaccaagactgtcatggaaagatcacctaataagtcatctacatctgctgattcaggtatttcatctgcagcctctggtgaaagcgaggttcctgatgatgatggcaccgtatcactatctcagaagagtttcaaaggtctgcacattagctccatcctccgtggctcccgtagctacaagaaggcactaaagaggcaaatggagctgctagacgacgacaccattgtgcctgatagccagcccgcggatggcctttggggctgaacatggttatcgtcaagagaagcgccgaccctgcttcatccttttttgccattgtccacctgatacgctggtgggctttataagttgtctaaaacacatgcccgaatgcgtgatgtcgctgatggcattgccatacgccacacgcagttcccttattttgtcgggcttaagctgtgatctgcctgaggatgaatcgatgatgttcatgatacagcttaccagctatatatatgtgttaatgtatgtaagaatgatacgcacgcttagtctctcacccatgagccatgggtccgttgagtcctgactgaccatcgccagaagttgtggtttgtgacaggaaattccatccttctggcttatctgttgtgtattttgcgtagctgcagttttattttttttccctctccagccgttttgatcagctgggctgggcaaggccctt

SEQ ID NO: 17319 - DNA, 3626 bp, Zea Mays
cgcacacagttcgtaatctccagccgtggtgaacaacgtttacacaatcaaacatagcgcctcatcaatcgctgcctttgcttttacagtgatggttcggcatcattgcttcctggatacacgtataccatcgttttcccccttttcttcgcgcggctgccaactggagtaaaccttagcccactgatggcagaagtcccacgtagccagctgtcagcatatcatcttctcctcaagtcaaagatggtaccagaagaatacggacaatgctgctacgacgacgatgactatacatggagtatatgaagatggaggcatcgcgggaaaaggcacaggcgtgccaggagagcgggctcggtgtctaatgaaaactagcgtccgtctagcttgggctggagtgggccttgtaaatgttggcaggtcgattggtcgtgtggaccgagtggttacaagtaacacccaaaccctggctgtaaggggtcatgaaccattttggctatcagatatcaaatcagatcgtcttcctcgctgttatcttcttcttcaacccttcttctacctctcttctctccgatattcccttctaggtgctaacatttggtatcagactagcgcaatcctgattgtcatccgcgttcgattgctgtggtcggaatggaatccgcgatgcagcagattttggaagctttgggccagatggaggagcgattgacggcaacgctgggagccagatgcgacgcgatcgagcaacgcagcacgacaaccgtggcaaatctgaggggcggccgcgtagggctggacgctggcgcacgcgtggtcgtcgacaacttctccttcagagtcggagtcagagtttctcacctcccttgctgcccaggctccctcggccgaggaggccatggtcgcggtcgcggacgcggggagccccgcgaggctcaacccgctccccaacaccgacgcagaggaggaggaggttctcaccatcacgcccaccaagtgttcgacaatatacctcaaccgcggcatctactccgtccgcaacccgatcctccaccgtcagcacctactccgggactgcgacggcaaccacgtcgacatccttcctacctccgagttcgacgagggtcccatcttcgacgaggagccctgcttccaccgtaacctcctggattcagatccagactctccctacgactgggtcgtccccgtcatcgccgtccacagcagcggctacactgagatgtcccacagcgaagccgacaaggtccccgcgaccgccgcgctacccaacctgcgcgagaagatctgctgtcggttcgtcgataggacgaagctgtccagccatgtccgcctcatccacttctccctaccgtcgccggaccaggcgctcggcatccccatcggcacgcatgtcttcgactgcaccagcgttgacgggaagccgtgtatgcgatcgtacacgccgacgagcaaggaggacgaggttctcgccactacgcccatcagaattcatgtgatagaagcggatttaacccaggtctggttaagagaagatgcagttgcttacttcaaaaatatgtttgatggtggcctgaggccaacctcaaatgcatttaacaaagttatagatggctgggtgaaggttgatatgctcaacgaggcccatgggttctttgatatgatgcctgaaaaggacatagatgatgttacagtggtcattttctactttggaggacaacatgtgggctgggaaatgaagacagaatggttgtctaatggttggctatgtttggtatgtggtgcatctgatactcaagagcttcctctacatttcattaaacttgcaaaggatacgtacacatctgactgcatgttcaaaaaaatcggatatggcactgtgagtgaggctttggtttacatgctgtccttactatttgttcgaagagattattgcaacgaggaaccattttttaggaatgtgcttgagcattatcaatgtggcgttgagatgatacggagggatttatttattggccattggaaacattatcttcaaagtgctataccacttcaaccctgctttgatggtctcataaatgttggcaagatttgggtgaattactgactctcaactgccctgctgacagagcaatggtgctgctgatgtaccaaattgagttgagactgctcaattgggcctgggaagacgagtgtgttttcaacctgtgtctacttggattacacagtgctgttcatagcagcctagccaatgcttataaatcctggttgataacaatgattcaccgaacacactcaattggccaagatcatttttggcataacgtggataggtgtgtggtgtgtggaattaaggatagatgctgtgcaagattggcaaagctagttttatctgctacactgacacaagattctggcaagctttctcaacttgaattgcaccatccattgttgttgaatactcagtcaagcggcttgaggacaagccgcatttcaagcagtggggaatgtcagcatatcatcttctcctcaagtcaaagatggtaccagaagaatacggacaatgctgctacgacgacgatgactatacatggagtatatgaagatggaggcatcgcgggaaaaggcacaggcgtgccaggagagcgggctcggtgtctaatgaaaactagcgtccgtctagcttgggctggagtgggccttgtaaatgttggcaggtcgattggtcgtgtggaccgagtggtcgtgtggttacaagtaacacccaaaccctggctgtaaggggtcatgaaccattttggctatcagatatcaaatcagatcgtcttcctcgctgttatcttcttcttcaacccttcttctacctctcttctctccgatattcccttctaggtgctaacaccagcttggctggccgcatcagcatcgcttgaataaataccgccatctgtatgaagtgaggaggtgatgccaagcagatgtgtaaccatttagaatgcttgtggtggaccaactgcggacaagctgggaagaaggcacgaacatgtagcagctctctatcatcgattgcggttgcggcttgcaagcattctactcggcacaggacacgtaccgagtgaaagcaactgttcctattgccgtgccggtaagtactacactgctactctccttttcccacgagtttgaccagctcggccttggcagcttccatgaccactgggaaatcaacctccaaatagcggcccctgccaaccaaaattccagcctgtgagatacataaactggtagcaaggaaaaatatatacatgagagggagagaagtggcgggaagagaccagaagtggttcttggaccaggtggcagatggaaaagccgggcttgatatgccatgcataatcctagcaacggcccttggcgtgaatttcgcaaacgaattgcttttaaggaacacctgtggtacagttaaaagtgttgtcatagacgacaaaaaaatcatgatggaaaatgcagcgactgtccgtacctttatgtcagcttgcaagaatgggctgcaggaagcaagatgaaatgccgagtcaaatgaagttttggaataaagcagttcaaag

SEQ ID NO: 17320 - DNA, 4049 bp, Zea Mays
cgcacacagttcgtaatctccagccgtggtgaacaacgtttacacaatcaaacatagcgcctcatcaatcgctgcctttgcttttacagtgatggttcggcatcattgcttcctggatacacgtataccatcgttttcccccttttcttcgcgcggctgccaactggagtaaaccttagcccactgatggcagaagtcccacgtagccagctgtcagcatatcatcttctcctcaagtcaaagatggtaccagaagaatacggacaatgctgctacgacgacgatgactatacatggagtatatgaagatggaggcatcgcgggaaaaggcacaggcgtgccaggagagcgggctcggtgtctaatgaaaactagcgtccgtctagcttgggctggagtgggccttgtaaatgttggcaggtcgattggtcgtgtggaccgagtggttacaagtaacacccaaaccctggctgtaaggggtcatgaaccattttggctatcagatatcaaatcagatcgtcttcctcgctgttatcttcttcttcaacccttcttctacctctcttctctccgatattcccttctaggtgctaacatttggtatcagactagcgcaatcctgattgtcatccgcgttcgattgctgtggtcggaatggaatccgcgatgcagcagattttggaagctttgggccagatggaggagcgattgacggcaacgctgggagccagatgcgacgcgatcgagcaacgcagcacgacaaccgtggcaaatctgaggggcggccgcgtagggctggacgctggcgcacgcgtggtcgtcgacaacttctccttcagagtcggagtcagagtttctcacctcccttgctgcccaggctccctcggccgaggaggccatggtcgcggtcgcggacgcggggagccccgcgaggctcaacccgctccccaacaccgacgcagaggaggaggaggttctcaccatcacgcccaccaagtgttcgacaatatacctcaaccgcggcatctactccgtccgcaacccgatcctccaccgtcagcacctactccgggactgcgacggcaaccacgtcgacatccttcctacctccgagttcgacgagggtcccatcttcgacgaggagccctgcttccaccgtaacctcctggattcagatccagactctccctacgactgggtcgtccccgtcatcgccgtccacagcagcggctacactgagatgtcccacagcgaagccgacaaggtccccgcgaccgccgcgctacccaacctgcgcgagaagatctgctgtcggttcgtcgataggacgaagctgtccagccatgtccgcctcatccacttctccctaccgtcgccggaccaggcgctcggcatccccatcggcacgcatgtcttcgactgcaccagcgttgacgggaagccgtgtatgcgatcgtacacgccgacgagcaaggaggacgaggttctcgccactacgcccatcaggtgtttgacgaattgctttagcatcatacagtgtcgtttcttgcactcgtgcaattgcagaagggatgcagtgcagcataggcaatcatggccaccgcctgtacagtatgggatactgggtgatggtgttcaagtctggcttccgccttggccaccacctgtttgggaattctggctgtcactgaagattactggtccacagatgatgcattcggtaggatactttggattgccagttatgccagcgacatgtattacaatttcagagattgtgtctggttcaagcgagcaaatatttcctgaaatatttctacaaagcttacatgagtgcagagtttgtcttagtgaaaatactggcagaagtttactccagctcccatgccaccatttgttttgcttgatgtgtatgaagtctaattgcagaattcatgtgatagaagcggatttaacccaggtctggttaagagaagatgcagttgcttacttcaaaaatatgtttgatggtggcctgaggccaacctcaaatgcatttaacaaagttatagatggctgggtgaaggttgatatgctcaacgaggcccatgggttctttgatatgatgcctgaaaaggacatagatgatgttacagtggtcattttctactttggaggacaacatgtgggctgggaaatgaagacagaatggttgtctaatggttggctatgtttggtatgtggtgcatctgatactcaagagcttcctctacatttcattaaacttgcaaaggatacgtacacatctgactgcatgttcaaaaaaatcggatatggcactgtgagtgaggctttggtttacatgctgtccttactatttgttcgaagagattattgcaacgaggaaccattttttaggaatgtgcttgagcattatcaatgtggcgttgagatgatacggagggatttatttattggccattggaaacattatcttcaaagtgctataccacttcaaccctgctttgatggtctcataaatgttggcaagatttgggtgaattactgactctcaactgccctgctgacagagcaatggtgctgctgatgtaccaaattgagttgagactgctcaattgggcctgggaagacgagtgtgttttcaacctgtgtctacttggattacacagtgctgttcatagcagcctagccaatgcttataaatcctggttgataacaatgattcaccgaacacactcaattggccaagatcatttttggcataacgtggataggtgtgtggtgtgtggaattaaggatagatgctgtgcaagattggcaaagctagttttatctgctacactgacacaagattctggcaagctttctcaacttgaattgcaccatccattgttgttgaatactcagtcaagcggcttgaggacaagccgcatttcaagcagtggggaatgtcagcatatcatcttctcctcaagtcaaagatggtaccagaagaatacggacaatgctgctacgacgacgatgactatacatggagtatatgaagatggaggcatcgcgggaaaaggcacaggcgtgccaggagagcgggctcggtgtctaatgaaaactagcgtccgtctagcttgggctggagtgggccttgtaaatgttggcaggtcgattggtcgtgtggaccgagtggtcgtgtggttacaagtaacacccaaaccctggctgtaaggggtcatgaaccattttggctatcagatatcaaatcagatcgtcttcctcgctgttatcttcttcttcaacccttcttctacctctcttctctccgatattcccttctaggtgctaacaccagcttggctggccgcatcagcatcgcttgaataaataccgccatctgtatgaagtgaggaggtgatgccaagcagatgtgtaaccatttagaatgcttgtggtggaccaactgcggacaagctgggaagaaggcacgaacatgtagcagctctctatcatcgattgcggttgcggcttgcaagcattctactcggcacaggacacgtaccgagtgaaagcaactgttcctattgccgtgccggtaagtactacactgctactctccttttcccacgagtttgaccagctcggccttggcagcttccatgaccactgggaaatcaacctccaaatagcggcccctgccaaccaaaattccagcctgtgagatacataaactggtagcaaggaaaaatatatacatgagagggagagaagtggcgggaagagaccagaagtggttcttggaccaggtggcagatggaaaagccgggcttgatatgccatgcataatcctagcaacggcccttggcgtgaatttcgcaaacgaattgcttttaaggaacacctgtggtacagttaaaagtgttgtcatagacgacaaaaaaatcatgatggaaaatgcagcgactgtccgtacctttatgtcagcttgcaagaatgggctgcaggaagcaagatgaaatgccgagtcaaatgaagttttggaataaagcagttcaaag

SEQ ID NO: 17321 - DNA, 1176 bp, Zea Mays
gaaaaaaatcgattcctccgacaaacgtttgttgaaaaaaaaattgataccgaatctcaaataaaacatatttttcctgttttttccgggaaggatccaagaaaagtttatgattataacccttataacccccataatcatttggtcgggatcttgtgcatatctctcaaataaacaatctccatatggtatagattcagttatttctggatagatacggtctgtagaatccaaactagatgcagacatccaccaagtaagcaagaatcgatcaaacacgaggaaattgttgaggctttggtgttaaatcactgtagtttttgtcaggtgctttatttagtgctagagcaaaatgttggttttggaacagttctaaatttcataaacaggtggctgatatataacccacttctatatagcattgttctatatatatgatataaaaatcgattgtgctctatatttcttcttttgttaatttcgtacatcagttgcttcctcgttttctaggtccgaaactagggggtcgactgacgactagcatatcgtgaagtgtatttttttaaaattaaagtctgtttggatccatgaattaaaagtaaagtgaccaaataacagactgtgcaccacatatacatcacatattcacatgtataattctaatacttcatagcttattattgttgttatttgcttattttttaagagaaggtatatttgcttgactataatatatactagtaacttaggcgcgtcttgcgcgcgcacggaacattagtaataaatggtagcagtgttaaatctgggattaaatgaagccctgttccgattttaatataataaaaagtataatatgacaaccacctgacgattggtctgattttagtaatactgcatattttgctagcaccggtggctgctacgactcttcaatcttgcaaacaaccacctgacaggaagctttcatagtgagctcgggatgaagtatggtagcaatatgatgtccgtatcagtagtaaaatcgtaagatttgatagatttaattaagtgctggaccgcgctcactatgaaagctcagtatgaaagcaaacatggactatggttctgaagtaatactgcatattgattactaatttctttgtcattcgagtgtgctgaggaaatgctcacgaagag

SEQ ID NO: 17322 - DNA, 3008 bp, Zea Mays
tccccgtcccctccgccgccgccgcccctgcaccctttgctcccgttggatcagccccgcgggcggatctcgaccgccgagcacgtccttgccgccgcgtctgcggggatggacgagcctcacctgccacgacagcacgatgccgaagctcgcgcccccgtcctgccgcgagagcgtcggcggcgacttcgtcggtggatgacttcgtccgatgcctctccgcggccatggcgaggcagctcgtattcccgtggagctctagcgcgtcgacgcgtcatccatggaccatggtgattgtcactgggcagacaacgagctcatggagacgctggcgctctgaggtgttgtgttgtgtcagtaaaaatggccaaaacgtagctacatggagcactatgcaatgaactttacacagtaatccgtgaagttttggataccattcctccctttgagactacaagctcaggatgcagtcctgggctcctggcattgagttccttgaggatagctgttgagaaatccaagaatttactccagtattgctcagagactagcaagttttacttggctgttacagcagaacacgttctaacaaaatttgagaattcaagacaaggacttctggaaagccttcatcaagtggaagaaacaattccggaagcagtcggttctcagatcacattgattgcacaagaactggaaaaggctgctttcgttttggatcagtctgaaaaggaagttggtgatgaggtgaatcaactaattcagaacgagtcaaaatccaatgggtttcttgatgagaatgagcttgaattgctccaccaaattgctgtccgggttggtattacatcatccgtggcagctctcaccgaaagaagagcacttaggaggcttcttgagagagcccatgcagaggaggacttgaaaaaggaatcgattgcagcctgcctactccaacttattaggaaatactccaacatatttaagagtgaaacaaccgatagcaccaactctttgtgctcaagcactccttgctcctccagatcgaattctggcttgattggtatgcatcgttcactttccagctcaactgatctctacggaaactgtcagagtctcgagaagcaactcccaaaggttggctccttcagttcgaagcagatgaaagggttatcaaggagcatgcccttgccacctgaggagctgaggtgcccaatctccctgcagctcatctatgaccctgttgttattacatccggccagacatatgaacgagcttgcatcgagaagtggttcgacagtggcaacacaacctgcccgaaaactcgcaagcagttgtcccagctcttgaggacgcctaattactgcattaagggtctgatagcatcttggtgtgaacagaacggggttcctgctccatctggaccgccagaatctcccgagctagaccacatgagaatttcatgcctggaaagcagcacatgtgtggggactgatggcgctaacactgttttgttcgaagagacagctgccaaggatgatgccaagtcggacatggagatattctctcgtcagaactccggagaggccacatccaaactacgtgtagatgaggtctcaccggagaactgctttactcttcagagctccaaggaggctgcacctgagacatgtggggttgtagactctctagacaagggcaagggctctcaccaagactccaaagatgatgtgcctgttagtgaaagatgtgaacagtggctccatgtgctgaacaagaacgatgctgagagcatgagtgagagacttaagttggtcgagcagatcaggatcctgttgaagaacgacgacgaacttcgcgactacgcaggtgctaatggtattactgagccactaatccattttctgaagatggctatctacagaggagatgtgcgatctcaggaggttgctacaatggctctgttcaattttgctgtcaacaatgaccggaacaagaggctgctgctgtcagctggagtcatccccttgatcgagcagatgatacaggaacgggaaacctgcgaggctgccatcgcaatgtacctgaacctctcctgcatccccgaggcgcaggcgatcatcggttcgagcgtcgctattcctttcctcgtcaatggcctgggggaaggtggctcccggagcgacacgtgccgcctggacgcgctgctcaccctgtacaatctctccctgcacgcgcccaacatcccgtccctcatggcgtccggcatcatcgagggcctccggggagtgctgacgccgtcgtccccgtggacggacaaggccctcgcggtgctgctgaacctggcgatgacccggaggggcaaggaagagatcgcggccagcgcggccatggtgggcgccatcgtgctcatcctggacaacggtgagccgggggagaaggagaaggccgtgtcgtgtctgtacgtgatctgcagcggcgacgatggcagcagccagacggtgctccaggagggcgtgatcccggcgctggtgtccgtgacggccaacggcacggccagggcccgggacaaggcgcagcggctgctgaggctgttccgggaacagcggcagcgggagttggagctggaggagatgcagccgcgggtggagctgcacgaggtggcgagccaggcggccgcgcggcaggaggaggaggaagaagaagaggaagagatggcgctggccgttacgccggccgccgcggccagtaagccgagaggcggcggcaagaagccgcggttgcgcaggtcaggctccaggaggttcaccaaggccttcacgtgcctgctcaagaagtggagcctgcgctgagcactgagctgagaaggatcggccagtccgccggtgtaagtgtaactgacctgtcttcaaactgtagcgacgtcattgtccgtctttgtccctttgacaagcgtgttgcgttctactactcattagtggtttcttgaaatgagcatgagcaaacgaaa

SEQ ID NO: 17323 - DNA, 3040 bp, Zea Mays
ggccgccattcgtgtggcccaacgccgtttcgcgtgcctctcaggcagcatgccaagggtaggcgaagggcacggccatggatacattcaagtctcctctttcagcgccaagccgccaaggtttgcctcaggtgagctttgacaaaaagaagaccatggagagaattggggtagacggggactttattgtcgccggcaattggaagctacatggagcactatgcaatgaactttacacagtaatccgtgaagttttggataccattcctccctttgagactacaagctcaggatgcagtcctgggctcctggcattgagttccttgaggatagctgttgagaaatccaagaatttactccagtattgctcagagactagcaagttttacttggtatatatttttttcacgtctgtgaatctgtttgatatttcctagtctaagtacaaaaaaaaggacggatccatggactattcttgttacaatcatgtcgccagtggtataaataaaacattacatgtgcttggcagagaacaacttctcatgagctttctctatttttgaatgcaatgtgttttacttagcactgaatttcaggctgttacagcagaacacgttctaacaaaatttgagaattcaagacaaggacttctggaaagccttcatcaagtggaagaaacaattccggaagcagtcggttctcagatcacattgattgcacaagaactggaaaaggctgctttcgttttggatcagtctgaaaaggaagttggtgatgaggtgaatcaactaattcagaacgagtcaaaatccaatgggtttcttgatgagaatgagcttgaattgctccaccaaattgctgtccgggttggtattacatcatccgtggcagctctcaccgaaagaagagcacttaggaggcttcttgagagagcccatgcagaggaggacttgaaaaaggaatcgattgcagcctgcctactccaacttattaggaaatactccaacatatttaagagtgaaacaaccgatagcaccaactctttgtgctcaagcactccttgctcctccagatcgaattctggcttgattggtatgcatcgttcactttccagctcaactgatctctacggaaactgtcagagtctcgagaagcaactcccaaaggttggctccttcagttcgaagcagatgaaagggttatcaaggagcatgcccttgccacctgaggagctgaggtgcccaatctccctgcagctcatctatgaccctgttgttattacatccggccagacatatgaacgagcttgcatcgagaagtggttcgacagtggcaacacaacctgcccgaaaactcgcaagcagttgtcccagctcttgaggacgcctaattactgcattaagggtctgatagcatcttggtgtgaacagaacggggttcctgctccatctggaccgccagaatctcccgagctagaccacatgagaatttcatgcctggaaagcagcacatgtgtggggactgatggcgctaacactgttttgttcgaagagacagctgccaaggatgatgccaagtcggacatggagatattctctcgtcagaactccggagaggccacatccaaactacgtgtagatgaggtctcaccggagaactgctttactcttcagagctccaaggaggctgcacctgagacatgtggggttgtagactctctagacaagggcaagggctctcaccaagactccaaagatgatgtgcctgttagtgaaagatgtgaacagtggctccatgtgctgaacaagaacgatgctgagagcatgagtgagagacttaagttggtcgagcagatcaggatcctgttgaagaacgacgacgaacttcgcgactacgcaggtgctaatggtattactgagccactaatccattttctgaagatggctatctacagaggagatgtgcgatctcaggaggttgctacaatggctctgttcaattttgctgtcaacaatgaccggaacaagaggctgctgctgtcagctggagtcatccccttgatcgagcagatgatacaggaacgggaaacctgcgaggctgccatcgcaatgtacctgaacctctcctgcatccccgaggcgcaggcgatcatcggttcgagcgtcgctattcctttcctcgtcaatggcctgggggaaggtggctcccggagcgacacgtgccgcctggacgcgctgctcaccctgtacaatctctccctgcacgcgcccaacatcccgtccctcatggcgtccggcatcatcgagggcctccggggagtgctgacgccgtcgtccccgtggacggacaaggccctcgcggtgctgctgaacctggcgatgacccggaggggcaaggaagagatcgcggccagcgcggccatggtgggcgccatcgtgctcatcctggacaacggtgagccgggggagaaggagaaggccgtgtcgtgtctgtacgtgatctgcagcggcgacgatggcagcagccagacggtgctccaggagggcgtgatcccggcgctggtgtccgtgacggccaacggcacggccagggcccgggacaaggcgcagcggctgctgaggctgttccgggaacagcggcagcgggagttggagctggaggagatgcagccgcgggtggagctgcacgaggtggcgagccaggcggccgcgcggcaggaggaggaggaagaagaagaggaagagatggcgctggccgttacgccggccgccgcggccagtaagccgagaggcggcggcaagaagccgcggttgcgcaggtcaggctccaggaggttcaccaaggccttcacgtgcctgctcaagaagtggagcctgcgctgagcactgagctgagaaggatcggccagtccgccggtgtaagtgtaactgacctgtcttcaaactgtagcgacgtcattgtccgtctttgtccctttgacaagcgtgttgcgttctactactcattagtggtttcttgaaatgagcatgagcaaacgaaa

SEQ ID NO: 17324 - DNA, 847 bp, Zea Mays
cacaccgcgcgcgcaccaatccggccgcttcctcgcacgcggcacgcaggcacgcgcgcagtcgcatggtgattggtcgcttggagagccggtttctggttggttgctcagctctcatcaagcagcaaccagctaggtagccaacgagcacgagagcgcgacgacctgagggcgcctacctaacctagctatctgccgggtcgccctacgtgtgctgcggtacggtgagggtgggcgccgcgcgcaccgcatgaacccgccgccgcacgagcgcggcggccgctcgcgctatggcccggcgtcggcgcagcagcagcactacccgttcgtcgtagttgaccccacggaggcggcgggggcggcggcagtgagggccttcttcccggcgccgggggccggggaaccgccgccgtcgtcatcgtccgccgcggtgcgggcgctgccgacggcgatgcaccagggacacgggtacggcggcggggcccccgagatctcgctggcgcacggcgcccatggccaccaccaccaccacgggatccatcaccggtaccatcagttcggcgtggaggggaggcaggacggcggcccgtcgtcgtcggcgtcgctgccgccgcatagcagctcgccgccgggcttcttctccagccccgtcatggataacggagacttccacattgaaggcacttgaagaatgcccttgaagataagaccaagctgaaccctaggtgtaacgtgatcaatgtcgtggtaccttcattattgcagggattgcctagtcagttcttgggctactcgagagttttgcatgtctcttgggttgtccttgacctaaaaaagttgtttaaat

SEQ ID NO: 17325 - DNA, 424 bp, Zea Mays
tatacaaaagtactacataaatatcacggcattttgaaagaacacgaagcttacgggtacgaaaacactatccaccatatgggatgtgtttatcacctcaattttggatggtacatttcaaaaggatgtgaaaatgattgggtaccaaattctaaaagacataatttgagtgcaaaatatgattccttactatgaaacgatgatgcagggaatcacgaacacttcaaaattggctcgaatgggtacatatatacatggaaagatcttagtgtcactgagggctgatctggtggatgtggttgaattgtaagggaattcccaccatagatcttgaatagtacaagaatttctcccacatgaatccactccaattccccttccaccaaaccagcccaggaggaggagatccctacacaccagatgc

SEQ ID NO: 17326 - DNA, 613 bp, Zea Mays
attcaaggtagtatggtttctctgctaaggtaccgacttgactcacagctttccattcagagtatccagcttggtaagcaatacaatcacatcttgaccgtcacttgccattgccagccagtcagtctatagctaatcctgctttgctgaattatgtacaccataactaggcaccaattaaaaaaatggggaatcgacgcggctgcacaacaatgattcaatcgatgaattacttaattgaagagaacaatcgatgaattaattaattgacgcgcaggttgccagggtgagtagactgattagatactgtttggtgtacagtaaccagtgatcatgtctcggtggcctctgactgtcaataagctcgtcacgattttgggtctgtcacggacatattctggctgcctgaaggactgaaatatgcctccagcggtccagcctgcaataaaccatgctgctaaatgtgatcatcataattttctgtccttcacgcaattctgtacatgggcagcagttttgtcctggtcagaccaaatgttgttgtacgggtggatcggaatgcgcacgtctcataggcgtttgagcttcaacaatcttctgcatagcaaagtgg

SEQ ID NO: 17327 - DNA, 579 bp, Zea Mays
tgcaggtttgcagaattcaaccaggactagccagtatcctccatcagctattcctggatcagaagagaaaggagggaactactactttgagtctcagtcaagtccttgaagggacaaagaggaaaattgcagcattattcttctatgaaactctggttctgaagaaccgtgggcttgtagaagttaaacaagaacatcattatgatgatatcatactctcagagactccaaaacttaaagcagagcttcagcgctgtaggaactgattgtcagcttaacttagcatgttcctttgtttaaggagagttttatggccagacctaactctaggtgcccagcatttcaccttgttattatctatctcatgtaggcatcttttcgatggcgattcgaattcagatgtatatacaagttactcatggtcacatgatgtgtacgagtgttagctggttaggagcataggatatgttttgagttaatgatttagttctaactgaataacagatgtatatcacggttcttatctttagcgttgaatgttgatgtcatttgctagtatcgctcgtaccatttgaatat

SEQ ID NO: 17328 - DNA, 1312 bp, Zea Mays
  misc_feature (1311)..(1312): n is a, c, g, or t
ctcctcggctcctccttcccctcgaagccctccctgtattttcgtcagacagacactcgcacagtcgcactccccagaaaccgtccaaaaaccagcagccggccccgccccgcgcgcggagtgctcgatcgctctggttttccactcccggtgcccgttggcgcagcctgaggccgcggcggcggcggcggcggcgctcggcgtttcgcgcgagcggtggttacgagggaggggccgagatggtccactccaacgccctgctgtggaagaagggaccggtccacacggtgtggaaggcgtcgttctgcaaagagtcagagctcagccgggacaaggtcgcgggcacggacatcgtcgcctccgttggcgagattatgttggatgtccgcagcccccatggacttcaccttgcagtactggcaaagcttctgtttggaattgttaggatattctccaagaagatggagttcctcctccatgatttcaatgagctttctcggtcatttcgactaagtcaacttgctgaacctactttgccaagtggaaggttgacactcggagttttgaagcaagcgaataaagatgtccgtgtaggaaggttagtggtaggccagcaaaacacctgcaaagtacaaaaaactgttcatgctgtgagaacaactgaagtctctagtgcaatatcaagtgaaggccactctgtaagggtagaaacagaagttactctagggatatctgtggtaatcaaagaaacacgtttgccagatggtctgccaaccttcacaattccaagatcatttgagcttgactctttcaatttggggattgctgaagatatagatgatgaaggtgatgaccaccatcagttggcacaccaagatattttattgagagatgagagacatcatgccccctatttttatgagccttatcaaagagtgtcatgttcatatgctgttgattctgctggttttctgccggaatacattgctcttccaaataatattctagacttcaccgaagggggtaaatctgaaatagaaaacaagaatgccgattctgcttggttcacaccattgaaggatgttcttccacctgagatgatgggtatggtggctgaagcaaaggatcttgcaaaggaaagcaaaactggggataattccgtaagacaagtgaacatgaatgagaataacaggggttctgattgtactatgatttctatccctctgcaagaaagtcaagaactgcaatgctctgataatgctctggagaatatggcttgtggaagtaggagtgcaaattacaccacaactnn

SEQ ID NO: 17329 - DNA, 1225 bp, Zea Mays
  misc_feature (1224)..(1225): n is a, c, g, or t
agcaggcccacttggaagcgagtgatacaccgcctcagttgagctcgccttctttttacctggcctcgtaattcgtaaataataatatcggcctgttctgcattgcctcgagttgggtcccgtcgctcatccgcacagcgaaggcggaggagaaatgaccgcagagggtttgcagcgaatattttccatcttccgtggtccgtacacagtatcggtggaggagtgccctgaggtaggaatgactagagatgacaattggtacccgctattcgaaactcggcgagattatgttggatgtccgcagcccccatggacttcaccttgcagtactggcaaagcttctgtttggaattgttaggatattctccaagaagatggagttcctcctccatgatttcaatgagctttctcggtcatttcgactaagtcaacttgctgaacctactttgccaagtggaaggttgacactcggagttttgaagcaagcgaataaagatgtccgtgtaggaaggttagtggtaggccagcaaaacacctgcaaagtacaaaaaactgttcatgctgtgagaacaactgaagtctctagtgcaatatcaagtgaaggccactctgtaagggtagaaacagaagttactctagggatatctgtggtaatcaaagaaacacgtttgccagatggtctgccaaccttcacaattccaagatcatttgagcttgactctttcaatttggggattgctgaagatatagatgatgaaggtgatgaccaccatcagttggcacaccaagatattttattgagagatgagagacatcatgccccctatttttatgagccttatcaaagagtgtcatgttcatatgctgttgattctgctggttttctgccggaatacattgctcttccaaataatattctagacttcaccgaagggggtaaatctgaaatagaaaacaagaatgccgattctgcttggttcacaccattgaaggatgttcttccacctgagatgatgggtatggtggctgaagcaaaggatcttgcaaaggaaagcaaaactggggataattccgtaagacaagtgaacatgaatgagaataacaggggttctgattgtactatgatttctatccctctgcaagaaagtcaagaactgcaatgctctgataatgctctggagaatatggcttgtggaagtaggagtgcaaattacaccacaactnn

SEQ ID NO: 17330 - DNA, 3024 bp, Zea Mays
gaggcgacccgtaacaacgcggagcgtcagcctatagccgtcgctcccgtgtcccgtccgccgtcccccttcctctcgtattcgcttcgccgcccaacccactgtgcaccgctgccttcccgaccgttctcgccgccgccgtctccgcgcctgccaccccgcgcgctcggccaccggcgcccacggtgcggctcgatcaaggccagatcagaacccgccccggtccgcgtcacgccgatattttctgttttttggtacggatctagggttttcctgctgcggattcgttcgattcgctcatggccgctgggcgccatgggggttacagggactacgaggcgagggagcgggagctcgacgcggaggcctccaggaggagcaaggagcagcaccaccatctcggcggccgccaccgcgacgtggaccgccaccgcgatggcgggcgcagcaggggtggcagagactttgccaacggctacggtcgccgacgctcgccgccaccccggagccggctggcgggaaggcttggtgaccgtgagcctggcgaggtgctgagcggtagtgcatctgatgactccggtgggaggccgcatagagggagggagaatggcgtgctcagttccggcagggagggtgatgtgatggcagtcactgatgactccggtgggaggtcgcataggaggagggagaatggcgtgctcagttccggcagggatggtgatgtgatggcagtcacagggatatcttcgccgagcaagaagaggaaattctcaccgataatttgggacagggatagcccaaagccaccacattctgatgcagccagggacaagaaagctgtagaacctgtgccttctgagctccctccgcccccgccgttgcctccacaagaccacatcacactgaggttggctgtggagaagtcacttatggatatagaacctactgttggtacagagagtgctgtgcagttgctggaacatgaggtgaataaggtgacagagcaggaagaggagtatgcaacaatgaggaacatatcgacttcaagatgggctggtgctaatgatgatgatgatgatggggcagctccagtgaagaagaaaagtctgtctcctgcagactcctctgtggcagggcagtggaaaagagcaagtccagaacctggtgaagtatctggaggaaggacaatgtctaggtcatctgactctgggaaaatgagtaatgatgagaaagaagactttgaagcaaatgaagatgactatatggatgtcgacaagggacatgctagtgacagtgatacagaaaaccgtatgtcagatactgactcagacaatgaaatacacagacctgaaacccctgaaagagagaaggcaccacacaggtgtatcaatatgcttcaagattgcagaagtgttgatgagtttgagaggctcaacaaaattaacgagggcacatatggtgttgtatacagagcaagggataagaagacaagtgagattgttgcattgaagaaggtaaagatggagaaggagcgagaaggtttcccattaacctctcttagggaaataaatatcctcttgtctttccacaatccttcaattgtggatgttaaggaagtagtagttggaagtagtctagatagtatttttatggttatggagtacatggaacatgatcttaaaggtgtcatggagaccatgaaacaaccatatacccaaagcgaggtaaagtgtttgatgcttcagctgctagaaggtgtaaaatatctacatgacaattgggtgcttcatagggatctgaagacctcaaatcttttgttgaataaccgtgggccccagaattgttgttaggaacaaaggagtattctactgctattgatatgtggtctgtgggctgtataatggctgagcttcttgccaaagaaccgttattcaatggaaaaacagagtttgaacagctagataagatttttagaacactcggcacacctaatgagaagatttggcctggctatgctaaattaccaggtgtgaaagtaaattttgttaaacaaccgtataatagactaagggataagttcccagccgcttctttttctgggcgaccaatcctgtctgaagctggttttgatctattgaacagactgctgacttatgaccctgataagcgcatatcagcagacgatgctcttaagcacaaatggttctctgaagttcctctgcctaaatcaaaggacttcatgccaacattccctgctcttaatgaacttgacaggcgttccagaaggtatctgaagagtcctgatcctctggaagagcaacgtttgaaagaactgcaagggaacataggcaaccatgggctttttgggtgaactagaagcacttgattgggtctgcaagggaacataggcaaccgtgggctttttggctgaactagaagcacttgattgggtcctgtccgtcctaactgttatgcttcacactgaaatcctgagttcatgaggttagatatcttctgaggcttggtaccggtttaaatggataaggtttctccttgtggcccatcatagaaattttgttgcaggattaacgcttcatccagatcgatcataaaagcaaatataatctacctgcatcataagaagcgcaggggaaggatgccttttgctttcatcaggaaatcaatggcattaatacaacttagaagctaagctgtggctgcttcaagataggaagcttgatggctgtcagcttattgtacctaagtgactaaattttgtggagggccttcaaaagtgttcatctcttactagtgaaccatggtgggattgccgagccgttcggctaaccgggctagccgataattggtggtggtcggctccaccttatcactgttttggattttgaatttggtaaagtttgtaaattttgaaaacttttgatgacattttttgtataaatactatatattatttgaagattttctgctgaaaccaaatttcaaaatacacaacgaatttcaaac

SEQ ID NO: 17331 - DNA, 3250 bp, Zea Mays
gaggcgacccgtaacaacgcggagcgtcagcctatagccgtcgctcccgtgtcccgtccgccgtcccccttcctctcgtattcgcttcgccgcccaacccactgtgcaccgctgccttcccgaccgttctcgccgccgccgtctccgcgcctgccaccccgcgcgctcggccaccggcgcccacggtgcggctcgatcaaggccagatcagaacccgccccggtccgcgtcacgccgatattttctgttttttggtacggatctagggttttcctgctgcggattcgttcgattcgctcatggccgctgggcgccatgggggttacagggactacgaggcgagggagcgggagctcgacgcggaggcctccaggaggagcaaggagcagcaccaccatctcggcggccgccaccgcgacgtggaccgccaccgcgatggcgggcgcagcaggggtggcagagactttgccaacggctacggtcgccgacgctcgccgccaccccggagccggctggcgggaaggcttggtgaccgtgagcctggcgaggtgctgagcggtagtgcatctgatgactccggtgggaggccgcatagagggagggagaatggcgtgctcagttccggcagggagggtgatgtgatggcagtcactgatgactccggtgggaggtcgcataggaggagggagaatggcgtgctcagttccggcagggatggtgatgtgatggcagtcacagggatatcttcgccgagcaagaagaggaaattctcaccgataatttgggacagggatagcccaaagccaccacattctgatgcagccagggacaagaaagctgtagaacctgtgccttctgagctccctccgcccccgccgttgcctccacaagaccacatcacactgaggttggctgtggagaagtcacttatggatatagaacctactgttggtacagagagtgctgtgcagttgctggaacatgaggtgaataaggtgacagagcaggaagaggagtatgcaacaatgaggaacatatcgacttcaagatgggctggtgctaatgatgatgatgatgatggggcagctccagtgaagaagaaaagtctgtctcctgcagactcctctgtggcagggcagtggaaaagagcaagtccagaacctggtgaagtatctggaggaaggacaatgtctaggtcatctgactctgggaaaatgagtaatgatgagaaagaagactttgaagcaaatgaagatgactatatggatgtcgacaagggacatgctagtgacagtgatacagaaaaccgtatgtcagatactgactcagacaatgaaatacacagacctgaaacccctgaaagagagaaggcaccacacaggtgtatcaatatgcttcaagattgcagaagtgttgatgagtttgagaggctcaacaaaattaacgagggcacatatggtgttgtatacagagcaagggataagaagacaagtgagattgttgcattgaagaaggtaaagatggagaaggagcgagaaggtttcccattaacctctcttagggaaataaatatcctcttgtctttccacaatccttcaattgtggatgttaaggaagtagtagttggaagtagtctagatagtatttttatggttatggagtacatggaacatgatcttaaaggtgtcatggagaccatgaaacaaccatatacccaaagcgaggtaaagtgtttgatgcttcagctgctagaaggtgtaaaatatctacatgacaattgggtgcttcatagggatctgaagacctcaaatcttttgttgaataaccgtgggccccagaattgttgttaggaacaaaggagtattctactgctattgatatgtggtctgtgggctgtataatggctgagcttcttgccaaagaaccgttattcaatggaaaaacagagtttgaacagctagataagatttttagaacactcggcacacctaatgagaagatttggcctggctatgctaaattaccaggtgtgaaagtaaattttgttaaacaaccgtataatagactaagggataagttcccagccgcttctttttctgggcgaccaatcctgtctgaagctggttttgatctattgaacagactgctgacttatgaccctgataaggtgcagtttttactcaaattggtatttgtttttagatttttattatcatcatgcataccagactgagcacacttttttctctcgtacagcgcatatcagcagacgatgctcttaagcacaaatggttctctgaagttcctctgcctaaatcaaaggacttcatgccaacattccctgctcttaatgaacttgacaggcgttccagaaggtatctgaagagtcctgatcctctggaagagcaacgtttgaaagaactgcaagggaacataggcaaccatgggctttttgggtgaactagaagcacttgattgggtctgcaagggaacataggcaaccgtgggctttttggctgaactagaagcacttgattgggtcctgtccgtcctaactgttatgcttcacactgaaatcctgagttcatgaggttagatatcttctgaggattaacgcttcatccagatcgatcataaaagcaaatataatctacctgcatcataaggtgtggcgtgttggcttttattggttacaccagtttcacctttggaacttctctatgtaaaatattccagattggtacgttgtaaacaatgtccagtgtgttggatttaaatttaaaacgaaacatcatcattattagttttctttatgctccttgtgccttttcttttgatctttgcgttttgtttgcaagagacaaaagaagcgcaggggaaggatgccttttgctttcatcaggaaatcaatggcattaatacaacttagaagctaagctgtggctgcttcaagataggaagcttgatggctgtcagcttattgtacctaagtgactaaattttgtggagggccttcaaaagtgttcatctcttactagtgaaccatggtgggattgccgagccgttcggctaaccgggctagccgataattggtggtggtcggctccaccttatcactgttttggattttgaatttggtaaagtttgtaaattttgaaaacttttgatgacattttttgtataaatactatatattatttgaagattttctgctgaaaccaaatttcaaaatacacaacgaatttcaaac

SEQ ID NO: 17332 - DNA, 3106 bp, Zea Mays
gaggcgacccgtaacaacgcggagcgtcagcctatagccgtcgctcccgtgtcccgtccgccgtcccccttcctctcgtattcgcttcgccgcccaacccactgtgcaccgctgccttcccgaccgttctcgccgccgccgtctccgcgcctgccaccccgcgcgctcggccaccggcgcccacggtgcggctcgatcaaggccagatcagaacccgccccggtccgcgtcacgccgatattttctgttttttggtacggatctagggttttcctgctgcggattcgttcgattcgctcatggccgctgggcgccatgggggttacagggactacgaggcgagggagcgggagctcgacgcggaggcctccaggaggagcaaggagcagcaccaccatctcggcggccgccaccgcgacgtggaccgccaccgcgatggcgggcgcagcaggggtggcagagactttgccaacggctacggtcgccgacgctcgccgccaccccggagccggctggcgggaaggcttggtgaccgtgagcctggcgaggtgctgagcggtagtgcatctgatgactccggtgggaggccgcatagagggagggagaatggcgtgctcagttccggcagggagggtgatgtgatggcagtcactgatgactccggtgggaggtcgcataggaggagggagaatggcgtgctcagttccggcagggatggtgatgtgatggcagtcacagggatatcttcgccgagcaagaagaggaaattctcaccgataatttgggacagggatagcccaaagccaccacattctgatgcagccagggacaagaaagctgtagaacctgtgccttctgagctccctccgcccccgccgttgcctccacaagaccacatcacactgaggttggctgtggagaagtcacttatggatatagaacctactgttggtacagagagtgctgtgcagttgctggaacatgaggtgaataaggtgacagagcaggaagaggagtatgcaacaatgaggaacatatcgacttcaagatgggctggtgctaatgatgatgatgatgatggggcagctccagtgaagaagaaaagtctgtctcctgcagactcctctgtggcagggcagtggaaaagagcaagtccagaacctggtgaagtatctggaggaaggacaatgtctaggtcatctgactctgggaaaatgagtaatgatgagaaagaagactttgaagcaaatgaagatgactatatggatgtcgacaagggacatgctagtgacagtgatacagaaaaccgtatgtcagatactgactcagacaatgaaatacacagacctgaaacccctgaaagagagaaggcaccacacaggtgtatcaatatgcttcaagattgcagaagtgttgatgagtttgagaggctcaacaaaattaacgagggcacatatggtgttgtatacagagcaagggataagaagacaagtgagattgttgcattgaagaaggtaaagatggagaaggagcgagaaggtttcccattaacctctcttagggaaataaatatcctcttgtctttccacaatccttcaattgtggatgttaaggaagtagtagttggaagtagtctagatagtatttttatggttatggagtacatggaacatgatcttaaaggtgtcatggagaccatgaaacaaccatatacccaaagcgaggtaaagtgtttgatgcttcagctgctagaaggtgtaaaatatctacatgacaattgggtgcttcatagggatctgaagacctcaaatcttttgttgaataaccgtggtgagttaaaaatatgtgattttggactgtctcgtcaatatggaagcccattaaaaccttatactcaactggttgtgactttgtggtacagggccccagaattgttgttaggaacaaaggagtattctactgctattgatatgtggtctgtgggctgtataatggctgagcttcttgccaaagaaccgttattcaatggaaaaacagagtttgaacagctagataagatttttagaacactcggcacacctaatgagaagatttggcctggctatgctaaattaccaggtgtgaaagtaaattttgttaaacaaccactaagggataagttcccagccgcttctttttctgggcgaccaatcctgtctgaagctggttttgatctattgaacagactgctgacttatgaccctgataagcgcatatcagcagacgatgctcttaagcacaaatggttctctgaagttcctctgcctaaatcaaaggacttcatgccaacattccctgctcttaatgaacttgacaggcgttccagaaggtatctgaagagtcctgatcctctggaagagcaacgtttgaaagaactgcaagggaacataggcaaccatgggctttttgggtgaactagaagcacttgattgggtctgcaagggaacataggcaaccgtgggctttttggctgaactagaagcacttgattgggtcctgtccgtcctaactgttatgcttcacactgaaatcctgagttcatgaggttagatatcttctgaggcttggtaccggtttaaatggataaggtttctccttgtggcccatcatagaaattttgttgcaggattaacgcttcatccagatcgatcataaaagcaaatataatctacctgcatcataagaagcgcaggggaaggatgccttttgctttcatcaggaaatcaatggcattaatacaacttagaagctaagctgtggctgcttcaagataggaagcttgatggctgtcagcttattgtacctaagtgactaaattttgtggagggccttcaaaagtgttcatctcttactagtgaaccatggtgggattgccgagccgttcggctaaccgggctagccgataattggtggtggtcggctccaccttatcactgttttggattttgaatttggtaaagtttgtaaattttgaaaacttttgatgacattttttgtataaatactatatattatttgaagattttctgctgaaaccaaatttcaaaatacacaacgaatttcaaac

SEQ ID NO: 17333 - DNA, 3321 bp, Zea Mays
gaggcgacccgtaacaacgcggagcgtcagcctatagccgtcgctcccgtgtcccgtccgccgtcccccttcctctcgtattcgcttcgccgcccaacccactgtgcaccgctgccttcccgaccgttctcgccgccgccgtctccgcgcctgccaccccgcgcgctcggccaccggcgcccacggtgcggctcgatcaaggccagatcagaacccgccccggtccgcgtcacgccgatattttctgttttttggtacggatctagggttttcctgctgcggattcgttcgattcgctcatggccgctgggcgccatgggggttacagggactacgaggcgagggagcgggagctcgacgcggaggcctccaggaggagcaaggagcagcaccaccatctcggcggccgccaccgcgacgtggaccgccaccgcgatggcgggcgcagcaggggtggcagagactttgccaacggctacggtcgccgacgctcgccgccaccccggagccggctggcgggaaggcttggtgaccgtgagcctggcgaggtgctgagcggtagtgcatctgatgactccggtgggaggccgcatagagggagggagaatggcgtgctcagttccggcagggagggtgatgtgatggcagtcactgatgactccggtgggaggtcgcataggaggagggagaatggcgtgctcagttccggcagggatggtgatgtgatggcagtcacagggatatcttcgccgagcaagaagaggaaattctcaccgataatttgggacagggatagcccaaagccaccacattctgatgcagccagggacaagaaagctgtagaacctgtgccttctgagctccctccgcccccgccgttgcctccacaagaccacatcacactgaggttggctgtggagaagtcacttatggatatagaacctactgttggtacagagagtgctgtgcagttgctggaacatgaggtgaataaggtgacagagcaggaagaggagtatgcaacaatgaggaacatatcgacttcaagatgggctggtgctaatgatgatgatgatgatggggcagctccagtgaagaagaaaagtctgtctcctgcagactcctctgtggcagggcagtggaaaagagcaagtccagaacctggtgaagtatctggaggaaggacaatgtctaggtcatctgactctgggaaaatgagtaatgatgagaaagaagactttgaagcaaatgaagatgactatatggatgtcgacaagggacatgctagtgacagtgatacagaaaaccgtatgtcagatactgactcagacaatgaaatacacagacctgaaacccctgaaagagagaaggcaccacacaggtgtatcaatatgcttcaagattgcagaagtgttgatgagtttgagaggctcaacaaaattaacgagggcacatatggtgttgtatacagagcaagggataagaagacaagtgagattgttgcattgaagaaggtaaagatggagaaggagcgagaaggtttcccattaacctctcttagggaaataaatatcctcttgtctttccacaatccttcaattgtggatgttaaggaagtagtagttggaagtagtctagatagtatttttatggttatggagtacatggaacatgatcttaaaggtgtcatggagaccatgaaacaaccatatacccaaagcgaggtaaagtgtttgatgcttcagctgctagaaggtgtaaaatatctacatgacaattgggtgcttcatagggatctgaagacctcaaatcttttgttgaataaccgtggtgagttaaaaatatgtgattttggactgtctcgtcaatatggaagcccattaaaaccttatactcaactggttgtgactttgtggtacagggccccagaattgttgttaggaacaaaggagtattctactgctattgatatgtggtctgtgggctgtataatggctgagcttcttgccaaagaaccgttattcaatggaaaaacagagtttgaacagctagataagatttttagaacactcggcacacctaatgagaagatttggcctggctatgctaaattaccaggtgtgaaagtaaattttgttaaacaaccgtataatagactaagggataagttcccagccgcttctttttctgggcgaccaatcctgtctgaagctggttttgatctattgaacagactgctgacttatgaccctgataagcgcatatcagcagacgatgctcttaagcacaaatggttctctgaagttcctctgcctaaatcaaaggacttcatgccaacattccctgctcttaatgaacttgacaggcgttccagaaggtatctgaagagtcctgatcctctggaagagcaacgtttgaaagaactgcaagggaacataggcaaccatgggctttttgggtgaactagaagcacttgattgggtctgcaagggaacataggcaaccgtgggctttttggctgaactagaagcacttgattgggtcctgtccgtcctaactgttatgcttcacactgaaatcctgagttcatgaggttagatatcttctgaggcttggtaccggtttaaatggataaggtttctccttgtggcccatcatagaaattttgttgcaggattaacgcttcatccagatcgatcataaaagcaaatataatctacctgcatcataaggtgtggcgtgttggcttttattggttacaccagtttcacctttggaacttctctatgtaaaatattccagattggtacgttgtaaacaatgtccagtgtgttggatttaaatttaaaacgaaacatcatcattattagttttctttatgctccttgtgccttttcttttgatctttgcgttttgtttgcaagagacaaaagaagcgcaggggaaggatgccttttgctttcatcaggaaatcaatggcattaatacaacttagaaggtaatctaagctgtggctgcttcaagataggaagcttgatggctgtcagcttattgtacctaagtgactaaattttgtggagggccttcaaaagtgttcatctcttactagtgaaccatggtgggattgccgagccgttcggctaaccgggctagccgataattggtggtggtcggctccaccttatcactgttttggattttgaatttggtaaagtttgtaaattttgaaaacttttgatgacattttttgtataaatactatatattatttgaagattttctgctgaaaccaaatttcaaaatacacaacgaatttcaaac

SEQ ID NO: 17334 - DNA, 3312 bp, Zea Mays
gcctggaggcgacccgtaacaacgcggagcgtcagcctatagccgtcgctcccgtgtcccgtccgccgtcccccttcctctcgtattcgcttcgccgcccaacccactgtgcaccgctgccttcccgaccgttctcgccgccgccgtctccgcgcctgccaccccgcgcgctcggccaccggcgcccacggtgcggctcgatcaaggccagatcagaacccgccccggtccgcgtcacgccgatattttctgttttttggtacggatctagggttttcctgctgcggattcgttcgattcgctcatggccgctgggcgccatgggggttacagggactacgaggcgagggagcgggagctcgacgcggaggcctccaggaggagcaaggagcagcaccaccatctcggcggccgccaccgcgacgtggaccgccaccgcgatggcgggcgcagcaggggtggcagagactttgccaacggctacggtcgccgacgctcgccgccaccccggagccggctggcgggaaggcttggtgaccgtgagcctggcgaggtgctgagcggtagtgcatctgatgactccggtgggaggccgcatagagggagggagaatggcgtgctcagttccggcagggagggtgatgtgatggcagtcactgatgactccggtgggaggtcgcataggaggagggagaatggcgtgctcagttccggcagggatggtgatgtgatggcagtcacagggatatcttcgccgagcaagaagaggaaattctcaccgataatttgggacagggatagcccaaagccaccacattctgatgcagccagggacaagaaagctgtagaacctgtgccttctgagctccctccgcccccgccgttgcctccacaagaccacatcacactgaggttggctgtggagaagtcacttatggatatagaacctactgttggtacagagagtgctgtgcagttgctggaacatgaggtgaataaggtgacagagcaggaagaggagtatgcaacaatgaggaacatatcgacttcaagatgggctggtgctaatgatgatgatgatgatggggcagctccagtgaagaagaaaagtctgtctcctgcagactcctctgtggcagggcagtggaaaagagcaagtccagaacctggtgaagtatctggaggaaggacaatgtctaggtcatctgactctgggaaaatgagtaatgatgagaaagaagactttgaagcaaatgaagatgactatatggatgtcgacaagggacatgctagtgacagtgatacagaaaaccgtatgtcagatactgactcagacaatgaaatacacagacctgaaacccctgaaagagagaaggcaccacacaggtgtatcaatatgcttcaagattgcagaagtgttgatgagtttgagaggctcaacaaaattaacgagggcacatatggtgttgtatacagagcaagggataagaagacaagtgagattgttgcattgaagaaggtaaagatggagaaggagcgagaaggtttcccattaacctctcttagggaaataaatatcctcttgtctttccacaatccttcaattgtggatgttaaggaagtagtagttggaagtagtctagatagtatttttatggttatggagtacatggaacatgatcttaaaggtgtcatggagaccatgaaacaaccatatacccaaagcgaggtaaagtgtttgatgcttcagctgctagaaggtgtaaaatatctacatgacaattgggtgcttcatagggatctgaagacctcaaatcttttgttgaataaccgtggtgagttaaaaatatgtgattttggactgtctcgtcaatatggaagcccattaaaaccttatactcaactggttgtgactttgtggtacagggccccagaattgttgttaggaacaaaggagtattctactgctattgatatgtggtctgtgggctgtataatggctgagcttcttgccaaagaaccgttattcaatggaaaaacagagtttgaacagctagataagatttttagaacactcggcacacctaatgagaagatttggcctggctatgctaaattaccaggtgtgaaagtaaattttgttaaacaaccactaagggataagttcccagccgcttctttttctgggcgaccaatcctgtctgaagctggttttgatctattgaacagactgctgacttatgaccctgataagcgcatatcagcagacgatgctcttaagcacaaatggttctctgaagttcctctgcctaaatcaaaggacttcatgccaacattccctgctcttaatgaacttgacaggcgttccagaaggtatctgaagagtcctgatcctctggaagagcaacgtttgaaagaactgcaagggaacataggcaaccatgggctttttgggtgaactagaagcacttgattgggtctgcaagggaacataggcaaccgtgggctttttggctgaactagaagcacttgattgggtcctgtccgtcctaactgttatgcttcacactgaaatcctgagttcatgaggttagatatcttctgaggcttggtaccggtttaaatggataaggtttctccttgtggcccatcatagaaattttgttgcaggattaacgcttcatccagatcgatcataaaagcaaatataatctacctgcatcataaggtgtggcgtgttggcttttattggttacaccagtttcacctttggaacttctctatgtaaaatattccagattggtacgttgtaaacaatgtccagtgtgttggatttaaatttaaaacgaaacatcatcattattagttttctttatgctccttgtgccttttcttttgatctttgcgttttgtttgcaagagacaaaagaagcgcaggggaaggatgccttttgctttcatcaggaaatcaatggcattaatacaacttagaagctaagctgtggctgcttcaagataggaagcttgatggctgtcagcttattgtacctaagtgactaaattttgtggagggccttcaaaagtgttcatctcttactagtgaaccatggtgggattgccgagccgttcggctaaccgggctagccgataattggtggtggtcggctccaccttatcactgttttggattttgaatttggtaaagtttgtaaattttgaaaacttttgatgacattttttgtataaatactatatattatttgaagattttctgctgaaaccaaatttcaaaatacacaacgaatttcaaac

SEQ ID NO: 17335 - DNA, 3273 bp, Zea Mays
cagaaaaggcctggaggcgacccgtaacaacgcggagcgtcagcctatagccgtcgctcccgtgtcccgtccgccgtcccccttcctctcgtattcgcttcgccgcccaacccactgtgcaccgctgccttcccgaccgttctcgccgccgccgtctccgcgcctgccaccccgcgcgctcggccaccggcgcccacggtgcggctcgatcaaggccagatcagaacccgccccggtccgcgtcacgccgatattttctgttttttggtacggatctagggttttcctgctgcggattcgttcgattcgctcatggccgctgggcgccatgggggttacagggactacgaggcgagggagcgggagctcgacgcggaggcctccaggaggagcaaggagcagcaccaccatctcggcggccgccaccgcgacgtggaccgccaccgcgatggcgggcgcagcaggggtggcagagactttgccaacggctacggtcgccgacgctcgccgccaccccggagccggctggcgggaaggcttggtgaccgtgagcctggcgaggtgctgagcggtagtgcatctgatgactccggtgggaggccgcatagagggagggagaatggcgtgctcagttccggcagggagggtgatgtgatggcagtcactgatgactccggtgggaggtcgcataggaggagggagaatggcgtgctcagttccggcagggatggtgatgtgatggcagtcacagggatatcttcgccgagcaagaagaggaaattctcaccgataatttgggacagggatagcccaaagccaccacattctgatgcagccagggacaagaaagctgtagaacctgtgccttctgagctccctccgcccccgccgttgcctccacaagaccacatcacactgaggttggctgtggagaagtcacttatggatatagaacctactgttggtacagagagtgctgtgcagttgctggaacatgaggtgaataaggtgacagagcaggaagaggagtatgcaacaatgaggaacatatcgacttcaagatgggctggtgctaatgatgatgatgatgatggggcagctccagtgaagaagaaaagtctgtctcctgcagactcctctgtggcagggcagtggaaaagagcaagtccagaacctggtgaagtatctggaggaaggacaatgtctaggtcatctgactctgggaaaatgagtaatgatgagaaagaagactttgaagcaaatgaagatgactatatggatgtcgacaagggacatgctagtgacagtgatacagaaaaccgtatgtcagatactgactcagacaatgaaatacacagacctgaaacccctgaaagagagaaggcaccacacaggtgtatcaatatgcttcaagattgcagaagtgttgatgagtttgagaggctcaacaaaattaacgagggcacatatggtgttgtatacagagcaagggataagaagacaagtgagattgttgcattgaagaaggtaaagatggagaaggagcgagaaggtttcccattaacctctcttagggaaataaatatcctcttgtctttccacaatccttcaattgtggatgttaaggaagtagtagttggaagtagtctagatagtatttttatggttatggagtacatggaacatgatcttaaaggtgtcatggagaccatgaaacaaccatatacccaaagcgaggtaaagtgtttgatgcttcagctgctagaaggtgtaaaatatctacatgacaattgggtgcttcatagggatctgaagacctcaaatcttttgttgaataaccgtggtgagttaaaaatatgtgattttggactgtctcgtcaatatggaagcccattaaaaccttatactcaactggttgtgactttgtggtacagggccccagaattgttgttaggaacaaaggagtattctactgctattgatatgtggtctgtgggctgtataatggctgagcttcttgccaaagaaccgttattcaatggaaaaacagagtttgaacagctagataagatttttagaacactcggcacacctaatgagaagatttggcctggctatgctaaattaccaggtgtgaaagtaaattttgttaaacaaccgtataatagactaagggataagttcccagccgcttctttttctgggcgaccaatcctgtctgaagctggttttgatctattgaacagactgctgacttatgaccctgataagcgcatatcagcagacgatgctcttaagcacaaatggttctctgaagttcctctgcctaaatcaaaggacttcatgccaacattccctgctcttaatgaacttgacaggcgttccagaaggtatctgaagagtcctgatcctctggaagagcaacgtttgaaagaactgcaagggaacataggcaaccatgggctttttgggtgaactagaagcacttgattgggtctgcaagggaacataggcaaccgtgggctttttggctgaactagaagcacttgattgggtcctgtccgtcctaactgttatgcttcacactgaaatcctgagttcatgaggttagatatcttctgaggtgaggtgccatggacatgaagtatcacatcttctcggtgtctagcagcaactgatagtgttctttagcaggcttggtaccggtttaaatggataaggtttctccttgtggcccatcatagaaattttgttgcaggattaacgcttcatccagatcgatcataaaagcaaatataatctacctgcatcataaggtgtggcgtgttggcttttattggttacaccagtttcacctttggaacttctctatgtaaaatattccagattgaagcgcaggggaaggatgccttttgctttcatcaggaaatcaatggcattaatacaacttagaagctaagctgtggctgcttcaagataggaagcttgatggctgtcagcttattgtacctaagtgactaaattttgtggagggccttcaaaagtgttcatctcttactagtgaaccatggtgggattgccgagccgttcggctaaccgggctagccgataattggtggtggtcggctccaccttatcactgttttggattttgaatttggtaaagtttgtaaattttgaaaacttttgatgacattttttgtataaatactatatattatttgaagattttctgctgaaaccaaatttcaaaatacacaacgaatttcaaac

SEQ ID NO: 17336 - DNA, 3211 bp, Zea Mays
cagaaaaggcctggaggcgacccgtaacaacgcggagcgtcagcctatagccgtcgctcccgtgtcccgtccgccgtcccccttcctctcgtattcgcttcgccgcccaacccactgtgcaccgctgccttcccgaccgttctcgccgccgccgtctccgcgcctgccaccccgcgcgctcggccaccggcgcccacggtgcggctcgatcaaggccagatcagaacccgccccggtccgcgtcacgccgatattttctgttttttggtacggatctagggttttcctgctgcggattcgttcgattcgctcatggccgctgggcgccatgggggttacagggactacgaggcgagggagcgggagctcgacgcggaggcctccaggaggagcaaggagcagcaccaccatctcggcggccgccaccgcgacgtggaccgccaccgcgatggcgggcgcagcaggggtggcagagactttgccaacggctacggtcgccgacgctcgccgccaccccggagccggctggcgggaaggcttggtgaccgtgagcctggcgaggtgctgagcggtagtgcatctgatgactccggtgggaggccgcatagagggagggagaatggcgtgctcagttccggcagggagggtgatgtgatggcagtcactgatgactccggtgggaggtcgcataggaggagggagaatggcgtgctcagttccggcagggatggtgatgtgatggcagtcacagggatatcttcgccgagcaagaagaggaaattctcaccgataatttgggacagggatagcccaaagccaccacattctgatgcagccagggacaagaaagctgtagaacctgtgccttctgagctccctccgcccccgccgttgcctccacaagaccacatcacactgaggttggctgtggagaagtcacttatggatatagaacctactgttggtacagagagtgctgtgcagttgctggaacatgaggtgaataaggtgacagagcaggaagaggagtatgcaacaatgaggaacatatcgacttcaagatgggctggtgctaatgatgatgatgatgatggggcagctccagtgaagaagaaaagtctgtctcctgcagactcctctgtggcagggcagtggaaaagagcaagtccagaacctggtgaagtatctggaggaaggacaatgtctaggtcatctgactctgggaaaatgagtaatgatgagaaagaagactttgaagcaaatgaagatgactatatggatgtcgacaagggacatgctagtgacagtgatacagaaaaccgtatgtcagatactgactcagacaatgaaatacacagacctgaaacccctgaaagagagaaggcaccacacaggtgtatcaatatgcttcaagattgcagaagtgttgatgagtttgagaggctcaacaaaattaacgagggcacatatggtgttgtatacagagcaagggataagaagacaagtgagattgttgcattgaagaaggtaaagatggagaaggagcgagaaggtttcccattaacctctcttagggaaataaatatcctcttgtctttccacaatccttcaattgtggatgttaaggaagtagtagttggaagtagtctagatagtatttttatggttatggagtacatggaacatgatcttaaaggtgtcatggagaccatgaaacaaccatatacccaaagcgaggtaaagtgtttgatgcttcagctgctagaaggtgtaaaatatctacatgacaattgggtgcttcatagggatctgaagacctcaaatcttttgttgaataaccgtggtgagttaaaaatatgtgattttggactgtctcgtcaatatggaagcccattaaaaccttatactcaactggttgtgactttgtggtacagggccccagaattgttgttaggaacaaaggagtattctactgctattgatatgtggtctgtgggctgtataatggctgagcttcttgccaaagaaccgttattcaatggaaaaacagagtttgaacagctagataagatttttagaacactcggcacacctaatgagaagatttggcctggctatgctaaattaccaggtgtgaaagtaaattttgttaaacaaccgtataatagactaagggataagttcccagccgcttctttttctgggcgaccaatcctgtctgaagctggttttgatctattgaacagactgctgacttatgaccctgataagcgcatatcagcagacgatgctcttaagcacaaatggttctctgaagttcctctgcctaaatcaaaggacttcatgccaacattccctgctcttaatgaacttgacaggcgttccagaaggtatctgaagagtcctgatcctctggaagagcaacgtttgaaagaactgcaagggaacataggcaaccatgggctttttgggtgaactagaagcacttgattgggtctgcaagggaacataggcaaccgtgggctttttggctgaactagaagcacttgattgggtcctgtccgtcctaactgttatgcttcacactgaaatcctgagttcatgaggttagatatcttctgaggcttggtaccggtttaaatggataaggtttctccttgtggcccatcatagaaattttgttgcaggattaacgcttcatccagatcgatcataaaagcaaatataatctacctgcatcataaggtgtggcgtgttggcttttattggttacaccagtttcacctttggaacttctctatgtaaaatattccagattgagacaaaagaagcgcaggggaaggatgccttttgctttcatcaggaaatcaatggcattaatacaacttagaagctaagctgtggctgcttcaagataggaagcttgatggctgtcagcttattgtacctaagtgactaaattttgtggagggccttcaaaagtgttcatctcttactagtgaaccatggtgggattgccgagccgttcggctaaccgggctagccgataattggtggtggtcggctccaccttatcactgttttggattttgaatttggtaaagtttgtaaattttgaaaacttttgatgacattttttgtataaatactatatattatttgaagattttctgctgaaaccaaatttcaaaatacacaacgaatttcaaac

SEQ ID NO: 17337 - DNA, 3071 bp, Zea Mays
cagaaaaggcctggaggcgacccgtaacaacgcggagcgtcagcctatagccgtcgctcccgtgtcccgtccgccgtcccccttcctctcgtattcgcttcgccgcccaacccactgtgcaccgctgccttcccgaccgttctcgccgccgccgtctccgcgcctgccaccccgcgcgctcggccaccggcgcccacggtgcggctcgatcaaggccagatcagaacccgccccggtccgcgtcacgccgatattttctgttttttggtacggatctagggttttcctgctgcggattcgttcgattcgctcatggccgctgggcgccatgggggttacagggactacgaggcgagggagcgggagctcgacgcggaggcctccaggaggagcaaggagcagcaccaccatctcggcggccgccaccgcgacgtggaccgccaccgcgatggcgggcgcagcaggggtggcagagactttgccaacggctacggtcgccgacgctcgccgccaccccggagccggctggcgggaaggcttggtgaccgtgagcctggcgaggtgctgagcggtagtgcatctgatgactccggtgggaggccgcatagagggagggagaatggcgtgctcagttccggcagggagggtgatgtgatggcagtcactgatgactccggtgggaggtcgcataggaggagggagaatggcgtgctcagttccggcagggatggtgatgtgatggcagtcacagggatatcttcgccgagcaagaagaggaaattctcaccgataatttgggacagggatagcccaaagccaccacattctgatgcagccagggacaagaaagctgtagaacctgtgccttctgagctccctccgcccccgccgttgcctccacaagaccacatcacactgaggttggctgtggagaagtcacttatggatatagaacctactgttggtacagagagtgctgtgcagttgctggaacatgaggtgaataaggtgacagagcaggaagaggagtatgcaacaatgaggaacatatcgacttcaagatgggctggtgctaatgatgatgatgatgatggggcagctccagtgaagaagaaaagtctgtctcctgcagactcctctgtggcagggcagtggaaaagagcaagtccagaacctggtgaagtatctggaggaaggacaatgtctaggtcatctgactctgggaaaatgagtaatgatgagaaagaagactttgaagcaaatgaagatgactatatggatgtcgacaagggacatgctagtgacagtgatacagaaaaccgtatgtcagatactgactcagacaatgaaatacacagacctgaaacccctgaaagagagaaggcaccacacaggtgtatcaatatgcttcaagattgcagaagtgttgatgagtttgagaggctcaacaaaattaacgagggcacatatggtgttgtatacagagcaagggataagaagacaagtgagattgttgcattgaagaaggtaaagatggagaaggagcgagaaggtttcccattaacctctcttagggaaataaatatcctcttgtctttccacaatccttcaattgtggatgttaaggaagtagtagttggaagtagtctagatagtatttttatggttatggagtacatggaacatgatcttaaaggtgtcatggagaccatgaaacaaccatatacccaaagcgaggtaaagtgtttgatgcttcagctgctagaaggtgtaaaatatctacatgacaattgggtgcttcatagggatctgaagacctcaaatcttttgttgaataaccgtggtgagttaaaaatatgtgattttggactgtctcgtcaatatggaagcccattaaaaccttatactcaactggttgtgactttgtggtacagggccccagaattgttgttaggaacaaaggagtattctactgctattgatatgtggtctgtgggctgtataatggctgagcttcttgccaaagaaccgttattcaatggaaaaacagagtttgaacagctagataagatttttagaacactcggcacacctaatgagaagatttggcctggctatgctaaattaccaggtgtgaaagtaaattttgttaaacaaccgtataatagactaagggataagttcccagccgcttctttttctgggcgaccaatcctgtctgaagctggttttgatctattgaacagactgctgacttatgaccctgataagcgcatatcagcagacgatgctcttaagcacaaatggttctctgaagttcctctgcctaaatcaaaggacttcatgccaacattccctgctcttaatgaacttgacaggcgttccagaaggtatctgaagagtcctgatcctctggaagagcaacgtttgaaagaactgcaagggaacataggcaaccatgggctttttgggtgaactagaagcacttgattgggtctgcaagggaacataggcaaccgtgggctttttggctgaactagaagcacttgattgggtcctgtccgtcctaactgttatgcttcacactgaaatcctgagttcatgaggttagatatcttctgaggattaacgcttcatccagatcgatcataaaagcaaatataatctacctgcatcataagacaaaagaagcgcaggggaaggatgccttttgctttcatcaggaaatcaatggcattaatacaacttagaagctaagctgtggctgcttcaagataggaagcttgatggctgtcagcttattgtacctaagtgactaaattttgtggagggccttcaaaagtgttcatctcttactagtgaaccatggtgggattgccgagccgttcggctaaccgggctagccgataattggtggtggtcggctccaccttatcactgttttggattttgaatttggtaaagtttgtaaattttgaaaacttttgatgacattttttgtataaatactatatattatttgaagattttctgctgaaaccaaatttcaaaatacacaacgaatttcaaac

SEQ ID NO: 17338 - DNA, 3137 bp, Zea Mays
cagaaaaggcctggaggcgacccgtaacaacgcggagcgtcagcctatagccgtcgctcccgtgtcccgtccgccgtcccccttcctctcgtattcgcttcgccgcccaacccactgtgcaccgctgccttcccgaccgttctcgccgccgccgtctccgcgcctgccaccccgcgcgctcggccaccggcgcccacggtgcggctcgatcaaggccagatcagaacccgccccggtccgcgtcacgccgatattttctgttttttggtacggatctagggttttcctgctgcggattcgttcgattcgctcatggccgctgggcgccatgggggttacagggactacgaggcgagggagcgggagctcgacgcggaggcctccaggaggagcaaggagcagcaccaccatctcggcggccgccaccgcgacgtggaccgccaccgcgatggcgggcgcagcaggggtggcagagactttgccaacggctacggtcgccgacgctcgccgccaccccggagccggctggcgggaaggcttggtgaccgtgagcctggcgaggtgctgagcggtagtgcatctgatgactccggtgggaggccgcatagagggagggagaatggcgtgctcagttccggcagggagggtgatgtgatggcagtcactgatgactccggtgggaggtcgcataggaggagggagaatggcgtgctcagttccggcagggatggtgatgtgatggcagtcacagggatatcttcgccgagcaagaagaggaaattctcaccgataatttgggacagggatagcccaaagccaccacattctgatgcagccagggacaagaaagctgtagaacctgtgccttctgagctccctccgcccccgccgttgcctccacaagaccacatcacactgaggttggctgtggagaagtcacttatggatatagaacctactgttggtacagagagtgctgtgcagttgctggaacatgaggtgaataaggtgacagagcaggaagaggagtatgcaacaatgaggaacatatcgacttcaagatgggctggtgctaatgatgatgatgatgatggggcagctccagtgaagaagaaaagtctgtctcctgcagactcctctgtggcagggcagtggaaaagagcaagtccagaacctggtgaagtatctggaggaaggacaatgtctaggtcatctgactctgggaaaatgagtaatgatgagaaagaagactttgaagcaaatgaagatgactatatggatgtcgacaagggacatgctagtgacagtgatacagaaaaccgtatgtcagatactgactcagacaatgaaatacacagacctgaaacccctgaaagagagaaggcaccacacaggtgtatcaatatgcttcaagattgcagaagtgttgatgagtttgagaggctcaacaaaattaacgagggcacatatggtgttgtatacagagcaagggataagaagacaagtgagattgttgcattgaagaaggtaaagatggagaaggagcgagaaggtttcccattaacctctcttagggaaataaatatcctcttgtctttccacaatccttcaattgtggatgttaaggaagtagtagttggaagtagtctagatagtatttttatggttatggagtacatggaacatgatcttaaaggtgtcatggagaccatgaaacaaccatatacccaaagcgaggtaaagtgtttgatgcttcagctgctagaaggtgtaaaatatctacatgacaattgggtgcttcatagggatctgaagacctcaaatcttttgttgaataaccgtggtgagttaaaaatatgtgattttggactgtctcgtcaatatggaagcccattaaaaccttatactcaactggttgtgactttgtggtacagggccccagaattgttgttaggaacaaaggagtattctactgctattgatatgtggtctgtgggctgtataatggctgagcttcttgccaaagaaccgttattcaatggaaaaacagagtttgaacagctagataagatttttagaacactcggcacacctaatgagaagatttggcctggctatgctaaattaccaggtgtgaaagtaaattttgttaaacaaccgtataatagactaagggataagttcccagccgcttctttttctgggcgaccaatcctgtctgaagctggttttgatctattgaacagactgctgacttatgaccctgataagcgcatatcagcagacgatgctcttaagcacaaatggttctctgaagttcctctgcctaaatcaaaggacttcatgccaacattccctgctcttaatgaacttgacaggcgttccagaaggtatctgaagagtcctgatcctctggaagagcaacgtttgaaagaactgcaagggaacataggcaaccatgggctttttgggtgaactagaagcacttgattgggtctgcaagggaacataggcaaccgtgggctttttggctgaactagaagcacttgattgggtcctgtccgtcctaactgttatgcttcacactgaaatcctgagttcatgaggttagatatcttctgaggcttggtaccggtttaaatggataaggtttctccttgtggcccatcatagaaattttgttgcaggattaacgcttcatccagatcgatcataaaagcaaatataatctacctgcatcataagagacaaaagaagcgcaggggaaggatgccttttgctttcatcaggaaatcaatggcattaatacaacttagaagctaagctgtggctgcttcaagataggaagcttgatggctgtcagcttattgtacctaagtgactaaattttgtggagggccttcaaaagtgttcatctcttactagtgaaccatggtgggattgccgagccgttcggctaaccgggctagccgataattggtggtggtcggctccaccttatcactgttttggattttgaatttggtaaagtttgtaaattttgaaaacttttgatgacattttttgtataaatactatatattatttgaagattttctgctgaaaccaaatttcaaaatacacaacgaatttcaaac

SEQ ID NO: 17339 - DNA, 3096 bp, Zea Mays
ccttaaataaatgaaccaaccgaaggtcaacagtccacacacaaggcccgaacagaaaaggcctggaggcgacccgtaacaacgcggagcgtcagcctatagccgtcgctcccgtgtcccgtccgccgtcccccttcctctcgtattcgcttcgccgcccaacccactgtgcaccgctgccttcccgaccgttctcgccgccgccgtctccgcgcctgccaccccgcgcgctcggccaccggcgcccacggtgcggctcgatcaaggccagatcagaacccgccccggtccgcgtcacgccgatattttctgttttttggtacggatctagggttttcctgctgcggattcgttcgattcgctcatggccgctgggcgccatgggggttacagggactacgaggcgagggagcgggagctcgacgcggaggcctccaggaggagcaaggagcagcaccaccatctcggcggccgccaccgcgacgtggaccgccaccgcgatggcgggcgcagcaggggtggcagagactttgccaacggctacggtcgccgacgctcgccgccaccccggagccggctggcgggaaggcttggtgaccgtgagcctggcgaggtgctgagcggtagtgcatctgatgactccggtgggaggccgcatagagggagggagaatggcgtgctcagttccggcagggagggtgatgtgatggcagtcactgatgactccggtgggaggtcgcataggaggagggagaatggcgtgctcagttccggcagggatggtgatgtgatggcagtcacagggatatcttcgccgagcaagaagaggaaattctcaccgataatttgggacagggatagcccaaagccaccacattctgatgcagccagggacaagaaagctgtagaacctgtgccttctgagctccctccgcccccgccgttgcctccacaagaccacatcacactgaggttggctgtggagaagtcacttatggatatagaacctactgttggtacagagagtgctgtgcagttgctggaacatgaggtgaataaggtgacagagcaggaagaggagtatgcaacaatgaggaacatatcgacttcaagatgggctggtgctaatgatgatgatgatgatggggcagctccagtgaagaagaaaagtctgtctcctgcagactcctctgtggcagggcagtggaaaagagcaagtccagaacctggtgaagtatctggaggaaggacaatgtctaggtcatctgactctgggaaaatgagtaatgatgagaaagaagactttgaagcaaatgaagatgactatatggatgtcgacaagggacatgctagtgacagtgatacagaaaaccgtatgtcagatactgactcagacaatgaaatacacagacctgaaacccctgaaagagagaaggcaccacacaggtgtatcaatatgcttcaagattgcagaagtgttgatgagtttgagaggctcaacaaaattaacgagggcacatatggtgttgtatacagagcaagggataagaagacaagtgagattgttgcattgaagaaggtaaagatggagaaggagcgagaaggtttcccattaacctctcttagggaaataaatatcctcttgtctttccacaatccttcaattgtggatgttaaggaagtagtagttggaagtagtctagatagtatttttatggttatggagtacatggaacatgatcttaaaggtgtcatggagaccatgaaacaaccatatacccaaagcgaggtaaagtgtttgatgcttcagctgctagaaggtgtaaaatatctacatgacaattgggtgcttcatagggatctgaagacctcaaatcttttgttgaataaccgtgggccccagaattgttgttaggaacaaaggagtattctactgctattgatatgtggtctgtgggctgtataatggctgagcttcttgccaaagaaccgttattcaatggaaaaacagagtttgaacagctagataagatttttagaacactcggcacacctaatgagaagatttggcctggctatgctaaattaccaggtgtgaaagtaaattttgttaaacaaccgtataatagactaagggataagttcccagccgcttctttttctgggcgaccaatcctgtctgaagctggttttgatctattgaacagactgctgacttatgaccctgataagcgcatatcagcagacgatgctcttaagcacaaatggttctctgaagttcctctgcctaaatcaaaggacttcatgccaacattccctgctcttaatgaacttgacaggcgttccagaaggtatctgaagagtcctgatcctctggaagagcaacgtttgaaagaactgcaagggaacataggcaaccatgggctttttgggtgaactagaagcacttgattgggtctgcaagggaacataggcaaccgtgggctttttggctgaactagaagcacttgattgggtcctgtccgtcctaactgttatgcttcacactgaaatcctgagttcatgaggttagatatcttctgaggcttggtaccggtttaaatggataaggtttctccttgtggcccatcatagaaattttgttgcaggattaacgcttcatccagatcgatcataaaagcaaatataatctacctgcatcataagacaaaagaagcgcaggggaaggatgccttttgctttcatcaggaaatcaatggcattaatacaacttagaagctaagctgtggctgcttcaagataggaagcttgatggctgtcagcttattgtacctaagtgactaaattttgtggagggccttcaaaagtgttcatctcttactagtgaaccatggtgggattgccgagccgttcggctaaccgggctagccgataattggtggtggtcggctccaccttatcactgttttggattttgaatttggtaaagtttgtaaattttgaaaacttttgatgacattttttgtataaatactatatattatttgaagattttctgctgaaaccaaatttcaaaatacacaacgaatttcaaac

SEQ ID NO: 17340 - DNA, 4130 bp, Zea Mays
gaggcgacccgtaacaacgcggagcgtcagcctatagccgtcgctcccgtgtcccgtccgccgtcccccttcctctcgtattcgcttcgccgcccaacccactgtgcaccgctgccttcccgaccgttctcgccgccgccgtctccgcgcctgccaccccgcgcgctcggccaccggcgcccacggtgcggctcgatcaaggccagatcagaacccgccccggtccgcgtcacgccgatattttctgttttttggtacggatctagggttttcctgctgcggattcgttcgattcgctcatggccgctgggcgccatgggggttacagggactacgaggcgagggagcgggagctcgacgcggaggcctccaggaggagcaaggagcagcaccaccatctcggcggccgccaccgcgacgtggaccgccaccgcgatggcgggcgcagcaggggtggcagagactttgccaacggctacggtcgccgacgctcgccgccaccccggagccggctggcgggaaggcttggtgaccgtgagcctggcgaggtgctgagcggtagtgcatctgatgactccggtgggaggccgcatagagggagggagaatggcgtgctcagttccggcagggagggtgatgtgatggcagtcactgatgactccggtgggaggtcgcataggaggagggagaatggcgtgctcagttccggcagggatggtgatgtgatggcagtcacagggatatcttcgccgagcaagaagaggaaattctcaccgataatttgggacagggatagcccaaagccaccacattctgatgcagccagggacaagaaagctgtagaacctgtgccttctgagctccctccgcccccgccgttgcctccacaagaccacatcacactgaggttggctgtggagaagtcacttatggatatagaacctactgttggtacagagagtgctgtgcagttgctggaacatgaggtgaataaggtgacagagcaggaagaggagtatgcaacaatgaggaacatatcgacttcaagatgggctggtgctaatgatgatgatgatgatggggcagctccagtgaagaagaaaagtctgtctcctgcagactcctctgtggcagggcagtggaaaagagcaagtccagaacctggtgaagtatctggaggaaggacaatgtctaggtcatctgactctgggaaaatgagtaatgatgagaaagaagactttgaagcaaatgaagatgactatatggatgtcgacaagggacatgctagtgacagtgatacagaaaaccgtatgtcagatactgactcagacaatgaaatacacagacctgaaacccctgaaagagagaaggcaccacacaggtgtatcaatatgcttcaagattgcagaagtgttgatgagtttgagaggctcaacaaaattaacgagggcacatatggtgttgtatacagagcaagggataagaagacaagtgagattgttgcattgaagaaggtaaagatggagaaggagcgagaaggtttcccattaacctctcttagggaaataaatatcctcttgtctttccacaatccttcaattgtggatgttaaggaagtagtagttggaagtagtctagatagtatttttatggttatggagtacatggaacatgatcttaaaggtgtcatggagaccatgaaacaaccatatacccaaagcgaggtaaagtgtttgatgcttcagctgctagaaggtgtaaaatatctacatgacaattgggtgcttcatagggatctgaagacctcaaatcttttgttgaataaccgtggtgagttaaaaatatgtgattttggactgtctcgtcaatatggaagcccattaaaaccttatactcaactggttgtgactttgtggtacagggccccagaattgttgttaggaacaaaggagtattctactgctattgatatgtggtctgtgggctgtataatggctgagcttcttgccaaagaaccgttattcaatggaaaaacagagtttgaacagctagataagatttttagaacactcggcacacctaatgagaagatttggcctggctatgctaaattaccaggtgtgaaagtaaattttgttaaacaaccgtataatagactaagggataagttcccagccgcttctttttctgggcgaccaatcctgtctgaagctggttttgatctattgaacagactgctgacttatgaccctgataagcgcatatcagcagacgatgctcttaagcacaaatggttctctgaagttcctctgcctaaatcaaaggacttcatgccaacattccctgctcttaatgaacttgacaggcgttccagaaggtatctgaagagtcctgatcctctggaagagcaacgtttgaaagaactgcaagggaacataggcaaccatgggctttttgggtgaactagaagcacttgattgggtctgcaagggaacataggcaaccgtgggctttttggctgaactagaagcacttgattgggtcctgtccgtcctaactgttatgcttcacactgaaatcctgagttcatgaggttagatatcttctgaggcttggtaccggtttaaatggataaggtttctccttgtggcccatcatagaaattttgttgcaggattaacgcttcatccagatcgatcataaaagcaaatataatctacctgcatcataaggtgtggcgtgttggcttttattggttacaccagtttcacctttggaacttctctatgtaaaatattccagattggtacgttgtaaacaatgtccagtgtgttggatttaaatttaaaacgaaacatcatcattattagttttctttatgctccttgtgccttttcttttgatctttgcgttttgtttgcaagagacaaaagaagcgcaggggaaggatgccttttgctttcatcaggaaatcaatggcattaatacaacttagaaggtaatctaagctgtggctgcttcaagataggaagcttgatggctgtcagcttattgtacctaagtgactaaattttgtggagggccttcaaaagtgttcatctcttactagtgaaccatggtggtcagtgtactatccttccttgtacattactataaccatccatctaagtgttttttggagactatttgcctgtatttttgttgtataggttgttctttctcttcagctgacagttatataacattgcttacagaaaaacacaaagcgatttggttctcggaataaataaagtgaaagttagcatgtagagtatcgcaagatgtgctgtgccattcttctatttcaaactcaacttttatgaacagtttagtttgcaatgcaaaaatattgtgttttagctaatctgctgagcacaaccttacacaaaagacctttcgtagtttgttgtccacgcgttagattaatgcacaatcaacattaacctttatgcttaggcaccgtttagtttggggtgactaaagtttagttacttttattccctcagtaagcaaacatagtgactaaagtgaggtgactaaactttagttctttagttatcaaggacatggctaaaagggaataaagtaggatttttaccttatttgtcctcttcattttcttctccactaattaatagagataatataatcattattcacagcatttatgctctttagtccggtttagtcacttgaaccaaatgagatactttagtggctaaactttagtaattaaactttagtctatttactaaaggaaccaaacatggcctgccttagtatgttgttcctgcattagattaattaattaatgcacaagcaacattaacataggcccatttttggtttgtttatgaccgacaccaatagtcatcgttatgaggtctacgacattatgaatgctgtatatatgctaattgaacggattatcatgtagttaatacaaaatattaacctcattcttataactatattatcatgcacaatcaaagcattagctatcttttagctatcttttcgtgaatggtgctcatggtaatctcattctacttatcaatagtgtcatcctcttgcaactgtgtcatttccag

SEQ ID NO: 17341 - DNA, 3992 bp, Zea Mays
gaggcgacccgtaacaacgcggagcgtcagcctatagccgtcgctcccgtgtcccgtccgccgtcccccttcctctcgtattcgcttcgccgcccaacccactgtgcaccgctgccttcccgaccgttctcgccgccgccgtctccgcgcctgccaccccgcgcgctcggccaccggcgcccacggtgcggctcgatcaaggccagatcagaacccgccccggtccgcgtcacgccgatattttctgttttttggtacggatctagggttttcctgctgcggattcgttcgattcgctcatggccgctgggcgccatgggggttacagggactacgaggcgagggagcgggagctcgacgcggaggcctccaggaggagcaaggagcagcaccaccatctcggcggccgccaccgcgacgtggaccgccaccgcgatggcgggcgcagcaggggtggcagagactttgccaacggctacggtcgccgacgctcgccgccaccccggagccggctggcgggaaggcttggtgaccgtgagcctggcgaggtgctgagcggtagtgcatctgatgactccggtgggaggccgcatagagggagggagaatggcgtgctcagttccggcagggagggtgatgtgatggcagtcactgatgactccggtgggaggtcgcataggaggagggagaatggcgtgctcagttccggcagggatggtgatgtgatggcagtcacagggatatcttcgccgagcaagaagaggaaattctcaccgataatttgggacagggatagcccaaagccaccacattctgatgcagccagggacaagaaagctgtagaacctgtgccttctgagctccctccgcccccgccgttgcctccacaagaccacatcacactgaggttggctgtggagaagtcacttatggatatagaacctactgttggtacagagagtgctgtgcagttgctggaacatgaggtgaataaggtgacagagcaggaagaggagtatgcaacaatgaggaacatatcgacttcaagatgggctggtgctaatgatgatgatgatgatggggcagctccagtgaagaagaaaagtctgtctcctgcagactcctctgtggcagggcagtggaaaagagcaagtccagaacctggtgaagtatctggaggaaggacaatgtctaggtcatctgactctgggaaaatgagtaatgatgagaaagaagactttgaagcaaatgaagatgactatatggatgtcgacaagggacatgctagtgacagtgatacagaaaaccgtatgtcagatactgactcagacaatgaaatacacagacctgaaacccctgaaagagagaaggcaccacacaggtgtatcaatatgcttcaagattgcagaagtgttgatgagtttgagaggctcaacaaaattaacgagggcacatatggtgttgtatacagagcaagggataagaagacaagtgagattgttgcattgaagaaggtaaagatggagaaggagcgagaaggtttcccattaacctctcttagggaaataaatatcctcttgtctttccacaatccttcaattgtggatgttaaggaagtagtagttggaagtagtctagatagtatttttatggttatggagtacatggaacatgatcttaaaggtgtcatggagaccatgaaacaaccatatacccaaagcgaggtaaagtgtttgatgcttcagctgctagaaggtgtaaaatatctacatgacaattgggtgcttcatagggatctgaagacctcaaatcttttgttgaataaccgtggtgagttaaaaatatgtgattttggactgtctcgtcaatatggaagcccattaaaaccttatactcaactggttgtgactttgtggtacagggccccagaattgttgttaggaacaaaggagtattctactgctattgatatgtggtctgtgggctgtataatggctgagcttcttgccaaagaaccgttattcaatggaaaaacagagtttgaacagctagataagatttttagaacactcggcacacctaatgagaagatttggcctggctatgctaaattaccaggtgtgaaagtaaattttgttaaacaaccgtataatagactaagggataagttcccagccgcttctttttctgggcgaccaatcctgtctgaagctggttttgatctattgaacagactgctgacttatgaccctgataagcgcatatcagcagacgatgctcttaagcacaaatggttctctgaagttcctctgcctaaatcaaaggacttcatgccaacattccctgctcttaatgaacttgacaggcgttccagaaggtatctgaagagtcctgatcctctggaagagcaacgtttgaaagaactgcaagggaacataggcaaccatgggctttttgggtgaactagaagcacttgattgggtctgcaagggaacataggcaaccgtgggctttttggctgaactagaagcacttgattgggtcctgtccgtcctaactgttatgcttcacactgaaatcctgagttcatgaggttagatatcttctgaggcttggtaccggtttaaatggataaggtttctccttgtggcccatcatagaaattttgttgcaggattaacgcttcatccagatcgatcataaaagcaaatataatctacctgcatcataaggtgtggcgtgttggcttttattggttacaccagtttcacctttggaacttctctatgtaaaatattccagattggtacgttgtaaacaatgtccagtgtgttggatttaaatttaaaacgaaacatcatcattattagttttctttatgctccttgtgccttttcttttgatctttgcgttttgtttgcaagagacaaaagaagcgcaggggaaggatgccttttgctttcatcaggaaatcaatggcattaatacaacttagaagctaagctgtggctgcttcaagataggaagcttgatggctgtcagcttattgtacctaagtgactaaattttgtggagggccttcaaaagtgttcatctcttactagtgaaccatggtgaaaaacacaaagcgatttggttctcggaataaataaagtgaaagttagcatgtagagtatcgcaagatgtgctgtgccattcttctatttcaaactcaacttttatgaacagtttagtttgcaatgcaaaaatattgtgttttagctaatctgctgagcacaaccttacacaaaagacctttcgtagtttgttgtccacgcgttagattaatgcacaatcaacattaacctttatgcttaggcaccgtttagtttggggtgactaaagtttagttacttttattccctcagtaagcaaacatagtgactaaagtgaggtgactaaactttagttctttagttatcaaggacatggctaaaagggaataaagtaggatttttaccttatttgtcctcttcattttcttctccactaattaatagagataatataatcattattcacagcatttatgctctttagtccggtttagtcacttgaaccaaatgagatactttagtggctaaactttagtaattaaactttagtctatttactaaaggaaccaaacatggcctgccttagtatgttgttcctgcattagattaattaattaatgcacaagcaacattaacataggcccatttttggtttgtttatgaccgacaccaatagtcatcgttatgaggtctacgacattatgaatgctgtatatatgctaattgaacggattatcatgtagttaatacaaaatattaacctcattcttataactatattatcatgcacaatcaaagcattagctatcttttagctatcttttcgtgaatggtgctcatggtaatctcattctacttatcaatagtgtcatcctcttgcaactgtgtcatttccag

SEQ ID NO: 17342 - DNA, 3972 bp, Zea Mays
gaggcgacccgtaacaacgcggagcgtcagcctatagccgtcgctcccgtgtcccgtccgccgtcccccttcctctcgtattcgcttcgccgcccaacccactgtgcaccgctgccttcccgaccgttctcgccgccgccgtctccgcgcctgccaccccgcgcgctcggccaccggcgcccacggtgcggctcgatcaaggccagatcagaacccgccccggtccgcgtcacgccgatattttctgttttttggtacggatctagggttttcctgctgcggattcgttcgattcgctcatggccgctgggcgccatgggggttacagggactacgaggcgagggagcgggagctcgacgcggaggcctccaggaggagcaaggagcagcaccaccatctcggcggccgccaccgcgacgtggaccgccaccgcgatggcgggcgcagcaggggtggcagagactttgccaacggctacggtcgccgacgctcgccgccaccccggagccggctggcgggaaggcttggtgaccgtgagcctggcgaggtgctgagcggtagtgcatctgatgactccggtgggaggccgcatagagggagggagaatggcgtgctcagttccggcagggagggtgatgtgatggcagtcactgatgactccggtgggaggtcgcataggaggagggagaatggcgtgctcagttccggcagggatggtgatgtgatggcagtcacagggatatcttcgccgagcaagaagaggaaattctcaccgataatttgggacagggatagcccaaagccaccacattctgatgcagccagggacaagaaagctgtagaacctgtgccttctgagctccctccgcccccgccgttgcctccacaagaccacatcacactgaggttggctgtggagaagtcacttatggatatagaacctactgttggtacagagagtgctgtgcagttgctggaacatgaggtgaataaggtgacagagcaggaagaggagtatgcaacaatgaggaacatatcgacttcaagatgggctggtgctaatgatgatgatgatgatggggcagctccagtgaagaagaaaagtctgtctcctgcagactcctctgtggcagggcagtggaaaagagcaagtccagaacctggtgaagtatctggaggaaggacaatgtctaggtcatctgactctgggaaaatgagtaatgatgagaaagaagactttgaagcaaatgaagatgactatatggatgtcgacaagggacatgctagtgacagtgatacagaaaaccgtatgtcagatactgactcagacaatgaaatacacagacctgaaacccctgaaagagagaaggcaccacacaggtgtatcaatatgcttcaagattgcagaagtgttgatgagtttgagaggctcaacaaaattaacgagggcacatatggtgttgtatacagagcaagggataagaagacaagtgagattgttgcattgaagaaggtaaagatggagaaggagcgagaaggtttcccattaacctctcttagggaaataaatatcctcttgtctttccacaatccttcaattgtggatgttaaggaagtagtagttggaagtagtctagatagtatttttatggttatggagtacatggaacatgatcttaaaggtgtcatggagaccatgaaacaaccatatacccaaagcgaggtaaagtgtttgatgcttcagctgctagaaggtgtaaaatatctacatgacaattgggtgcttcatagggatctgaagacctcaaatcttttgttgaataaccgtgggccccagaattgttgttaggaacaaaggagtattctactgctattgatatgtggtctgtgggctgtataatggctgagcttcttgccaaagaaccgttattcaatggaaaaacagagtttgaacagctagataagatttttagaacactcggcacacctaatgagaagatttggcctggctatgctaaattaccaggtgtgaaagtaaattttgttaaacaaccgtataatagactaagggataagttcccagccgcttctttttctgggcgaccaatcctgtctgaagctggttttgatctattgaacagactgctgacttatgaccctgataagcgcatatcagcagacgatgctcttaagcacaaatggttctctgaagttcctctgcctaaatcaaaggacttcatgccaacattccctgctcttaatgaacttgacaggcgttccagaaggtatctgaagagtcctgatcctctggaagagcaacgtttgaaagaactgcaagggaacataggcaaccatgggctttttgggtgaactagaagcacttgattgggtctgcaagggaacataggcaaccgtgggctttttggctgaactagaagcacttgattgggtcctgtccgtcctaactgttatgcttcacactgaaatcctgagttcatgaggttagatatcttctgaggtgaggtgccatggacatgaagtatcacatcttctcggtgtctagcagcaactgatagtgttctttagcaggcttggtaccggtttaaatggataaggtttctccttgtggcccatcatagaaattttgttgcaggattaacgcttcatccagatcgatcataaaagcaaatataatctacctgcatcataaggtgtggcgtgttggcttttattggttacaccagtttcacctttggaacttctctatgtaaaatattccagattggtacgttgtaaacaatgtccagtgtgttggatttaaatttaaaacgaaacatcatcattattagttttctttatgctccttgtgccttttcttttgatctttgcgttttgtttgcaagagacaaaagaagcgcaggggaaggatgccttttgctttcatcaggaaatcaatggcattaatacaacttagaagctaagctgtggctgcttcaagataggaagcttgatggctgtcagcttattgtacctaagtgactaaattttgtggagggccttcaaaagtgttcatctcttactagtgaaccatggtgaaaaacacaaagcgatttggttctcggaataaataaagtgaaagttagcatgtagagtatcgcaagatgtgctgtgccattcttctatttcaaactcaacttttatgaacagtttagtttgcaatgcaaaaatattgtgttttagctaatctgctgagcacaaccttacacaaaagacctttcgtagtttgttgtccacgcgttagattaatgcacaatcaacattaacctttatgcttaggcaccgtttagtttggggtgactaaagtttagttacttttattccctcagtaagcaaacatagtgactaaagtgaggtgactaaactttagttctttagttatcaaggacatggctaaaagggaataaagtaggatttttaccttatttgtcctcttcattttcttctccactaattaatagagataatataatcattattcacagcatttatgctctttagtccggtttagtcacttgaaccaaatgagatactttagtggctaaactttagtaattaaactttagtctatttactaaaggaaccaaacatggcctgccttagtatgttgttcctgcattagattaattaattaatgcacaagcaacattaacataggcccatttttggtttgtttatgaccgacaccaatagtcatcgttatgaggtctacgacattatgaatgctgtatatatgctaattgaacggattatcatgtagttaatacaaaatattaacctcattcttataactatattatcatgcacaatcaaagcattagctatcttttagctatcttttcgtgaatggtgctcatggtaatctcattctacttatcaatagtgtcatcctcttgcaactgtgtcatttccag

SEQ ID NO: 17343 - DNA, 3919 bp, Zea Mays
gaggcgacccgtaacaacgcggagcgtcagcctatagccgtcgctcccgtgtcccgtccgccgtcccccttcctctcgtattcgcttcgccgcccaacccactgtgcaccgctgccttcccgaccgttctcgccgccgccgtctccgcgcctgccaccccgcgcgctcggccaccggcgcccacggtgcggctcgatcaaggccagatcagaacccgccccggtccgcgtcacgccgatattttctgttttttggtacggatctagggttttcctgctgcggattcgttcgattcgctcatggccgctgggcgccatgggggttacagggactacgaggcgagggagcgggagctcgacgcggaggcctccaggaggagcaaggagcagcaccaccatctcggcggccgccaccgcgacgtggaccgccaccgcgatggcgggcgcagcaggggtggcagagactttgccaacggctacggtcgccgacgctcgccgccaccccggagccggctggcgggaaggcttggtgaccgtgagcctggcgaggtgctgagcggtagtgcatctgatgactccggtgggaggccgcatagagggagggagaatggcgtgctcagttccggcagggagggtgatgtgatggcagtcactgatgactccggtgggaggtcgcataggaggagggagaatggcgtgctcagttccggcagggatggtgatgtgatggcagtcacagggatatcttcgccgagcaagaagaggaaattctcaccgataatttgggacagggatagcccaaagccaccacattctgatgcagccagggacaagaaagctgtagaacctgtgccttctgagctccctccgcccccgccgttgcctccacaagaccacatcacactgaggttggctgtggagaagtcacttatggatatagaacctactgttggtacagagagtgctgtgcagttgctggaacatgaggtgaataaggtgacagagcaggaagaggagtatgcaacaatgaggaacatatcgacttcaagatgggctggtgctaatgatgatgatgatgatggggcagctccagtgaagaagaaaagtctgtctcctgcagactcctctgtggcagggcagtggaaaagagcaagtccagaacctggtgaagtatctggaggaaggacaatgtctaggtcatctgactctgggaaaatgagtaatgatgagaaagaagactttgaagcaaatgaagatgactatatggatgtcgacaagggacatgctagtgacagtgatacagaaaaccgtatgtcagatactgactcagacaatgaaatacacagacctgaaacccctgaaagagagaaggcaccacacaggtgtatcaatatgcttcaagattgcagaagtgttgatgagtttgagaggctcaacaaaattaacgagggcacatatggtgttgtatacagagcaagggataagaagacaagtgagattgttgcattgaagaaggtaaagatggagaaggagcgagaaggtttcccattaacctctcttagggaaataaatatcctcttgtctttccacaatccttcaattgtggatgttaaggaagtagtagttggaagtagtctagatagtatttttatggttatggagtacatggaacatgatcttaaaggtgtcatggagaccatgaaacaaccatatacccaaagcgaggtaaagtgtttgatgcttcagctgctagaaggtgtaaaatatctacatgacaattgggtgcttcatagggatctgaagacctcaaatcttttgttgaataaccgtggtgagttaaaaatatgtgattttggactgtctcgtcaatatggaagcccattaaaaccttatactcaactggttgtgactttgtggtacagggccccagaattgttgttaggaacaaaggagtattctactgctattgatatgtggtctgtgggctgtataatggctgagcttcttgccaaagaaccgttattcaatggaaaaacagagtttgaacagctagataagatttttagaacactcggcacacctaatgagaagatttggcctggctatgctaaattaccaggtgtgaaagtaaattttgttaaacaaccactaagggataagttcccagccgcttctttttctgggcgaccaatcctgtctgaagctggttttgatctattgaacagactgctgacttatgaccctgataagcgcatatcagcagacgatgctcttaagcacaaatggttctctgaagttcctctgcctaaatcaaaggacttcatgccaacattccctgctcttaatgaacttgacaggcgttccagaaggtatctgaagagtcctgatcctctggaagagcaacgtttgaaagaactgcaagggaacataggcaaccatgggctttttgggtgaactagaagcacttgattgggtctgcaagggaacataggcaaccgtgggctttttggctgaactagaagcacttgattgggtcctgtccgtcctaactgttatgcttcacactgaaatcctgagttcatgaggttagatatcttctgaggattaacgcttcatccagatcgatcataaaagcaaatataatctacctgcatcataaggtgtggcgtgttggcttttattggttacaccagtttcacctttggaacttctctatgtaaaatattccagattggtacgttgtaaacaatgtccagtgtgttggatttaaatttaaaacgaaacatcatcattattagttttctttatgctccttgtgccttttcttttgatctttgcgttttgtttgcaagagacaaaagaagcgcaggggaaggatgccttttgctttcatcaggaaatcaatggcattaatacaacttagaagctaagctgtggctgcttcaagataggaagcttgatggctgtcagcttattgtacctaagtgactaaattttgtggagggccttcaaaagtgttcatctcttactagtgaaccatggtgaaaaacacaaagcgatttggttctcggaataaataaagtgaaagttagcatgtagagtatcgcaagatgtgctgtgccattcttctatttcaaactcaacttttatgaacagtttagtttgcaatgcaaaaatattgtgttttagctaatctgctgagcacaaccttacacaaaagacctttcgtagtttgttgtccacgcgttagattaatgcacaatcaacattaacctttatgcttaggcaccgtttagtttggggtgactaaagtttagttacttttattccctcagtaagcaaacatagtgactaaagtgaggtgactaaactttagttctttagttatcaaggacatggctaaaagggaataaagtaggatttttaccttatttgtcctcttcattttcttctccactaattaatagagataatataatcattattcacagcatttatgctctttagtccggtttagtcacttgaaccaaatgagatactttagtggctaaactttagtaattaaactttagtctatttactaaaggaaccaaacatggcctgccttagtatgttgttcctgcattagattaattaattaatgcacaagcaacattaacataggcccatttttggtttgtttatgaccgacaccaatagtcatcgttatgaggtctacgacattatgaatgctgtatatatgctaattgaacggattatcatgtagttaatacaaaatattaacctcattcttataactatattatcatgcacaatcaaagcattagctatcttttagctatcttttcgtgaatggtgctcatggtaatctcattctacttatcaatagtgtcatcctcttgcaactgtgtcatttccag

SEQ ID NO: 17344 - DNA, 204 bp, Zea Mays
atgtccctcttccccgcagcgttcagcagcccggagctcccgggaatggacatgtcgatcgtcattcctgctccggccaagccgaatctcaaaccaccaaaacttccccgaaatccaatcccccggcagtacctcgcagggggagatcaggcaagcacccccaaatcgcttaaaatccaatctttattatccagcaagatgtaa

SEQ ID NO: 17345 - DNA, 1429 bp, Zea Mays
gtacgtggccacgaagacgaaggccagcaccgcgatcccggcgacgatcaggaacgtcgggccggtcccgaccagccccacgatcgacaggaacgtctgtgccacgacgaggttagagacccagttcacggtggccgacatgccgccgcacgtcccacggtacgcctcggggtagatctccgagttcacggcccacggcacgggccccatgcccggggagaagaaggcgatgtacagagcgaggccggccaccgcgaaccagcctagcgcgccctggcacgtgccgctggcggcgctcatgcagaggccggatgatgactgcagtatgaaggccgtggcgaggatggccagggagaccacgaccccggccaagcttgtgagggccagacggcggcggccgcaacggtcgattaggtagatcccgacgatggttccggcggcgttcatggccgcgacgatcagggagaggagcaaggccagcctgttggaggagaaaccagccatctggactatcgtggggctgtaatacatcacggtgttgatcccggtaaattgctggaaggcctgcatggttttgataagcctagatgagaaaaaaggtaccgcccagttgcctgcttgatgcgtcaactgaatctagacaacagaacatgtagccaagtggaatatctgcttcactggcaactgaaagaaaatagagcacgaacgaaccaacgaacgagtaagcaggctgaagaacatacctgaaggccagccccagcaaagaaagctagcctcaattctttcgacttgaagacatccagatagcttccggtattgttggactggaattcatgcatggaggatgtagcaagcagctctacctcttcctccaagcggtcggattcatagatcctctcaaggacggcaatagcttttgccttctcatcctggaaggaaaaaaaagtaaagataagaacaggataccataccgaaggagacagcgcagaactggaccaagaggcaataattaaccttccagtaaagccaacgcggagattctggcaggaatagcatcagcacaaactgtataatggcaggaacagcagcaacaccaagcatccagcgccatgttccaggcacctgttccatgtagcgtgcatattagtaattaccacaatggcaacaactaatatgcaatattcctattggccatcgttataaatgtttcacatcaacttgccattacaaataaaaaccatgaaaatcaaacgagtcgtcagttttaatcatctgggcatgtaaacatgtagcaattcatgaacagagattggaacagaacatcactatcgtgccaggtttttgctattgcgcaagaacagtagaggatgagagtcaagcagggctgaaagagaaaattccttatttagcattggatgatgaggtggtt

SEQ ID NO: 17346 - DNA, 1980 bp, Zea Mays
ctcctttcccccttgcttgtccctacgcaccccagtagctagctagctagcccgtccgggaggtgcacctaacgatttcgtgatgaggaacgggaaccccatcggtctgctttgcgtcgtttaagcgcatatagagatagagtgcagatagtttacttgcctttgaaaaactcgagtaaatctatccatccatccatctatctatctatctgcgggttgcagcacacacacacccagacccaggttgggaacgcagactcgcaatagctagcaactattctcctcttcttctgtatataaacggcgagcgagggccctccgtcttccctgatcccaaatgtgcccggcccggtccctctccactgcactgcgctgcgcccatccatccttaaaccctcctgcgcgcgtaggcctcgtcttgtccttccccagcacaacctctcctcctccttcgccaggtgcctcttcgttctcctctccgggctatcaggacgaaataactggccgcgctgcacgccggccgcctcgagaagaagcgctcgccccgcgcgcgcggctccgggctaccaggacgaaataactggccgcgctgcacgccggccgccgcgagaagaagcgctcgccccgcgcgctctgccgctggttcggccgtgccatcccgacgaggttcccccagctgtgcccgctcgatctccttccgcgcgcacgcgcacgcagtggtccgtcgccgctgattgatcctgcaggaaaaacagggcaaggagctactttgagcccgagactgaactgaagaagatgatgatggccgaggtggccaaccacagcaagaggaaccacacggacagctacttcagtggcaaggccgtcgccgtccccgccgccgcggccaccagctcggaggagttcggcagcatgtcgtcgaagaagccgaggaatgccagccccagactcgcgcccgtatcaccaaaggagaagaaggacaagatcggcgagagggtcgcagcgctccagcagctcgtgtcaccgttcggaaagaccgacacggcttctgtcctgcaggaggcgtcggggtacatcaagttcctgcaccagcagctggaggtcctgagctccccttacatgcgcgctcctccggccgctggcgctgcgcctgaggtgagcttccgccgtccctcgtcttcgtctccactgatgagttcttgacgcaagcctgacccccagcgctacagcctccggagccgcgggctgtgcctggtgccggtggacctgacgctgcagctgacccagagcaacggggccgacctgtgggcgccggcgcacacggccaggcgaaggtgaggactgaggaggagccggtctgtctgtccggagggaaccgcgcaagtgctgccgcgtctgcgtgcgcgccgtggagttgagtttccaggcgcctgactgacccgattcgacctcctagcaagaaactaaagcaagcgtgcgtgtccgtatcagccgccttgtattatactcctagtagtactctcgtgacctgcctggtcaggtctctctctcctagcttgttgtccgccgtttatgtgttgagcggcatgtggattagaagcctgtgtggctggctgtcagcaagcagagcggcagtttgatgcctgttccttgagatggatagtgttatcgagttcagaagaataccatgcgcgtgtgcctgatgtatgctctctctctctcgctcactgtctctctcagctgtgatggaactgaaaccgcacgttcaggcaaggcaaaacctaagtgttacaggctcgttcgccctcacatccgcaggacgaagcaacgcaggcccacactttttgaccggcagcggcaggcccctcgggccaacagagactgttccggggtccaaagaatctaactcatcatgattcatgaaccaaaatgaacaggaagcgaaagcctaggaaaaattcaacaaaaggctggtttccc

SEQ ID NO: 17347 - DNA, 1923 bp, Zea Mays
ctcctttcccccttgcttgtccctacgcaccccagtagctagctagctagcccgtccgggaggtgcacctaacgatttcgtgatgaggaacgggaaccccatcggtctgctttgcgtcgtttaagcgcatatagagatagagtgcagatagtttacttgcctttgaaaaactcgagtaaatctatccatccatccatctatctatctatctgcgggttgcagcacacacacacccagacccaggttgggaacgcagactcgcaatagctagcaactattctcctcttcttctgtatataaacggcgagcgagggccctccgtcttccctgatcccaaatgtgcccggcccggtccctctccactgcactgcgctgcgcccatccatccttaaaccctcctgcgcgcgtaggcctcgtcttgtccttccccagcacaacctctcctcctccttcgccaggtgcctcttcgttctcctctccgggctatcaggacgaaataactggccgcgctgcacgccggccgcctcgagaagaagcgctcgccccgcgcgcgcggctccgggctaccaggacgaaataactggccgcgctgcacgccggccgccgcgagaagaagcgctcgccccgcgcgctctgccgctggttcggccgtgccatcccgacgaggttcccccagctgtgcccgctcgatctccttccgcgcgcacgcgcacgcagtggtccgtcgccgctgattgatcctgcaggaaaaacagggcaaggagctactttgagcccgagactgaactgaagaagatgatgatggccgaggtggccaaccacagcaagaggaaccacacggacagctacttcagtggcaaggccgtcgccgtccccgccgccgcggccaccagctcggaggagttcggcagcatgtcgtcgaagaagccgaggaatgccagccccagactcgcgcccgtatcaccaaaggagaagaaggacaagatcggcgagagggtcgcagcgctccagcagctcgtgtcaccgttcggaaagaccgacacggcttctgtcctgcaggaggcgtcggggtacatcaagttcctgcaccagcagctggaggtcctgagctccccttacatgcgcgctcctccggccgctggcgctgcgcctgaggacccccagcgctacagcctccggagccgcgggctgtgcctggtgccggtggacctgacgctgcagctgacccagagcaacggggccgacctgtgggcgccggcgcacacggccaggcgaaggtgaggactgaggaggagccggtctgtctgtccggagggaaccgcgcaagtgctgccgcgtctgcgtgcgcgccgtggagttgagtttccaggcgcctgactgacccgattcgacctcctagcaagaaactaaagcaagcgtgcgtgtccgtatcagccgccttgtattatactcctagtagtactctcgtgacctgcctggtcaggtctctctctcctagcttgttgtccgccgtttatgtgttgagcggcatgtggattagaagcctgtgtggctggctgtcagcaagcagagcggcagtttgatgcctgttccttgagatggatagtgttatcgagttcagaagaataccatgcgcgtgtgcctgatgtatgctctctctctctcgctcactgtctctctcagctgtgatggaactgaaaccgcacgttcaggcaaggcaaaacctaagtgttacaggctcgttcgccctcacatccgcaggacgaagcaacgcaggcccacactttttgaccggcagcggcaggcccctcgggccaacagagactgttccggggtccaaagaatctaactcatcatgattcatgaaccaaaatgaacaggaagcgaaagcctaggaaaaattcaacaaaaggctggtttccc

SEQ ID NO: 17348 - DNA, 1422 bp, Zea Mays
cattaacaagcttcccagtgaactgaaaaaaaagaagaccaaatcctttttcatttcgactggttttgcagaagggatgttcctgtacagaaaaaaatggttctgaaatcgtctgaaccaacggctacggctacagctcaggaaaaacagggcaaggagctactttgagcccgagactgaactgaagaagatgatgatggccgaggtggccaaccacagcaagaggaaccacacggacagctacttcagtggcaaggccgtcgccgtccccgccgccgcggccaccagctcggaggagttcggcagcatgtcgtcgaagaagccgaggaatgccagccccagactcgcgcccgtatcaccaaaggagaagaaggacaagatcggcgagagggtcgcagcgctccagcagctcgtgtcaccgttcggaaagaccgacacggcttctgtcctgcaggaggcgtcggggtacatcaagttcctgcaccagcagctggaggtcctgagctccccttacatgcgcgctcctccggccgctggcgctgcgcctgaggacccccagcgctacagcctccggagccgcgggctgtgcctggtgccggtggacctgacgctgcagctgacccagagcaacggggccgacctgtgggcgccggcgcacacggccaggcgaaggtgaggactgaggaggagccggtctgtctgtccggagggaaccgcgcaagtgctgccgcgtctgcgtgcgcgccgtggagttgagtttccaggcgcctgactgacccgattcgacctcctagcaagaaactaaagcaagcgtgcgtgtccgtatcagccgccttgtattatactcctagtagtactctcgtgacctgcctggtcaggtctctctctcctagcttgttgtccgccgtttatgtgttgagcggcatgtggattagaagcctgtgtggctggctgtcagcaagcagagcggcagtttgatgcctgttccttgagatggatagtgttatcgagttcagaagaataccatgcgcgtgtgcctgatgtatgctctctctctctcgctcactgtctctctcagctgtgatggaactgaaaccgcacgttcaggcaaggcaaaacctaagtgttacaggctcgttcgccctcacatccgcaggacgaagcaacgcaggcccacactttttgaccggcagcggcaggcccctcgggccaacagagactgttccggggtccaaagaatctaactcatcatgattcatgaaccaaaatgaacaggtacaccggacgaaccttgcggatggaaaaaaacaactcccacgcgtctctctctctctctagtacagtagtaccttcttctcttctgtttcttcgatgaacttcgcacgttctcgaatgaataatagaggagcagggtgaagcaaa

SEQ ID NO: 17349 - DNA, 1819 bp, Zea Mays
gactcgcaatagctagcaactattctcctcttcttctgtatataaacggcgagcgagggccctccgtcttccctgatcccaaatgtgcccggcccggtccctctccactgcactgcgctgcgcccatccatccttaaaccctcctgcgcgcgtaggcctcgtcttgtccttccccagcacaacctctcctcctccttcgccaggtgcctcttcgttctcctctccgggctatcaggacgaaataactggccgcgctgcacgccggccgcctcgagaagaagcgctcgccccgcgcgcgcggctccgggctaccaggacgaaataactggccgcgctgcacgccggccgccgcgagaagaagcgctcgccccgcgcgctctgccgctggttcggccgtgccatcccgacgaggttcccccagctgtgcccgctcgatctccttccgcgcgcacgcgcacgcagtggtccgtcgccgctgattgatcctggaaaaacagggcaaggagctactttgagcccgagactgaactgaagaagatgatgatggccgaggtggccaaccacagcaagaggaaccacacggacagctacttcagtggcaaggccgtcgccgtccccgccgccgcggccaccagctcggaggagttcggcagcatgtcgtcgaagaagccgaggaatgccagccccagactcgcgcccgtatcaccaaaggagaagaaggacaagatcggcgagagggtcgcagcgctccagcagctcgtgtcaccgttcggaaagaccgacacggcttctgtcctgcaggaggcgtcggggtacatcaagttcctgcaccagcagctggaggtcctgagctccccttacatgcgcgctcctccggccgctggcgctgcgcctgagaaacctagtagcagcacgagatcgttgtgtaacacatgcatgtgatccaggacccccagcgctacagcctccggagccgcgggctgtgcctggtgccggtggacctgacgctgcagctgacccagagcaacggggccgacctgtgggcgccggcgcacacggccaggcgaaggtgaggactgaggaggagccggtctgtctgtccggagggaaccgcgcaagtgctgccgcgtctgcgtgcgcgccgtggagttgagtttccaggcgcctgactgacccgattcgacctcctagcaagaaactaaagcaagcgtgcgtgtccgtatcagccgccttgtattatactcctagtagtactctcgtgacctgcctggtcaggtctctctctcctagcttgttgtccgccgtttatgtgttgagcggcatgtggattagaagcctgtgtggctggctgtcagcaagcagagcggcagtttgatgcctgttccttgagatggatagtgttatcgagttcagaagaataccatgcgcgtgtgcctgatgtatgctctctctctctcgctcactgtctctctcagctgtgatggaactgaaaccgcacgttcaggcaaggcaaaacctaagtgttacaggctcgttcgccctcacatccgcaggacgaagcaacgcaggcccacactttttgaccggcagcggcaggcccctcgggccaacagagactgttccggggtccaaagaatctaactcatcatgattcatgaaccaaaatgaacaggtacaccggacgaaccttgcggatggaaaaaaacaactcccacgcgtctctctctctctctagtacagtagtaccttcttctcttctgtttcttcgatgaacttcgcacgttctcgaatgaataatagaggagcagggtgaagcaaa

SEQ ID NO: 17350 - DNA, 2077 bp, Zea Mays
ctcctttcccccttgcttgtccctacgcaccccagtagctagctagctagcccgtccgggaggtgcacctaacgatttcgtgatgaggaacgggaaccccatcggtctgctttgcgtcgtttaagcgcatatagagatagagtgcagatagtttacttgcctttgaaaaactcgagtaaatctatccatccatccatctatctatctatctgcgggttgcagcacacacacacccagacccaggttgggaacgcagactcgcaatagctagcaactattctcctcttcttctgtatataaacggcgagcgagggccctccgtcttccctgatcccaaatgtgcccggcccggtccctctccactgcactgcgctgcgcccatccatccttaaaccctcctgcgcgcgtaggcctcgtcttgtccttccccagcacaacctctcctcctccttcgccaggtgcctcttcgttctcctctccgggctatcaggacgaaataactggccgcgctgcacgccggccgcctcgagaagaagcgctcgccccgcgcgcgcggctccgggctaccaggacgaaataactggccgcgctgcacgccggccgccgcgagaagaagcgctcgccccgcgcgctctgccgctggttcggccgtgccatcccgacgaggttcccccagctgtgcccgctcgatctccttccgcgcgcacgcgcacgcagtggtccgtcgccgctgattgatcctgcaggaaaaacagggcaaggagctactttgagcccgagactgaactgaagaagatgatgatggccgaggtggccaaccacagcaagaggaaccacacggacagctacttcagtggcaaggccgtcgccgtccccgccgccgcggccaccagctcggaggagttcggcagcatgtcgtcgaagaagccgaggaatgccagccccagactcgcgcccgtatcaccaaaggagaagaaggacaagatcggcgagagggtcgcagcgctccagcagctcgtgtcaccgttcggaaagaccgacacggcttctgtcctgcaggaggcgtcggggtacatcaagttcctgcaccagcagctggaggtcctgagctccccttacatgcgcgctcctccggccgctggcgctgcgcctgagaaacctagtagcagcacgagatcgttgtgtaacacatgcatgtgatccaggacccccagcgctacagcctccggagccgcgggctgtgcctggtgccggtggacctgacgctgcagctgacccagagcaacggggccgacctgtgggcgccggcgcacacggccaggcgaaggtgaggactgaggaggagccggtctgtctgtccggagggaaccgcgcaagtgctgccgcgtctgcgtgcgcgccgtggagttgagtttccaggcgcctgactgacccgattcgacctcctagcaagaaactaaagcaagcgtgcgtgtccgtatcagccgccttgtattatactcctagtagtactctcgtgacctgcctggtcaggtctctctctcctagcttgttgtccgccgtttatgtgttgagcggcatgtggattagaagcctgtgtggctggctgtcagcaagcagagcggcagtttgatgcctgttccttgagatggatagtgttatcgagttcagaagaataccatgcgcgtgtgcctgatgtatgctctctctctctcgctcactgtctctctcagctgtgatggaactgaaaccgcacgttcaggcaaggcaaaacctaagtgttacaggctcgttcgccctcacatccgcaggacgaagcaacgcaggcccacactttttgaccggcagcggcaggcccctcgggccaacagagactgttccggggtccaaagaatctaactcatcatgattcatgaaccaaaatgaacaggtacaccggacgaaccttgcggatggaaaaaaacaactcccacgcgtctctctctctctctagtacagtagtaccttcttctcttctgtttcttcgatgaacttcgcacgttctcgaatgaataatagaggagcagggtgaagcaaa

SEQ ID NO: 17351 - DNA, 1646 bp, Zea Mays
gtctcgtctcgtctcgtcccgtcctcgccagagttgctgtcacgccggaaccggtagcagttgcaggaaaaacagggcaaggagctactttgagcccgagactgaactgaagaagatgatgatggccgaggtggccaaccacagcaagaggaaccacacggacagctacttcagtggcaaggccgtcgccgtccccgccgccgcggccaccagctcggaggagttcggcagcatgtcgtcgaagaagccgaggaatgccagccccagactcgcgcccgtatcaccaaaggtacgtacgcacgcacgcaccgtacgatgccagtgtccactgtcccccgtacgtacgtacgtacgtctccggtctcccatggctatctgtttggctcaagttttttttcttgttggtgctgctgctgctgctgcgacgactgtgcaggagaagaaggacaagatcggcgagagggtcgcagcgctccagcagctcgtgtcaccgttcggaaaggaggcgtcggggtacatcaagttcctgcaccagcagctggaggtcctgagctccccttacatgcgcgctcctccggccgctggcgctgcgcctgaggtgagcttccgccgtccctcgtcttcgtctccactgatgagttcttgacgcaagcctgtagaaccctaaacctcgtctccatacatacatactaacatacaccatctgctatttggtgcaagaaagaaacctagtagcagcacgagatcgttgtgtaacacatgcatgtgatccaggacccccagcgctacagcctccggagccgcgggctgtgcctggtgccggtggacctgacgctgcagctgacccagagcaacggggccgacctgtgggcgccggcgcacacggccaggcgaaggtgaggactgaggaggagccggtctgtctgtccggagggaaccgcgcaagtgctgccgcgtctgcgtgcgcgccgtggagttgagtttccaggcgcctgactgacccgattcgacctcctagcaagaaactaaagcaagcgtgcgtgtccgtatcagccgccttgtattatactcctagtagtactctcgtgacctgcctggtcaggtctctctctcctagcttgttgtccgccgtttatgtgttgagcggcatgtggattagaagcctgtgtggctggctgtcagcaagcagagcggcagtttgatgcctgttccttgagatggatagtgttatcgagttcagaagaataccatgcgcgtgtgcctgatgtatgctctctctctctcgctcactgtctctctcagctgtgatggaactgaaaccgcacgttcaggcaaggcaaaacctaagtgttacaggctcgttcgccctcacatccgcaggacgaagcaacgcaggcccacactttttgaccggcagcggcaggcccctcgggccaacagagactgttccggggtccaaagaatctaactcatcatgattcatgaaccaaaatgaacaggtacaccggacgaaccttgcggatggaaaaaaacaactcccacgcgtctctctctctctctagtacagtagtaccttcttctcttctgtttcttcgatgaacttcgcacgttctcgaatgaataatagaggagcagggtgaagcaaa

SEQ ID NO: 17352 - DNA, 1426 bp, Zea Mays
aatgtggaaagagtcatgccaccggtgcaacggtggactggaccggaacagccactccaccaatgtcttccacgtcgcatgccatgcatcgacaggatgcacgctctgatctctatataaggggcggcaacccttgtgacacctgacatcacctcagtatttgtcagaagctcaaatactgatctcactgatccagtatggctatggcaaaggcaggcgcgccgagggtctcggcggcccagctggtgactctcgggctatcactcctctgcgctgtcgccggcccggccgccgcgcagaactgcggctgccagccaaacgtatgctgcagcaagtttggctactgcggcacgaccgacgagtactgcggcgacggcagtggcggcggtggtgcgaacgtggctagcgtcgtcaccggctccttcttcaacggcatcaagagccaggccgggagcgggtgcgagggcaagaacttctacacccggagcgcgttcctgagcgccgtcaaggcgtacccaggcttcgcccatggcgggtcgcaggtgcagggcaagcgcgagatcgccgccttcttcgcgcacgccacgcacgagaccgggcatttctgctacatcagcgagatcaacaagagcaacgcctactgcgacccgaccaagaggcagtggccgtgcgccgcggggcagaagtactacgggcgcggcccgctgcagatctcgtggaactacaactacgggcccgcggggagggccatcggcttcgacgggctcggggaccccggcagggtggcgcgggacgccgtggtggcgttcaaggcggcgctctggttctggatgaacagcgtgcacggggtggtgccgcaggggttcggcgccaccaccagggccatcaacggcgccctcgagtgcggcgggaacaaccccgcccagatgaacgcgcgcgtcggctactacaggcagtactgccgccagctcggcgtcgaccccgggcccaacctcacctgctaggctaggcggcatcggcggacggcgggggccttcaggccttgtgctcggcgtcgcatcgcaccctcgcgcgcgaaaccgagcaatagtgacaataaaacgccggggctagctgagcctgtttgttcgacttcgacctgaataatgaagcagctgtgatatgcatgttgtttcgacacaacgtgtacgcttgcagagcgcttgtactttacgattgcattgtatgcagcaagggtttaaaggctgaatcaataaacggtgtgtaggcgatcactgtttcaccgcacacgtattcggagcaagtccacgttgaattcaccgcttttgtcgccgtcttgtaccttctgctcgtggtcttctacccattctgtgggtgtgactgtgagcagatgacggtagggccggaaaaaaaaaacttaggctcg

SEQ ID NO: 17353 - DNA, 1711 bp, Zea Mays
ccccattctgtcttgcggtcttccaccatttggtcgttgattttccagacttcgagtgaggacctcgatgagtcgggtttgattggctagaacttgggctaggtctaagggtagttgcggaggtgcggggaggtgggtttcactttcctctctaatggcttccccttcagctctcaggggaaaccctgctccaatcctggaggcggtaggcgtggttttatccgaagccatctgccagggaagagattcactattatgcacatgcaaattgttttcaaccaagttattttattcattacaccagtacattacaagcacatgactactacaagttgaactacacaagagtgttccttgaggtactaccgaactctttctctaaggtatccccaaattccttgagaagatcatcaaggcttgctagggatatatcctcggcgtcggaccaatcatctatcctggggggaggtgggactggaggggtcttcttcttcttctccatttggcatcctcggttggtggtcttcttctggattttcttcttgggagcgagcttccttagcttcttgtcatagtccatctttaaggttcgataggcctcacaggtgttggcttcctcgccttctgctatgtcgagacactcctggagagatgccttctcttgcttaagctctttgacttgctgctctaggctttccactcgggagtttaggtgggtgcagtgggaggagagatcatcgtagtggttgtcgagggtgtggaggtatccggccatgtagaccatggtggggtcatcttctgtggggtctcctcctgacagagcctggagtcttttcctccaggtgggggtatttttgttgctgggtgggaaatatcgaaggggggtctcagagatctctcggctgtagttttggcacaactgtttcagggcttttcgggcaacactctggcaagtgtctgggaagcggtgcccgatgaaggtgacttggaagggagggtggtttgggtagtttcggctttctcctaggtagactgccatagagcacttttctattccattttcgcggtattccttccagacatattcgggcttcttgcggatacccatgcgtagcacgcaacttcgtagaaggtgaggaaagccttcctcctctgagcaataggatgtcctaataacccaggggccttccatctggtagaagaaaagaagggtctgttaatatcggggaaaggagggagagtgtttcttgggggtaagaggtgttttcttgttaaggcaacttttaaggtcagggttgcggtctacggccagtcctataggctctaataccacctgaagcgtcccgatcctttggaactcaaatgtgatacaattactagtcccaggaggctagtaaccacattcattacttcaaatagttacagagtctgaataatgttattacaataccgggggatacaagctcgagagtgagccgaaaatcataaagtgcagtggaatgtaaaatagcccaggccacaggcaaaactgggtgaagacacagccccatcaatcaagcatagcagaaaagaagtcttcagctgctgaaaaacataaataaatctgggtgaatacactaggtattccgcaagcccacccggctcccgtaaagagaaagtgacctatattatacatgcttcatatggtggagttaaagtcactcatactttt

SEQ ID NO: 17354 - DNA, 1061 bp, Zea Mays
ccttttctagtgctcacatccactcgccgcgcgacgaagagaacggctcccccttccccgccacctactcgggctggagcaacaggttctcgaagcgaaacattctcgccccaattgtgggggttcatgggcgccaacggccacccaccgctggcgagcacccgcgcgcacaacgggtcccactccggcggaagcggaggcggaggaggtgggggagggggagcgaaccctagcaacggcggcacggcggcggcgcttcggcacgaccctggcctggcgcgggagtggttgacggaggagcatgccatccttgacgaactgctggtcaagtatgcatccgacttacctgtcgttcgttatgcaaaattgcaatgaagttgccagagaaaacagttcgggatgtagctttgcgctgcagatggatgattaaaaaaggagagcgccaaaagaaagaaggaggatcattactcgtctaagaaaagcaaggacaaaaaggagaaggtttcagattcttcatcgaaaccacctgtccttatggctgataggcctactgttcctccataccctcttccagttcttccagtggacgatgatgaaatctcatccaaagcatgtatattggaggtccaacaggcgaaatccttgaaactaattcccaggttttgagtcaaatttcaacaaaccttagcaacatatacagaacaacatctctctgttgtgccaaactcgagataatatactcaggatcttgaaagagataaacgatgctccagagaccatgaagcagatgccctcgctacctgtgaagataaacgaggacgcagatgcccccgctacccagatgataaacgaggacctcgtcaactcgttgctgcccagaccaactgtacctatgcagtagtgatagcaaaatgaccgtatcctctgtagttccgagagctttttagactgactgcaacgcttgcctcttcacctcccctacgctaatactgttcatcgtttaggggctacagtctcctcctacctcgcgcagcgccaccccctcggcttcttcgcgcgga

SEQ ID NO: 17355 - DNA, 1061 bp, Zea Mays
ctacaaagacttttaagttttacaccactcgtcggtcgcctcacctcccgccggacagcgccggcgccggcgggggatacctggaccgtgacgactgacgaggaggtgaacaacgccgccgtgtcgttcaacgagatcgacaccaactcggtggagcacgccgagactgtcctcaggaccaacttctacggggccaagatgctcaccgaagcgctcctgccgctgttccggcagtcgtcggcgaccagcaggatcctcaacatcagctcgcagctgggccttctcaacaaggtgggcgacccgtcgctgaaggcactgctcctggacgaggagcggctgacggaggcggggatagaggcgatggtgtcgcggttcctggcgcaggtgaaggacgggacgtggggcgagcaggggtggcccaaggtgtggacggactactccgtctccaagctggccctgaacgcctactcccggctgctggcgcggcggctggaggcgcgcggcgtgagcgtgaactgcttctgccccgggttcacgcgcacggacatgaccaggggctgggggaagcgcaccgccggcgaggcggccgacgtcggggcgcggctcgcgctgctgccgcccaccgagctccccacggggaccttcttcaagtggcgcacgccgcagctatactctaagctgtgactggctctgggctctggctggctggctagctgagctgtcgtccgtcggccggggcgtacagcatttcggtccggcggtgtaggcgtgtagccgctcctcctattcctcctgctgaatagtactagcaagtatcaacaacgtgtgcagagaagtcggtaaccggagtgtcgatctgccaaggtgctttggttgaacactggctcagcccgtttgtgactctcagctatgtgtacaatgtgcgcttatatctgtcttaagatttaggccaacttctgagcactggttgaatggctgttccttacagttctgtccgttcacaagtatgttccttgtccaaaagtagagatggcaatgggtaaatacccaccgggtattag

SEQ ID NO: 17356 - DNA, 1149 bp, Zea Mays
ctacaaagacttttaagttttacaccactcgtcggtcgcctcacctcccgccggacagcgccggcgccggcgggggatacctggaccgtgacgactgacgaggaggtcagttgccgacttgccgtcattaaggtagctggtgcagtacacgcctagttgctttgcttgcgattggctccggagaccaaactgggtgaacaacgccgccgtgtcgttcaacgagatcgacaccaactcggtggagcacgccgagactgtcctcaggaccaacttctacggggccaagatgctcaccgaagcgctcctgccgctgttccggcagtcgtcggcgaccagcaggatcctcaacatcagctcgcagctgggccttctcaacaaggtgggcgacccgtcgctgaaggcactgctcctggacgaggagcggctgacggaggcggggatagaggcgatggtgtcgcggttcctggcgcaggtgaaggacgggacgtggggcgagcaggggtggcccaaggtgtggacggactactccgtctccaagctggccctgaacgcctactcccggctgctggcgcggcggctggaggcgcgcggcgtgagcgtgaactgcttctgccccgggttcacgcgcacggacatgaccaggggctgggggaagcgcaccgccggcgaggcggccgacgtcggggcgcggctcgcgctgctgccgcccaccgagctccccacggggaccttcttcaagtggcgcacgccgcagctatactctaagctgtgactggctctgggctctggctggctggctagctgagctgtcgtccgtcggccggggcgtacagcatttcggtccggcggtgtaggcgtgtagccgctcctcctattcctcctgctgaatagtactagcaagtatcaacaacgtgtgcagagaagtcggtaaccggagtgtcgatctgccaaggtgctttggttgaacactggctcagcccgtttgtgactctcagctatgtgtacaatgtgcgcttatatctgtcttaagatttaggccaacttctgagcactggttgaatggctgttccttacagttctgtccgttcacaagtatgttccttgtccaaaagtagagatggcaatgggtaaatacccaccgggtattag

SEQ ID NO: 17357 - DNA, 1088 bp, Zea Mays
ctacaaagacttttaagttttacaccactcgtcggtcgcctcacctcccgccggacagcgccggcgccggcgggggatacctggaccgtgacgactgacgaggaggtcagttgccgacttgccgtcattaaggtgaacaacgccgccgtgtcgttcaacgagatcgacaccaactcggtggagcacgccgagactgtcctcaggaccaacttctacggggccaagatgctcaccgaagcgctcctgccgctgttccggcagtcgtcggcgaccagcaggatcctcaacatcagctcgcagctgggccttctcaacaaggtgggcgacccgtcgctgaaggcactgctcctggacgaggagcggctgacggaggcggggatagaggcgatggtgtcgcggttcctggcgcaggtgaaggacgggacgtggggcgagcaggggtggcccaaggtgtggacggactactccgtctccaagctggccctgaacgcctactcccggctgctggcgcggcggctggaggcgcgcggcgtgagcgtgaactgcttctgccccgggttcacgcgcacggacatgaccaggggctgggggaagcgcaccgccggcgaggcggccgacgtcggggcgcggctcgcgctgctgccgcccaccgagctccccacggggaccttcttcaagtggcgcacgccgcagctatactctaagctgtgactggctctgggctctggctggctggctagctgagctgtcgtccgtcggccggggcgtacagcatttcggtccggcggtgtaggcgtgtagccgctcctcctattcctcctgctgaatagtactagcaagtatcaacaacgtgtgcagagaagtcggtaaccggagtgtcgatctgccaaggtgctttggttgaacactggctcagcccgtttgtgactctcagctatgtgtacaatgtgcgcttatatctgtcttaagatttaggccaacttctgagcactggttgaatggctgttccttacagttctgtccgttcacaagtatgttccttgtccaaaagtagagatggcaatgggtaaatacccaccgggtattag

SEQ ID NO: 17358 - DNA, 986 bp, Zea Mays
gggtggcaagcaaccgcgctcggtcaagtggtgaacaacgccgccgtgtcgttcaacgagatcgacaccaactcggtggagcacgccgagactgtcctcaggaccaacttctacggggccaagatgctcaccgaagcgctcctgccgctgttccggcagtcgtcggcgaccagcaggatcctcaacatcagctcgcagctgggccttctcaacaaggtgggcgacccgtcgctgaaggcactgctcctggacgaggagcggctgacggaggcggggatagaggcgatggtgtcgcggttcctggcgcaggtgaaggacgggacgtggggcgagcaggggtggcccaaggtgtggacggactactccgtctccaagctggccctgaacgcctactcccggctgctggcgcggcggctggaggcgcgcggcgtgagcgtgaactgcttctgccccgggttcacgcgcacggacatgaccaggggctgggggaagcgcaccgccggcgaggcggccgacgtcggggcgcggctcgcgctgctgccgcccaccgagctccccacggggaccttcttcaagtggcgcacgccgcagctatactctaagctgtgactggctctgggctctggctggctggctagctgagctgtcgtccgtcggccggggcgtacagcatttcggtccggcggtgtaggcgtgtagccgctcctcctattcctcctgctgaatagtactagcaagtatcaacaacgtgtgcagagaagtcggtaaccggagtgtcgatctgccaaggtgctttggttgaacactggctcagcccgtttgtgactctcagctatgtgtacaatgtgcgcttatatctgtcttaagatttaggccaacttctgagcactggttgaatggctgttccttacagttctgtccgttcacaagtatgttccttgtccaaaagtagagatggcaatgggtaaatacccaccgggtattag

SEQ ID NO: 17359 - DNA, 2763 bp, Zea Mays
cggcaactcgtgtgcactaaagtctgaaccggtcgactagtctgactgagccgctcttgcccgtccgtgctgcgctgaggtcgtctcactcggaggcgccagcgcgcgcgcgcgcgtcgtgtataaatacgtgcccgcgtctcactgttgcctcgctcgcacggtgtcctcctcccgctaccggcaggccacccccatacgcctcgttcgtctcctcctcaaccgcaggtcagcagcgcccgagctctgcgtgcgatggactactcgggcaccaaggagtcgcctccctccggggcttggtggtcgagggagacggtggccgtggtgaccggcgcgaaccgcggcatcggccacgcgctcgccgcgcgcctggccgagcacggcctcaccgtggtgctcaccgcgcgggacggcgagcgcggggaggccgccgcggccccgctcctcgcgcgcgggctcgccgtcgtcttccgcaggctcgacgtctccgacgccgcctccgtcgccgagttcgccgcctggctccgcgacgccgtcgggggcctcgacatcctggtaaattaaggcgtaaagccccccctctcgtgctcgtgacccgctgcttatgttcggatggaacggaacgtagggatttcgcgatagctttctgatgaaatttcagtctccgctccccggctctccaaaacggcttcatttgtgctcagttcaccgtacagccggcacgcgcgtccactggcccgtcgatacgtgtcgcagcccattaacagatgtgcagcacgcagcagcattattgcctgcgcctcccccgcagcagcgaacgacgcccccacgctctcctggcccgccgcgcacgccggcgaccagacgaatcaaagcgtcgcgtcggtccaacgggtggcaagcaaccgcgctcggtcaagtggtactacaaagacttttaagttttacaccactcgtcggtcgcctcacctcccgccggacagcgccggcgccggcgggggatacctggaccgtgacgactgacgaggaggtcagttgccgacttgccgtcattaaggtagctggtgcagtacacgcctagttgctttgcttgcgattggctccggagaccaaactgggtgggtactcaaccacgacagatctggagaaatcgtacagggtttccattcattccctcgtatagcttttactattcggcattcaggttcaagtagctttcggatagcgacgacaatactagttctaggcttctagcaagcagaaattcttttttccctgaacaaaagataacaaatcatatgttacagagaaaagtagccaaaatcattggaagcaacagcaaggcacgacagggattactgttgagctatcggcgtgaacagcgtcaggctaggttcagtccagtcggtctctatccgttagcttagcgcttgtagcccatggagttatcagcagatatgatcagagattcagagagctttttttctttaggaatgatgagagaaccttttttttgagcaatggtgagagatcctttttgtgtgtgtggactgtggaatggaatgatcagagagcttttcacgagtccagttcagactcgacgctccggtccagagggaaagccgccgtcgtgcattaccaacacaccagtcagtggccgccagtgctgctgtagccaattgtttgctcagacacttgaaagcaacaatgaaagagggttttttttttcggtggccggactttccagtgtcgctgaaatcaggtttacctttattttttttcttgttcgttgctgctgctgctgcaggtgaacaacgccgccgtgtcgttcaacgagatcgacaccaactcggtggagcacgccgagactgtcctcaggaccaacttctacggggccaagatgctcaccgaagcgctcctgccgctgttccggcagtcgtcggcgaccagcaggatcctcaacatcagctcgcagctgggccttctcaacaaggtgggcgacccgtcgctgaaggcactgctcctggacgaggagcggctgacggaggcggggatagaggcgatggtgtcgcggttcctggcgcaggtgaaggacgggacgtggggcgagcaggggtggcccaaggtgtggacggactactccgtctccaagctggccctgaacgcctactcccggctgctggcgcggcggctggaggcgcgcggcgtgagcgtgaactgcttctgccccgggttcacgcgcacggacatgaccaggggctgggggaagcgcaccgccggcgaggcggccgacgtcggggcgcggctcgcgctgctgccgcccaccgagctccccacggggaccttcttcaagtggcgcacgccgcagctatactctaagctgtgactggctctgggctctggctggctggctagctgagctgtcgtccgtcggccggggcgtacagcatttcggtccggcggtgtaggcgtgtagccgctcctcctattcctcctgctgaatagtactagcaagtatcaacaacgtgtgcagagaagtcggtaaccggagtgtcgatctgccaaggtgctttggttgaacactggctcagcccgtttgtgactctcagctatgtgtacaatgtgcgcttatatctgtcttaagatttaggccaacttctgagcactggttgaatggctgttccttacagttctgtccgttcacaagtatgttccttgtccaaaagtagagatggcaatgggtaaatacccaccgggtattag

SEQ ID NO: 17360 - DNA, 1249 bp, Zea Mays
cggcaactcgtgtgcactaaagtctgaaccggtcgactagtctgactgagccgctcttgcccgtccgtgctgcgctgaggtcgtctcactcggaggcgccagcgcgcgcgcgcgcgtcgtgtataaatacgtgcccgcgtctcactgttgcctcgctcgcacggtgtcctcctcccgctaccggcaggccacccccatacgcctcgttcgtctcctcctcaaccgcaggtcagcagcgcccgagctctgcgtgcgatggactactcgggcaccaaggagtcgcctccctccgggtgaacaacgccgccgtgtcgttcaacgagatcgacaccaactcggtggagcacgccgagactgtcctcaggaccaacttctacggggccaagatgctcaccgaagcgctcctgccgctgttccggcagtcgtcggcgaccagcaggatcctcaacatcagctcgcagctgggccttctcaacaaggtgggcgacccgtcgctgaaggcactgctcctggacgaggagcggctgacggaggcggggatagaggcgatggtgtcgcggttcctggcgcaggtgaaggacgggacgtggggcgagcaggggtggcccaaggtgtggacggactactccgtctccaagctggccctgaacgcctactcccggctgctggcgcggcggctggaggcgcgcggcgtgagcgtgaactgcttctgccccgggttcacgcgcacggacatgaccaggggctgggggaagcgcaccgccggcgaggcggccgacgtcggggcgcggctcgcgctgctgccgcccaccgagctccccacggggaccttcttcaagtggcgcacgccgcagctatactctaagctgtgactggctctgggctctggctggctggctagctgagctgtcgtccgtcggccggggcgtacagcatttcggtccggcggtgtaggcgtgtagccgctcctcctattcctcctgctgaatagtactagcaagtatcaacaacgtgtgcagagaagtcggtaaccggagtgtcgatctgccaaggtgctttggttgaacactggctcagcccgtttgtgactctcagctatgtgtacaatgtgcgcttatatctgtcttaagatttaggccaacttctgagcactggttgaatggctgttccttacagttctgtccgttcacaagtatgttccttgtccaaaagtagagatggcaatgggtaaatacccaccgggtattag

SEQ ID NO: 17361 - DNA, 1078 bp, Zea Mays
cactaaacactttaaatcagattttattttaattttgaggactcaaattctaacagcagtaacatcggcagctgagattaaatcgcctggctacgagataaaagccatttccccatgtccactatccctccttatcaccaaccatccagtcataactcacggcaggcagagacgcgcaccaccagaccagcagcagaacgaaagggatctccggtccccaggccccggctcctccccttccgattccaatctggtctcgccgggcctggcggcgagggagagatggggaagaaccaggcgtacaaggcgatgcagcgggcgcggttggggtcctcgtccggcgcgccgggcgccgccgacgcccccgaagacggcatgagtggcatgcggcgcgcctggccagccttaacaagacgcacaccctcacctgggaggagttcaagaagaagcagaaggaagaggaactgaaaaggggcgagctggaggctgacaaagacaaaatgatgagagagtatagagctcaactggatgctgaaagagctcaaaagctagcaaacggaagaaatcactcaaggtcaaactcaaaatcatcatcttccaagaaagagaggaaggataaggacgcaaagaaaagaagtaaaaagaggagaaagcacaaaagttcatcagagtcaagttccagctcatcttcagaatcttcaagcagcgacgatgaggataggggttcaaggaagtccagatcacggtcgagatcaaagagaacaaggaaggaaaagaagagccggtcaaggtccaagcgcagaggcagtgaaagcgaggaggaaggcccggtacgcctctctaaattcttcgggaagtaaggagtagacgccgctgtacccaagacgcctttttcattttgaaacgtagattggtgggtttggatgtatcattcaacacaaattacttctgaaggttgagcgagccgtttaccatggtgttctcaatatgatgctcagctgttaagagggtctggtcaagttgtgtggcttctaaaaactttgtaagcaactgtctggattctgacgatgtccagcga

SEQ ID NO: 17362 - DNA, 767 bp, Zea Mays
atttgcactgatgatatgccccaggaagaggaactgaaaaggggcgagctggaggctgacaaagacaaaatgatgagagagtatagagctcaactggatgctgaaagagctcaaaagctagcaaacggaagaaatcactcaaggtcaaactcaaaatcatcatcttccaagaaagagaggaaggataaggacgcaaagaaaagaagtaaaaagaggagaaagcacaaaagttcatcagagtcaagttccagctcatcttcagaatcttcaagcagcgacgatgaggataggggttcaaggaagtccagatcacggtcgagatcaaagagaacaaggaaggaaaagaagagccggtcaaggtccaagcgcagaggcagtgaaagcgaggaggaaggcccggtacgcctctctaaattcttcgggaagtaaggagtagacgccgctgtacccaagacgcctttttcattttgaaacgtagattggtgggtttggatgtatcattcaacacaaattacttctgaaggttgagcgagccgtttaccatggtgttctcaatatgatgctcagctgttaagagggtctggtcaagttgtgtggcttctaaaaactttgtaagcaactggtaagtcattgttaaatcgctgtaccttggaggatttgatgccatatatttgagacattgaactgctatatttatgttaagactttacatatgcagtcagttgtttcagttatatgctcttttgctatatttatgttaagacttt

SEQ ID NO: 17363 - DNA, 1125 bp, Zea Mays
cactaaacactttaaatcagattttattttaattttgaggactcaaattctaacagcagtaacatcggcagctgagattaaatcgcctggctacgagataaaagccatttccccatgtccactatccctccttatcaccaaccatccagtcataactcacggcaggcagagacgcgcaccaccagaccagcagcagaacgaaagggatctccggtccccaggccccggctcctccccttccgattccaatctggtctcgccgggcctggcggcgagggagagatggggaagaaccaggcgtacaaggcgatgcagcgggcgcggttggggtcctcgtccggcgcgccgggcgccgccgacgcccccgaagacggcatgacggacggttcattccattctccagagtggcatgcggcgcgcctggccagccttaacaagacgcacaccctcacctgggaggagttcaagaagaagcagaaggaagaggaactgaaaaggggcgagctggaggctgacaaagacaaaatgatgagagagtatagagctcaactggatgctgaaagagctcaaaagctagcaaacggaagaaatcactcaaggtcaaactcaaaatcatcatcttccaagaaagagaggaaggataaggacgcaaagaaaagaagtaaaaagaggagaaagcacaaaagttcatcagagtcaagttccagctcatcttcagaatcttcaagcagcgacgatgaggataggggttcaaggaagtccagatcacggtcgagatcaaagagaacaaggaaggaaaagaagagccggtcaaggtccaagcgcagaggcagtgaaagcgaggaggaaggcccggtacgcctctctaaattcttcgggaagttgagcgagccgtttaccatggtgttctcaatatgatgctcagctgttaagagggtctggtcaagttgtgtggcttctaaaaactttgtaagcaactggtaagtcattgttaaatcgctgtaccttggaggatttgatgccatatatttgagacattgaactgctatatttatgttaagactttacatatgcagtcagttgtttcagttatatgctcttttgctatatttatgttaagacttt

SEQ ID NO: 17364 - DNA, 1614 bp, Zea Mays
gatctagccgctcgacgctagagacgacgacagccgcaatcaacgtacagaccgtgttctgcgtgacgcatcccggcgccgacgccgaggacccgcaaccgacccggcagctgagggagagcttcatctccagcgagagtcgcaaaccctccatgagttccccattccccaaccttctgattttgacgccgggtcgtgggcaaatcaggtagagcggctgcggattttggcgcccggcctcgggagtttgggagcttagcgactccacagtggaagactggtggacggcctttgcccgcgctgcgtcttcccctgcttcgcgatgggaggctcccctgtatgggacgggactctgtctccggacagcttcaacacctccgcggcggcgcttgttaagaggtggaaggagatcgaggtcgacgattcccttcctgaatggacgtggaagccgtgcagcaaatttgggggtgccgtcggaggtagaagggtatctagccctggaaagagtgtaccgcagctgtggaacaagccagagtgttcttccaggagcagatcgaagagatgaagttcgatggtgcaggggatgtagcttgggtaaatgtttctgtgaactgcttattgataaactagccaagtctgatcttcatctcacccctgcacaacaattagagttcatataaaggcagcagctctaaattgggtgatgattttgggacatacagtcttgtactgaattttggggacaagacttggctcgtatcgatctagtatctgcacacctcacacaactcgagctctgaagtcatgtccatggttcattccctgcaggtcgagagctccagcgacaatgttcatgtttatgatttccatgctgtctacagcttctcctacaaagtcccagtgctatactttcgcggttatcacactagtatgtgggcagctactaactctagatgaggtaaaagagggtcttccttcccactcacagaaagtattaagtgaatcaaagtggacgtttattactcaagaggagcacccccatttaagcaagccatggctggccctgcacccctgtgcaaccagtggttggatgaagctacttctcgaagaaactgaagcgactgataaggagcactcggtgcaatatttaccggcatggttatccgtggttggccaggcagtagggctgaaaatccctcttgaacttcattccaactcttagtttttttttcactttttgtatgtctttcagtatgtagcagggattgaaagagagtcctcagcttgtgtttggtgataatagtcaccaatatttgtgacactggtggctagaccttgccatcgtgtcattgttgtggtgactgtatactttcattcaatctgctagcgtttctgttagacaccctcgggggtatgaaacgctagcgttttaggaaattcatctactcttggtttgtgttttggagtaatctcctggttgaaccaaggaagcaagaatttctctgtttttatttgagagatgctaggataagctttctatcccacgagatctctcaaggcttccacacgggcggcggaggtggggtggccgggaacagcggctgcaccgcggag

SEQ ID NO: 17365 - DNA, 1609 bp, Zea Mays
ggactttcgatctagccgctcgacgctagagacgacgacagccgcaatcaacgtacagaccgtgttctgcgtgacgcatcccggcgccgacgccgaggacccgcaaccgacccggcagctgagggagagcttcatctccagcgagagtcgcaaaccctccatgagttccccattccccaaccttctgattttgacgccgggtcgtgggcaaatcaggtagagcggctgcggattttggcgcccggcctcgggagtttgggagcttagcgactccacagtggaagactggtggacggcctttgcccgcgctgcgtcttcccctgcttcgcgatgggaggctcccctgtatgggacgggactctgtctccggacagcttcaacacctccgcggcggcgcttgttaagaggtggaaggagatcgaggtcgacgattcccttcctgaatggacgtggaagccgtgcagcaaatttgggggtgccgtcggaggtagaagggtatctagccctggaaagagtgtaccgcagctgtggaacaagccaggagcagatcgaagagatgaagttcgatggtgcaggggatgtagcttgggtaaatgtttctgtgaactgcttattgataaactagccaagtctgatcttcatctcacccctgcacaacaattagagttcatataaaggcagcagctctaaattgggtgatgattttgggacatacagtcttgtactgaattttggggacaagacttggctcgtatcgatctagtatctgcacacctcacacaactcgagctctgaagtcatgtccatggttcattccctgcaggtcgagagctccagcgacaatgttcatgtttatgatttccatgctgtctacagcttctcctacaaagtcccagtgctatactttcgcggttatcacactagtatgtgggcagctactaactctagatgaggtaaaagagggtcttccttcccactcacagaaagtattaagtgaatcaaagtggacgtttattactcaagaggagcacccccatttaagcaagccatggctggccctgcacccctgtgcaaccagtggttggatgaagctacttctcgaagaaactgaagcgactgataaggagcactcggtgcaatatttaccggcatggttatccgtggttggccaggcagtagggctgaaaatccctcttgaacttcattccaactcttagtttttttttcactttttgtatgtctttcagtatgtagcagggattgaaagagagtcctcagcttgtgtttggtgataatagtcaccaatatttgtgacactggtggctagaccttgccatcgtgtcattgttgtggtgactgtatactttcattcaatctgctagcgtttctgttagacaccctcgggggtatgaaacgctagcgttttaggaaattcatctactcttggtttgtgttttggagtaatctcctggttgaaccaaggaagcaagaatttctctgtttttatttgagagatgctaggataagctttctatcccacgagatctctcaaggcttccacacgggcggcggaggtggggtggccgggaacagcggctgcaccgcggag

SEQ ID NO: 17366 - DNA, 1619 bp, Zea Mays
cggactttcgatctagccgctcgacgctagagacgacgacagccgcaatcaacgtacagaccgtgttctgcgtgacgcatcccggcgccgacgccgaggacccgcaaccgacccggcagctgagggagagcttcatctccagcgagagtcgcaaaccctccatgagttccccattccccaaccttctgattttgacgccgggtcgtgggcaaatcaggtagagcggctgcggattttggcgcccggcctcgggagtttgggagcttagcgactccacagtggaagactggtggacggcctttgcccgcgctgcgtcttcccctgcttcgcgatgggaggctcccctgtatgggacgggactctgtctccggacagcttcaacacctccgcggcggcgcttgttaagaggtggaaggagatcgaggtcgacgattcccttcctgaatggacgtggaagccgtgcagcaaatttgggggtgccgtcggaggtagaagggtatctagccctggaaagagtgtaccgcagctgtggaacaagccagagtgttcttccaggagcagatcgaagagatgaagttcgatggtgcaggggatgtagcttgggtaaatgtttctgtgaactgcttattgataaactagccaagtctgatcttcatctcacccctgcacaacaattagagttcatataaaggcagcagctctaaattgggtgatgattttgggacatacagtcttgtactgaattttggggacaagacttggctcgtatcgatctagtatctgcacacctcacacaactcgagctctgaagtcatgtccatggttcattccctgcaggtcgagagctccagcgacaatgttcatgtttatgatttccatgctgtctacagcttctcctacaaagtcccagtgctatactttcgcggttatcacactagtgggcagctactaactctagatgaggtaaaagagggtcttccttcccactcacagaaagtattaagtgaatcaaagtggacgtttattactcaagaggagcacccccatttaagcaagccatggctggccctgcacccctgtgcaaccagtggttggatgaagctacttctcgaagaaactgaagcgactgataaggagcactcggtgcaatatttaccggcatggttatccgtggttggccaggcagtagggctgaaaatccctcttgaacttcattccaactcttagtttttttttcactttttgtatgtctttcagtatgtagcagggattgaaagagagtcctcagcttgtgtttggtgataatagtcaccaatatttgtgacactggtggctagaccttgccatcgtgtcattgttgtggtgactgtatactttcattcaatctgctagcgtttctgttagacaccctcgggggtatgaaacgctagcgttttaggaaattcatctactcttggtttgtgttttggagtaatctcctggttgaaccaaggaagcaagaatttctctgtttttatttgagagatgctaggataagctttctatcccacgagatctctcaaggcttccacacgggcggcggaggtggggtggccgggaacagcggctgcaccgcggag

SEQ ID NO: 17367 - DNA, 1391 bp, Zea Mays
cacggactttcgatctagccgctcgacgctagagacgacgacagccgcaatcaacgtacagaccgtgttctgcgtgacgcatcccggcgccgacgccgaggacccgcaaccgacccggcagctgagggagagcttcatctccagcgagagtcgcaaaccctccatgagttccccattccccaaccttctgattttgacgccgggtcgtgggcaaatcaggtagagcggctgcggattttggcgcccggcctcgggagtttgggagcttagcgactccacagtggaagactggtggacggcctttgcccgcgctgcgtcttcccctgcttcgcgatgggaggctcccctgtatgggacgggactctgtctccggacagcttcaacacctccgcggcggcgcttgttaagaggtggaaggagatcgaggtcgacgattcccttcctgaatggacgtggaagccgtgcagcaaatttgggggtgccgtcggaggtagaagggtatctagccctggaaagagtgtaccgcagctgtggaacaagccagagtgttcttccaggagcagatcgaagagatgaagttcgatggtgcaggggatgtagcttgggtcgagagctccagcgacaatgttcatgtttatgatttccatgctgtctacagcttctcctacaaagtcccagtgctatactttcgcggttatcacactagtatgtgggcagctactaactctagatgaggtaaaagagggtcttccttcccactcacagaaagtattaagtgaatcaaagtggacgtttattactcaagaggagcacccccatttaagcaagccatggctggccctgcacccctgtgcaaccagtggttggatgaagctacttctcgaagaaactgaagcgactgataaggagcactcggtgcaatatttaccggcatggttatccgtggttggccaggcagtagggctgaaaatccctcttgaacttcattccaactcttagtttttttttcactttttgtatgtctttcagtatgtagcagggattgaaagagagtcctcagcttgtgtttggtgataatagtcaccaatatttgtgacactggtggctagaccttgccatcgtgtcattgttgtggtgactgtatactttcattcaatctgctagcgtttctgttagacaccctcgggggtatgaaacgctagcgttttaggaaattcatctactcttggtttgtgttttggagtaatctcctggttgaaccaaggaagcaagaatttctctgtttttatttgagagatgctaggataagctttctatcccacgagatctctcaaggcttccacacgggcggcggaggtggggtggccgggaacagcggctgcaccgcggag

SEQ ID NO: 17368 - DNA, 1606 bp, Zea Mays
cacggactttcgatctagccgctcgacgctagagacgacgacagccgcaatcaacgtacagaccgtgttctgcgtgacgcatcccggcgccgacgccgaggacccgcaaccgacccggcagctgagggagagcttcatctccagcgagagtcgcaaaccctccatgagttccccattccccaaccttctgattttgacgccgggtcgtgggcaaatcaggtagagcggctgcggattttggcgcccggcctcgggagtttgggagcttagcgactccacagtggaagactggtggacggcctttgcccgcgctgcgtcttcccctgcttcgcgatgggaggctcccctgtatgggacgggactctgtctccggacagcttcaacacctccgcggcggcgcttgttaagaggtggaaggagatcgaggtcgacgattcccttcctgaatggacgtggaagccgtgcagcaaatttgggggtgccgtcggaggtagaagggtatctagccctggaaagagtgtaccgcagctgtggaacaagccagatcgaagagatgaagttcgatggtgcaggggatgtagcttgggtaaatgtttctgtgaactgcttattgataaactagccaagtctgatcttcatctcacccctgcacaacaattagagttcatataaaggcagcagctctaaattgggtgatgattttgggacatacagtcttgtactgaattttggggacaagacttggctcgtatcgatctagtatctgcacacctcacacaactcgagctctgaagtcatgtccatggttcattccctgcaggtcgagagctccagcgacaatgttcatgtttatgatttccatgctgtctacagcttctcctacaaagtcccagtgctatactttcgcggttatcacactagtatgtgggcagctactaactctagatgaggtaaaagagggtcttccttcccactcacagaaagtattaagtgaatcaaagtggacgtttattactcaagaggagcacccccatttaagcaagccatggctggccctgcacccctgtgcaaccagtggttggatgaagctacttctcgaagaaactgaagcgactgataaggagcactcggtgcaatatttaccggcatggttatccgtggttggccaggcagtagggctgaaaatccctcttgaacttcattccaactcttagtttttttttcactttttgtatgtctttcagtatgtagcagggattgaaagagagtcctcagcttgtgtttggtgataatagtcaccaatatttgtgacactggtggctagaccttgccatcgtgtcattgttgtggtgactgtatactttcattcaatctgctagcgtttctgttagacaccctcgggggtatgaaacgctagcgttttaggaaattcatctactcttggtttgtgttttggagtaatctcctggttgaaccaaggaagcaagaatttctctgtttttatttgagagatgctaggataagctttctatcccacgagatctctcaaggcttccacacgggcggcggaggtggggtggccgggaacagcggctgcaccgcggag

SEQ ID NO: 17369 - DNA, 1380 bp, Zea Mays
cacgagcgcacggactttcgatctagccgctcgacgctagagacgacgacagccgcaatcaacgtacagaccgtgttctgcgtgacgcatcccggcgccgacgccgaggacccgcaaccgacccggcagctgagggagagcttcatctccagcgagagtcgcaaaccctccatgagttccccattccccaaccttctgattttgacgccgggtcgtgggcaaatcaggtagagcggctgcggattttggcgcccggcctcgggagtttgggagcttagcgactccacagtggaagactggtggacggcctttgcccgcgctgcgtcttcccctgcttcgcgatgggaggctcccctgtatgggacgggactctgtctccggacagcttcaacacctccgcggcggcgcttgttaagaggtggaaggagatcgaggtcgacgattcccttcctgaatggacgtggaagccgtgcagcaaatttgggggtgccgtcggaggtagaagggtatctagccctggaaagagtgtaccgcagctgtggaacaagccagatcgaagagatgaagttcgatggtgcaggggatgtagcttgggtcgagagctccagcgacaatgttcatgtttatgatttccatgctgtctacagcttctcctacaaagtcccagtgctatactttcgcggttatcacactagtatgtgggcagctactaactctagatgaggtaaaagagggtcttccttcccactcacagaaagtattaagtgaatcaaagtggacgtttattactcaagaggagcacccccatttaagcaagccatggctggccctgcacccctgtgcaaccagtggttggatgaagctacttctcgaagaaactgaagcgactgataaggagcactcggtgcaatatttaccggcatggttatccgtggttggccaggcagtagggctgaaaatccctcttgaacttcattccaactcttagtttttttttcactttttgtatgtctttcagtatgtagcagggattgaaagagagtcctcagcttgtgtttggtgataatagtcaccaatatttgtgacactggtggctagaccttgccatcgtgtcattgttgtggtgactgtatactttcattcaatctgctagcgtttctgttagacaccctcgggggtatgaaacgctagcgttttaggaaattcatctactcttggtttgtgttttggagtaatctcctggttgaaccaaggaagcaagaatttctctgtttttatttgagagatgctaggataagctttctatcccacgagatctctcaaggcttccacacgggcggcggaggtggggtggccgggaacagcggctgcaccgcggag

SEQ ID NO: 17370 - DNA, 1651 bp, Zea Mays
attaggcccaaccgcccggctcctcatcagtccaccacgagcgcacggactttcgatctagccgctcgacgctagagacgacgacagccgcaatcaacgtacagaccgtgttctgcgtgacgcatcccggcgccgacgccgaggacccgcaaccgacccggcagctgagggagagcttcatctccagcgagagtcgcaaaccctccatgagttccccattccccaaccttctgattttgacgccgggtcgtgggcaaatcaggtagagcggctgcggattttggcgcccggcctcgggagtttgggagcttagcgactccacagtggaagactggtggacggcctttgcccgcgctgcgtcttcccctgcttcgcgatgggaggctcccctgtatgggacgggactctgtctccggacagcttcaacacctccgcggcggcgcttgttaagaggtggaaggagatcgaggtcgacgattcccttcctgaatggacgtggaagccgtgcagcaaatttgggggtgccgtcggaggtagaagggtatctagccctggaaagagtgtaccgcagctgtggaacaagccaggagcagatcgaagagatgaagttcgatggtgcaggggatgtagcttgggtaaatgtttctgtgaactgcttattgataaactagccaagtctgatcttcatctcacccctgcacaacaattagagttcatataaaggcagcagctctaaattgggtgatgattttgggacatacagtcttgtactgaattttggggacaagacttggctcgtatcgatctagtatctgcacacctcacacaactcgagctctgaagtcatgtccatggttcattccctgcaggtcgagagctccagcgacaatgttcatgtttatgatttccatgctgtctacagcttctcctacaaagtcccagtgctatactttcgcggttatcacactagtgggcagctactaactctagatgaggtaaaagagggtcttccttcccactcacagaaagtattaagtgaatcaaagtggacgtttattactcaagaggagcacccccatttaagcaagccatggctggccctgcacccctgtgcaaccagtggttggatgaagctacttctcgaagaaactgaagcgactgataaggagcactcggtgcaatatttaccggcatggttatccgtggttggccaggcagtagggctgaaaatccctcttgaacttcattccaactcttagtttttttttcactttttgtatgtctttcagtatgtagcagggattgaaagagagtcctcagcttgtgtttggtgataatagtcaccaatatttgtgacactggtggctagaccttgccatcgtgtcattgttgtggtgactgtatactttcattcaatctgctagcgtttctgttagacaccctcgggggtatgaaacgctagcgttttaggaaattcatctactcttggtttgtgttttggagtaatctcctggttgaaccaaggaagcaagaatttctctgtttttatttgagagatgctaggataagctttctatcccacgagatctctcaaggcttccacacgggcggcggaggtggggtggccgggaacagcggctgcaccgcggag

SEQ ID NO: 17371 - DNA, 1908 bp, Zea Mays
ttcgtaattaaaaggcacgctccaaacaaactgtacctatggctgacaatgagcctcaaattttacactataaaacttaagggtcgaatcggattaggatcggactttatttttattcatttttgaactataaataagttagggccctatcaaattgtgaagagtcatttggatcgcgatccattaccacccctaactgtacccgccatcctcctagaaccctaacgccttcgttctaaaaaatctaaccatggcaaccgccgccgccgccgccgccccgcttgacgacgccaaggccaagaatgttatacgccaggtggagttctattttagtgacagcaacctcccccgcgatgggttcctacgcaggactgtcgaggaaagcgaggatggattggtgagcttggctctcatctgttccttctcgcggatgaggtcacacctaggtctcgaaggggatgcgaaaccagaaacagtgccagaggagaccgtgcttgcagttgccgacatcttgcgccgttccacagcgctccgcgtatcagaggatgggaagaaagttggtaggtctaaggagttgtcgaagccagatgaggttatagagcaagtggactccaggacagttgctgcatcaccgcttccttacaatttgaattttcagaagaagatgaggcaaaaggcgtttttgagaaaaatctcatttttgctggggcagacctggaaataagaccaaagccactacgcactccccaaaaatattcttctagttgttgtattgattggttttggaaagaatttgatactgaaagagaggcaaagaaagaagcatatgagaagtcacatcctaataagagcagtcatggtgaaggctatccaaaaggtctgattctggccttcaagctgaagaaaactgcagatgatgagaaatccagtgtagagaatgatgagaagatcactgagaataaaggcaatgtgagtgaggagcaggccgatgccgttgaggaattgaaagggctgtctgctggggaaactttacaatctgttcccaaggttgataaaagcccttcaaataaagatcaagatataatctcgagggaggatttaaaagaagaattcactaaatttggcacagtgcggtatgtggacttcagcattggggaagattctggattcattcggtttgaggatcctgcagcagctgacaaggcccgtgcatttgcagccattgcagatgaaggtggtttgactatgaaaggccacatagtcattttggaacctgtgtctggtcaagctgaaaaggattattggagtgcaattcggggcgttcaggagaaatataaagatagccgaaacaacagaggacgggactggaagaacaaccgaggcggaaagcagtttggcggtgggaagcggggtcgccacttcgactcccgtgacagggcctccaataaagctcagaaagtttagatgcaggatatagatttaatctccatatataatgaggaaaacattattttgcgcttcttcagtttgcatcgtggaattgtcatttgttttttatgtttattttctctttgtgaatgttggcctgcactttgaagagcaatctatgaaccacgaggcatgcagcatgctgataatggaaggggcttggctccctctatggttgttcaagtatattgtactattactcattagttatactaattctaaaagtcatagtaaaataacggcttagttactaaggtaatacaattttctattgtattgttctcaaattattttttattgtttaattctacatgagtaagtaaaataaatataatgtaaatcattatttttgtaaacaatatcttattttatctttagtttaaataattaatatttgtctaaaataaaaaataaaaaaaa

SEQ ID NO: 17372 - DNA, 1912 bp, Zea Mays
ttcgtaattaaaaggcacgctccaaacaaactgtacctatggctgacaatgagcctcaaattttacactataaaacttaagggtcgaatcggattaggatcggactttatttttattcatttttgaactataaataagttagggccctatcaaattgtgaagagtcatttggatcgcgatccattaccacccctaactgtacccgccatcctcctagaaccctaacgccttcgttctaaaaaatctaaccatggcaaccgccgccgccgccgccgccccgcttgacgacgccaaggccaagaatgttatacgccaggtggagttctattttagtgacagcaacctcccccgcgatgggttcctacgcaggactgtcgaggaaagcgaggatggatgtctcgaaggggatgcgaaaccagaaacagtgccagaggagaccgtgcttgcagttgccgacatcttgcgccgttccacagcgctccgcgtatcagaggatgggaagaaagttggtaggtctaaggagttgtcgaagccagatgaggttatagagcaagtggactccaggacagttgctgcatcaccgcttccttacaatgtaaaactggaggaagtcgaatctttttttgctcagtgtggcaaggtaaatagtgtgaggctacctcgacatgtttctgacaaaaggcatttctgtggcactgctttagttgaattttcagaagaagatgaggcaaaaggcgtttttgagaaaaatctcatttttgctggggcagacctggaaataagaccaaagaaagaatttgatactgaaagagaggcaaagaaagaagcatatgagaagtcacatcctaataagagcagtcatggtgaaggctatccaaaaggtctgattctggccttcaagctgaagaaaactgcagatgatgagaaatccagtgtagagaatgatgagaagatcactgagaataaaggcaatgtgagtgaggagcaggccgatgccgttgaggaattgaaagggctgtctgctggggaaactttacaatctgttcccaaggttgataaaagcccttcaaataaagatcaagatataatctcgagggaggatttaaaagaagaattcactaaatttggcacagtgcggtatgtggacttcagcattggggaagattctggattcattcggtttgaggatcctgcagcagctgacaaggcccgtgcatttgcagccattgcagatgaaggtggtttgactatgaaaggccacatagtcattttggaacctgtgtctggtcaagctgaaaaggattattggagtgcaattcggggcgttcaggagaaatataaagatagccgaaacaacagaggacgggactggaagaacaaccgaggcggaaagcagtttggcggtgggaagcggggtcgccacttcgactcccgtgacagggcctccaataaagctcagaaagtttagatgcaggatatagatttaatctccatatataatgaggaaaacattattttgcgcttcttcagtttgcatcgtggaattgtcatttgttttttatgtttattttctctttgtgaatgttggcctgcactttgaagagcaatctatgaaccacgaggcatgcagcatgctgataatggaaggggcttggctccctctatggttgttcaagtatattgtactattactcattagttatactaattctaaaagtcatagtaaaataacggcttagttactaaggtaatacaattttctattgtattgttctcaaattattttttattgtttaattctacatgagtaagtaaaataaatataatgtaaatcattatttttgtaaacaatatcttattttatctttagtttaaataattaatatttgtctaaaataaaaaataaaaaaaa

SEQ ID NO: 17373 - DNA, 1893 bp, Zea Mays
ttcgtaattaaaaggcacgctccaaacaaactgtacctatggctgacaatgagcctcaaattttacactataaaacttaagggtcgaatcggattaggatcggactttatttttattcatttttgaactataaataagttagggccctatcaaattgtgaagagtcatttggatcgcgatccattaccacccctaactgtacccgccatcctcctagaaccctaacgccttcgttctaaaaaatctaaccatggcaaccgccgccgccgccgccgccccgcttgacgacgccaaggccaagaatgttatacgccaggtggagttctattttagtgacagcaacctcccccgcgatgggttcctacgcaggactgtcgaggaaagcgaggatggattggtgagcttggctctcatctgttccttctcgcggatgaggtcacacctaggtctcgaaggggatgcgaaaccagaaacagtgccagaggagaccgtgcttgcagttgccgacatcttgcgccgttccacagcgctccgcgtatcagaggatgggaagaaagttggtaggtctaaggagttgtcgaagccagatgaggttatagagcaagtggactccaggacagttgctgcatcaccgcttccttacaatgtaaaactggaggaagtcgaatctttttttgctcagtgtggcaaggtaaatagtgtgaggctacctcgacatgtttctgacaaaaggcatttctgtggcactgctttagttgaattttcagaagaagatgaggcaaaaggcgtttttgagaaaaatctcatttttgctggggcagacctggaaataagaccaaagaaagaatttgatactgaaagagaggcaaagaaagaagcatatgagaagtcacatcctaataagagcagtcatggtgaaggctatccaaaaggtctgattctggccttcaagctgaagaaaactgcagatgatggtgagacaggaaaaagtggtgggggcaaagtagatgacactgaccttactaagaataatggagcttccgatgctacagagaaatccagtgtagagaatgatgagaagatcactgagaataaaggcaatgtgagtgaggagcaggccgatgccgttgaggaattgaaagggctgtctgctggggaaactttacaatctgttcccaaggttgataaaagcccttcaaataaagatcaagatataatctcgagggaggatttaaaagaagaattcactaaatttggcacagtgcgggtcaagctgaaaaggattattggagtgcaattcggggcgttcaggagaaatataaagatagccgaaacaacagaggacgggactggaagaacaaccgaggcggaaagcagtttggcggtgggaagcggggtcgccacttcgactcccgtgacagggcctccaataaagctcagaaagtttagatgcaggatatagatttaatctccatatataatgaggaaaacattattttgcgcttcttcagtttgcatcgtggaattgtcatttgttttttatgtttattttctctttgtgaatgttggcctgcactttgaagagcaatctatgaaccacgaggcatgcagcatgctgataatggaaggggcttggctccctctatggttgttcaagtatattgtactattactcattagttatactaattctaaaagtcatagtaaaataacggcttagttactaaggtaatacaattttctattgtattgttctcaaattattttttattgtttaattctacatgagtaagtaaaataaatataatgtaaatcattatttttgtaaacaatatcttattttatctttagtttaaataattaatatttgtctaaaataaaaaataaaaaaaa

SEQ ID NO: 17374 - DNA, 1918 bp, Zea Mays
ttcgtaattaaaaggcacgctccaaacaaactgtacctatggctgacaatgagcctcaaattttacactataaaacttaagggtcgaatcggattaggatcggactttatttttattcatttttgaactataaataagttagggccctatcaaattgtgaagagtcatttggatcgcgatccattaccacccctaactgtacccgccatcctcctagaaccctaacgccttcgttctaaaaaatctaaccatggcaaccgccgccgccgccgccgccccgcttgacgacgccaaggccaagaatgttatacgccaggtggagttctattttagtgacagcaacctcccccgcgatgggttcctacgcaggactgtcgaggaaagcgaggatggattggtgagcttggctctcatctgttccttctcgcggatgaggtcacacctaggtctcgaaggggatgcgaaaccagaaacagtgccagaggagaccgtgcttgcagttgccgacatcttgcgccgttccacagcgctccgcgtatcagaggatgggaagaaagttggtaggtctaaggagttgtcgaagccagatgaggttatagagcaagtggactccaggacagttgctgcatcaccgcttccttacaatgtaaatagtgtgaggctacctcgacatgtttctgacaaaaggcatttctgtggcactgctttagttgaattttcagaagaagatgaggcaaaaggcgtttttgagaaaaatctcatttttgctggggcagacctggaaataagaccaaagaaagaatttgatactgaaagagaggcaaagaaagaagcatatgagaagtcacatcctaataagagcagtcatggtgaaggctatccaaaaggtctgattctggccttcaagctgaagaaaactgcagatgatgagaaatccagtgtagagaatgatgagaagatcactgagaataaaggcaatgtgagtgaggagcaggccgatgccgttgaggaattgaaagggctgtctgctggggaaactttacaatctgttcccaaggttgataaaagcccttcaaataaagatcaagatataatctcgagggaggatttaaaagaagaattcactaaatttggcacagtgcggtatgtggacttcagcattggggaagattctggattcattcggtttgaggatcctgcagcagctgacaaggcccgtgcatttgcagccattgcagatgaaggtggtttgactatgaaaggccacatagtcattttggaacctgtgtctggtcaagctgaaaaggattattggagtgcaattcggggcgttcaggagaaatataaagatagccgaaacaacagaggacgggactggaagaacaaccgaggcggaaagcagtttggcggtgggaagcggggtcgccacttcgactcccgtgacagggcctccaataaagctcagaaagtttagatgcaggatatagatttaatctccatatataatgaggaaaacattattttgcgcttcttcagtttgcatcgtggaattgtcatttgttttttatgtttattttctctttgtgaatgttggcctgcactttgaagagcaatctatgaaccacgaggcatgcagcatgctgataatggaaggggcttggctccctctatggttgttcaagtatattgtactattactcattagttatactaattctaaaagtcatagtaaaataacggcttagttactaaggtaatacaattttctattgtattgttctcaaattattttttattgtttaattctacatgagtaagtaaaataaatataatgtaaatcattatttttgtaaacaatatcttattttatctttagtttaaataattaatatttgtctaaaataaaaaataaaaaaaa

SEQ ID NO: 17375 - DNA, 1963 bp, Zea Mays
ttcgtaattaaaaggcacgctccaaacaaactgtacctatggctgacaatgagcctcaaattttacactataaaacttaagggtcgaatcggattaggatcggactttatttttattcatttttgaactataaataagttagggccctatcaaattgtgaagagtcatttggatcgcgatccattaccacccctaactgtacccgccatcctcctagaaccctaacgccttcgttctaaaaaatctaaccatggcaaccgccgccgccgccgccgccccgcttgacgacgccaaggccaagaatgttatacgccaggtggagttctattttagtgacagcaacctcccccgcgatgggttcctacgcaggactgtcgaggaaagcgaggatggattggtgagcttggctctcatctgttccttctcgcggatgaggtcacacctaggtctcgaaggggatgcgaaaccagaaacagtgccagaggagaccgtgcttgcagttgccgacatcttgcgccgttccacagcgctccgcgtatcagaggatgggaagaaagttggtaggtctaaggagttgtcgaagccagatgaggttatagagcaagtggactccaggacagttgctgcatcaccgcttccttacaatgtaaaactggaggaagtcgaatctttttttgctcagtgtggcaaggtaaatagtgtgaggctacctcgacatgtttctgacaaaaggcatttctgtggcactgctttagttgaattttcagaagaagatgaggcaaaaggcgtttttgagaaaaatctcatttttgctggggcagacctggaaataagaccaaagaaagaatttgatactgaaagagaggcaaagaaagaagcatatgagaagtcacatcctaataagagcagtcatggtgaaggctatccaaaaggtctgattctggccttcaagctgaagaaaactgcagatgatgagaaatccagtgtagagaatgatgagaagatcactgagaataaaggcaatgtgagtgaggagcaggccgatgccgttgaggaattgaaagggctgtctgctggggaaactttacaatctgttcccaaggttgataaaagcccttcaaataaagatcaagatataatctcgagggaggatttaaaagaagaattcactaaatttggcacagtgcggtatgtggacttcagcattggggaagattctggattcattcggtttgaggatcctgcagcagctgacaaggcccgtgcatttgcagccattgcagatgaaggtggtttgactatgaaaggccacatagtcattttggaacctgtgtctggtcaagctgaaaaggattattggagtgcaattcggggcgttcaggagaaatataaagatagccgaaacaacagaggacgggactggaagaacaaccgaggcggaaagcagtttggcggtgggaagcggggtcgccacttcgactcccgtgacagggcctccaataaagctcagaaagtttagatgcaggatatagatttaatctccatatataatgaggaaaacattattttgcgcttcttcagtttgcatcgtggaattgtcatttgttttttatgtttattttctctttgtgaatgttggcctgcactttgaagagcaatctatgaaccacgaggcatgcagcatgctgataatggaaggggcttggctccctctatggttgttcaagtatattgtactattactcattagttatactaattctaaaagtcatagtaaaataacggcttagttactaaggtaatacaattttctattgtattgttctcaaattattttttattgtttaattctacatgagtaagtaaaataaatataatgtaaatcattatttttgtaaacaatatcttattttatctttagtttaaataattaatatttgtctaaaataaaaaataaaaaaaa

SEQ ID NO: 17376 - DNA, 2095 bp, Zea Mays
ttcgtaattaaaaggcacgctccaaacaaactgtacctatggctgacaatgagcctcaaattttacactataaaacttaagggtcgaatcggattaggatcggactttatttttattcatttttgaactataaataagttagggccctatcaaattgtgaagagtcatttggatcgcgatccattaccacccctaactgtacccgccatcctcctagaaccctaacgccttcgttctaaaaaatctaaccatggcaaccgccgccgccgccgccgccccgcttgacgacgccaaggccaagaatgttatacgccaggtggagttctattttagtgacagcaacctcccccgcgatgggttcctacgcaggactgtcgaggaaagcgaggatggattggtgagcttggctctcatctgttccttctcgcggatgaggtcacacctaggtctcgaaggggatgcgaaaccagaaacagtgccagaggagaccgtgcttgcagttgccgacatcttgcgccgttccacagcgctccgcgtatcagaggatgggaagaaagttggtaggtctaaggagttgtcgaagccagatgaggttatagagcaagtggactccaggacagttgctgcatcaccgcttccttacaatgtaaaactggaggaagtcgaatctttttttgctcagtgtggcaaggtaaatagtgtgaggctacctcgacatgtttctgacaaaaggcatttctgtggcactgctttagttgaattttcagaagaagatgaggcaaaaggcgtttttgagaaaaatctcatttttgctggggcagacctggaaataagaccaaagccactacgcactccccaaaaatattcttctagttgttgtattgattggttttggaaagaatttgatactgaaagagaggcaaagaaagaagcatatgagaagtcacatcctaataagagcagtcatggtgaaggctatccaaaaggtctgattctggccttcaagctgaagaaaactgcagatgatggtgagacaggaaaaagtggtgggggcaaagtagatgacactgaccttactaagaataatggagcttccgatgctacagagaaatccagtgtagagaatgatgagaagatcactgagaataaaggcaatgtgagtgaggagcaggccgatgccgttgaggaattgaaagggctgtctgctggggaaactttacaatctgttcccaaggttgataaaagcccttcaaataaagatcaagatataatctcgagggaggatttaaaagaagaattcactaaatttggcacagtgcggtatgtggacttcagcattggggaagattctggattcattcggtttgaggatcctgcagcagctgacaaggcccgtgcatttgcagccattgcagatgaaggtggtttgactatgaaaggccacatagtcattttggaacctgtgtctggtcaagctgaaaaggattattggagtgcaattcggggcgttcaggagaaatataaagatagccgaaacaacagaggacgggactggaagaacaaccgaggcggaaagcagtttggcggtgggaagcggggtcgccacttcgactcccgtgacagggcctccaataaagctcagaaagtttagatgcaggatatagatttaatctccatatataatgaggaaaacattattttgcgcttcttcagtttgcatcgtggaattgtcatttgttttttatgtttattttctctttgtgaatgttggcctgcactttgaagagcaatctatgaaccacgaggcatgcagcatgctgataatggaaggggcttggctccctctatggttgttcaagtatattgtactattactcattagttatactaattctaaaagtcatagtaaaataacggcttagttactaaggtaatacaattttctattgtattgttctcaaattattttttattgtttaattctacatgagtaagtaaaataaatataatgtaaatcattatttttgtaaacaatatcttattttatctttagtttaaataattaatatttgtctaaaataaaaaataaaaaaaa

SEQ ID NO: 17377 - DNA, 1119 bp, Zea Mays
caagaatggcaggctatctggtagactgggatgcgatgcatcggtgctgatacaaggtaacggtaccgagaggacggatcctgcaaacctctcgcttggtgggttcaatgtcatcgatgcagcaaagaggttgcttgaagctgtgtgccctgcgactgtttcttgcagcgacattgtcgtcctcgccgcaagagatgctgttgtgtttactggaggaccggctgtgcctgtcgcgctgggaagacgagacggcctcgtctcgttggcatccaacgtccgaagaaacatcatcgacacgggcttctccgtggacgccatggcggccagcttcaccgccaaggggctcaccttggacgacctcgtcactctctcaggggggcacaccatcgggtcggcgcactgcaacacgttccgggagcggttccagcaggtggcgaacgggagcatgacgccggtcgacgggtcgatgaacgccgactacgcgaacgagctgatccaggcgtgctcggcgaacggcaccgtgccggcgggcacggccgccgtgggctgcgactccggctcggcgtccgtcttcgacaacacctacttcgcgaacctgctgggcgggcggggcctgctgcgcacggacgccgcgctggtgcagaacgcgacgacgagggccaaggtggcggagttcgcgcagagccaggacggcttcttcgcgagctgggccagctcgtacgccaggctcaccagcctcggcgtgaaggtcggcgccgacggcgaggtccggcggacctgctccagcgtcaacggctgacgagggggcgggggaggctgcagaaacttatgttgtagttgtagagcaaggaaaggtgaggtgaggtgtggtgtcggctagttcttgttcttggcccggcgatgcttcggtgggtgagcgaggtgttgccgtgtagccggcgtcaccgtttttagtgaaaggagcgaaaagaaaatgcagaaacctgtgtagatgacgtgcctgatctgcgtctgcaaccaagggcatagttcactcatgacgatggacactgtactttgacctgataaatgacatagcaagcgaggcgaacgtgcttacgcggttcactcggcagtacg

SEQ ID NO: 17378 - DNA, 1032 bp, Zea Mays
cctctcgcttggtgggttcaatgtcatcgatgcagcaaagaggttgcttgaagctgtgtgccctgcgactgtttcttgcagcgacattgtcgtcctcgccgcaagagatgctgttgtgtttactggaggaccggctgtgcctgtcgcgctgggaagacgagacggcctcgtctcgttggcatccaacgtccgaagaaacatcatcgacacgggcttctccgtggacgccatggcggccagcttcaccgccaaggggctcaccttggacgacctcgtcactctctcaggggggcacaccatcgggtcggcgcactgcaacacgttccgggagcggttccagcaggtggcgaacgggagcatgacgccggtcgacgggtcgatgaacgccgactacgcgaacgagctgatccaggcgtgctcggcgaacggcaccgtgccggcgggcacggccgccgtgggctgcgactccggctcggcgtccgtcttcgacaacacctacttcgcgaacctgctgggcgggcggggcctgctgcgcacggacgccgcgctggtgcagaacgcgacgacgagggccaaggtggcggagttcgcgcagagccaggacggcttcttcgcgagctgggccagctcgtacgccaggctcaccagcctcggcgtgaaggtcggcgccgacggcgaggtccggcggacctgctccagcgtcaacggctgacgagggggcgggggaggctgcagaaacttatgttgtagttgtagagcaaggaaaggtgaggtgaggtgtggtgtcggctagttcttgttcttggcccggcgatgcttcggtgggtgagcgaggtgttgccgtgtagccggcgtcaccgtttttagtgaaaggagcgaaaagaaaatgcagaaacctgtgtagatgacgtgcctgatctgcgtctgcaaccaagggcatagttcactcatgacgatggacactgtactttgacctgataaatgacatagcaagcgaggcgaacgtgcttacgcggttcactcggcagtacg

SEQ ID NO: 17379 - DNA, 1279 bp, Zea Mays
taacctgccgccgatgccgtgcaactttctccctctctactgtctactctacccctctcgctggtgtgtagtaactgctctcacgcggcaccggctgggccccgatgcttttaccacgacggctcggatttcctccagcttgggctagctgcctagctccagctccagacgcgggcgagcatgtggagggatgcgatgcatcggtgctgatacaaggtaacggtaccgagaggacggatcctgcaaacctctcgcttggtgggttcaatgtcatcgatgcagcaaagaggttgcttgaagctgtgtgccctgcgactgtttcttgcagcgacattgtcgtcctcgccgcaagagatgctgttgtgtttactggaggaccggctgtgcctgtcgcgctgggaagacgagacggcctcgtctcgttggcatccaacgtccgaagaaacatcatcgacacgggcttctccgtggacgccatggcggccagcttcaccgccaaggggctcaccttggacgacctcgtcactctctcaggggggcacaccatcgggtcggcgcactgcaacacgttccgggagcggttccagcaggtggcgaacgggagcatgacgccggtcgacgggtcgatgaacgccgactacgcgaacgagctgatccaggcgtgctcggcgaacggcaccgtgccggcgggcacggccgccgtgggctgcgactccggctcggcgtccgtcttcgacaacacctacttcgcgaacctgctgggcgggcggggcctgctgcgcacggacgccgcgctggtgcagaacgcgacgacgagggccaaggtggcggagttcgcgcagagccaggacggcttcttcgcgagctgggccagctcgtacgccaggctcaccagcctcggcgtgaaggtcggcgccgacggcgaggtccggcggacctgctccagcgtcaacggctgacgagggggcgggggaggctgcagaaacttatgttgtagttgtagagcaaggaaaggtgaggtgaggtgtggtgtcggctagttcttgttcttggcccggcgatgcttcggtgggtgagcgaggtgttgccgtgtagccggcgtcaccgtttttagtgaaaggagcgaaaagaaaatgcagaaacctgtgtagatgacgtgcctgatctgcgtctgcaaccaagggcatagttcactcatgacgatggacactgtactttgacctgataaatgacatagcaagcgaggcgaacgtgcttacgcggttcactcggcagtacg

SEQ ID NO: 17380 - DNA, 1202 bp, Zea Mays
tcactattttacacgaagcaacctaaataagccccttatatacaacccatccagcaggtgataccaggatccggcgcgcattcctcatttagcccacaaggcccacctatattatgggagtgagttactcgggtccattcttaaaaacctctgctcgggcctagggtttcctcccagtcgtcatcgcttggcgtccgcctcagcccgccgccaggagagccggctcggtcggttcgtcgaagatcccggatctgctctgtcacgaggtctttcggcgggtgttgtctcgcgaggtgtagcgagccaaggagagtttcgagaagctgaaatggctcctaaagctgctcctgccaagaagggtgatgccaagacccaggccttgaaggttgccaaggctgtgaagtctgggtcagtaaagaagaccaagaagatccgcacgtccgtgacatttcaccgccccaagaccctgaagaaggctagggaccccaagtacccaagaatcagcactaccggaaggaacaagcttgatcagtaccaaattctcaagtatcccctcaccacagaatcggcgatgaagaagattgaagataacaacactcttgtcttcattgtcgacctcaaggcagacaagaagaagatcaaggctgctgtcaagaagatgtatgacattcaggccaagaaggtcaacaccctgatcaggcctgatggaaagaagaaggcttacgtgaagcttatgcctgactatgatgctcttgatgtggccaacaaaatcggcatcatctaaagttaccgcgtcaggcatctgctgtgctctatttccatgtgaaaccagagtttttgtagctatggctcagtggctccatgaccatgtcttatgcacacttacgaatttgatatcatccaagtcacaggttgtgctcatcaatacttggatactatcacttattcgtattgggttggtctttggctctcacatttctttgtattgggttggtgttttgatctcacctttcttcgcattgggttggtctttggaaattggaactcggcctgatagctgttggagtatagtgtatggatctgcgttcataatgcgagcagcagcgcatggaaattggttacggcaattgtgcatgcaattttctcgaagtgtgccgtgatgtagccgcgctgcttgtacacgtgagcttttctcctattta

SEQ ID NO: 17381 - DNA, 3025 bp, Zea Mays
gtctcatcgtcttccttccaccagagagaatttcaatctcaatcttttggatttctctccgattcgttatcgtactccttcattcgtattcatggtactgttcgatttgatgattgatggaaccgggggggggggtgttatttcttccttctcgctgccgtacttttctcgttgtttgtttcttcctcggcctcgtacgacgcccccggcccgttcgtctttccgaggaaccctataccatcacatttatttttttactcccttcccggggcggcggatttattcactgtgccattgatgaacctttggaacctggtatatggcagcggcatcgtcaggaatctacccggatggatgcggatccgtagtccggcccctccatggtgtttttgaccagatctatttaccaaatcgcttcttcctctcctcgtttgtttttcttctttccctttcagggttaccgttgaagtctgaggagacctgatccacaagcaccgccgccgtgtgccagagatgagatgccatggaagagcaagaagacgcatggaattgtgacgccaaggagagcgaggcacaggagcacggtgacacggtcggccggcagatctgcagtggctgccgccgtctccgcacgatatctcgatcggatactgttgagatagctagccggccgccgttccattcatggtgcttgtactcgtccgatcgaattcctggccgcacacgccatttctttgacttttgtgctgccgctcgatcggtctaataaattaaggggctcgggcgatatgcattcctgaatttattttttttccttgcgcaaattaagtttatatatcggcgtttgatgttcataaagacggcataatttcactgaatagtgtgaaacaaattatagttccggaggttttgttgaattattgggctttgcaggatttatattgttttatacttcgattacctgggacaatgtaagctttattttttttctgtctttattatatgggcaagtaaaaagtcaagtcggctgtaaataatagcattgaaggtttcaaggtacgcgcaagcatggtccctggtgaaagttgtaggttggttaagaaataaatattttctggtatatgtagccaaagtttgcgttgggggtttctaaatttgaattcaacctacgaacttttcaccagcaggagtgttgatttttcacacacaagtattctataaaaaagaaaggccaagctagttgctgccagttcttttttactggacaaacgttgaactttcaactttttcctatgttgcaatattgcatgctttctttacaattagtaaagtctgatgttgcttttaaactgctcacttacaggcaaaagaatttttgttagttttccagttccaacatggcgctacaatggttaatggcagtgcatataaattttcaagtatataaagtcttaatccagcataggaataatcagggtaatacatatactctctttccattagcatgtaaaccacacttgcacatcaaagcttcctttttattttaaaaatatatgtaatgaagctagcgcaacatctgtttcatcatatatactcagggtgatacatatactctcttaatccattcccacttctgtttcatcatgtatgttagctcaatctgatcttatatctaataatatatctatgtagctatgcacctgcacatcaaagcgtccttttatttttaaaatatatgtaatgaagctagcgcaaggtggttatgtagaggtgtaaaaactccagccaaggcattattgcactaataagggggtgtttgggaacaaagtttttctgcagttttggaagaatactgcagtattctcaaatactgcagtattatatacataatggtgtttggcaagctgggtaaaatctctgttttcaaaactgaagtattgcaaatactatagttgttttaaggcattctaaacttagctctggacctcagttttcaaaactgcggtattataaactacggtattgtcataactaaagtatagtatagtatttcaaaaactgtggttttcaaaaactttgttcccaaacagggcctaacttgtttgtcacgtgataaaggatgcaaactgaaccagagcctacaggtatgttcctcctacactaatgtggcatatgaatgcgcccttagccagtactcctccgttccaaattaaaatttgttttattaattaatgggtttatacaatacttgatgtatttgttttatatatgtctaagttcatgttcatctatttgaatatagacataaaactaagagctaaaataactactattttagaacgaatgaagtatataattaccatgtaagaaattaaaacttgtgtgatcaagaaattaaaacaagagacggttttatttcaagttttgagtaatagtgcttgcttgattaaacttatctcttttactggtaatggttcattgatgatttgttcaattgtatatacattattttaggattcttgcaatcaagtcttttgaactttgatgatcaatagacaattgttgacgtaaggctgatgttagtgaatttatcctggcaaatacttgcatatttgttcgtttggattttatgctttcacataaattacctgaacttgttgatgtagtaaactacttgtagctgtgatcagaccatagacttagtacattacaacaatttaaaaattatttgaatgtaacaacctatgcatggcagaacgactgagcatgcatatagtgttagttcagcgtatggccttctatctgtttacttccttggagcagcttacacacataaagtcatttaaagtggagatgtatgatatatatgaacatatattttatttatttcggtcttcattttgtgacccgcatgaattttactgccttggtcccgaaaaatgcaactgtagctatttttggatcatatgttaaagtttgaccaagtttgtagaagatagtatcaataataggtatagctataaac

SEQ ID NO: 17382 - DNA, 2363 bp, Zea Mays
gtgctccgcctcccatgacctggctggagctggaccgggttctctaatttagatcgtctcatcgtcttccttccaccagagagaatttcaatctcaatcttttggatttctctccgattcgttatcgtactccttcattcgtattcatggtactgttcgatttgatgattgatggaaccgggggggggggtgttatttcttccttctcgctgccgtacttttctcgttgtttgtttcttcctcggcctcgtacgacgcccccggcccgttcgtctttccgaggaaccctataccatcacatttatttttttactcccttcccggggcggcggatttattcactgtgccattgatgaacctttggaacctggtatatggcagcggcatcgtcaggaatctacccggatggatgcggatccgtagtccggcccctccatggtgtttttgaccagatctatttaccaaatcgcttcttcctctcctcgtttgtttttcttctttccctttcagggttaccgttgaagtctgaggagacctgatccacaagcaccgccgccgtgtgccagagatgagatgccatggaagagcaagaagacgcatggaattgtgacgccaaggagagcgaggcacaggagcacggtgacacggtcggccggcagatctgcagtggctgccgccgtctccgcacgatatctcgatcggcaaaagaatttttgttagttttccagttccaacatggcgctacaatggttaatggcagtgcatataaattttcaagtatataaagtcttaatccagcataggaataatcagggtaatacatatactctctttccattagcatgtaaaccacacttgcacatcaaagcttcctttttattttaaaaatatatgtaatgaagctagcgcaacatctgtttcatcatatatactcagggtgatacatatactctcttaatccattcccacttctgtttcatcatgtatgttagctcaatctgatcttatatctaataatatatctatgtagctatgcacctgcacatcaaagcgtccttttatttttaaaatatatgtaatgaagctagcgcaaggtggttatgtagaggtgtaaaaactccagccaaggcattattgcactaataagggggtgtttgggaacaaagtttttctgcagttttggaagaatactgcagtattctcaaatactgcagtattatatacataatggtgtttggcaagctgggtaaaatctctgttttcaaaactgaagtattgcaaatactatagttgttttaaggcattctaaacttagctctggacctcagttttcaaaactgcggtattataaactacggtattgtcataactaaagtatagtatagtatttcaaaaactgtggttttcaaaaactttgttcccaaacagggcctaacttgtttgtcacgtgataaaggatgcaaactgaaccagagcctacaggtatgttcctcctacactaatgtggcatatgaatgcgcccttagccagtactcctccgttccaaattaaaatttgttttattaattaatgggtttatacaatacttgatgtatttgttttatatatgtctaagttcatgttcatctatttgaatatagacataaaactaagagctaaaataactactattttagaacgaatgaagtatataattaccatgtaagaaattaaaacttgtgtgatcaagaaattaaaacaagagacggttttatttcaagttttgagtaatagtgcttgcttgattaaacttatctcttttactggtaatggttcattgatgatttgttcaattgtatatacattattttaggattcttgcaatcaagtcttttgaactttgatgatcaatagacaattgttgacgtaaggctgatgttagtgaatttatcctggcaaatacttgcatatttgttcgtttggattttatgctttcacataaattacctgaacttgttgatgtagtaaactacttgtagctgtgatcagaccatagacttagtacattacaacaatttaaaaattatttgaatgtaacaacctatgcatggcagaacgactgagcatgcatatagtgttagttcagcgtatggccttctatctgtttacttccttggagcagcttacacacataaagtcatttaaagtggagatgtatgatatatatgaacatatattttatttatttcggtcttcattttgtgacccgcatgaattttactgccttggtcccgaaaaatgcaactgtagctatttttggatcatatgttaaagtttgaccaagtttgtagaagatagtatcaataataggtatagctataaac

SEQ ID NO: 17383 - DNA, 2960 bp, Zea Mays
cgatcgcccaggccgcgcaccccgcccgtcgtagtactgtcagtcatatcatagcaccccgctcagatttccacaacccaaatctacccacctcctcagacctcactccactcaccgttgccaaaagctcccacccacctctcatgggcagggttcatgtcacggcagccggccgcccgcccgcccgcgttcggcggcgcgcatgcagcatacaccgccccaggcccgatcgatggaggggaggggagcgcccgcgagaaccctaaaaagcctccgctcaacctctatgctggatgggatcagctggacggaggcctggagcgtccagcactccagcctgccacacgcctgggctggggcccacctccccgctataaagcggagccgccgggttaccgttgaagtctgaggagacctgatccacaagcaccgccgccgtgtgccagagatgagatgccatggaagagcaagaagacgcatggaattgtgacgccaaggagagcgaggcacaggagcacggtgacacggtcggccggcagatctgcagtggctgccgccgtctccgcacgatatctcgatcggatactgttgagatagctagccggccgccgttccattcatggtgcttgtactcgtccgatcgaattcctggccgcacacgccatttctttgacttttgtgctgccgctcgatcggtctaataaattaaggggctcgggcgatatgcattcctgaatttattttttttccttgcgcaaattaagtttatatatcggcgtttgatgttcataaagacggcataatttcactgaatagtgtgaaacaaattatagttccggaggttttgttgaattattgggctttgcaggatttatattgttttatacttcgattacctgggacaatgtaagctttattttttttctgtctttattatatgggcaagtaaaaagtcaagtcggctgtaaataatagcattgaaggtttcaaggtacgcgcaagcatggtccctggtgaaagttgtaggttggttaagaaataaatattttctggtatatgtagccaaagtttgcgttgggggtttctaaatttgaattcaacctacgaacttttcaccagcaggagtgttgatttttcacacacaagtattctataaaaaagaaaggccaagctagttgctgccagttcttttttactggacaaacgttgaactttcaactttttcctatgttgcaatattgcatgctttctttacaattagtaaagtctgatgttgcttttaaactgctcacttacaggcaaaagaatttttgttagttttccagttccaacatggcgctacaatggttaatggcagtgcatataaattttcaagtatataaagtcttaatccagcataggaataatcagggtaatacatatactctctttccattagcatgtaaaccacacttgcacatcaaagcttcctttttattttaaaaatatatgtaatgaagctagcgcaacatctgtttcatcatatatactcagggtgatacatatactctcttaatccattcccacttctgtttcatcatgtatgttagctcaatctgatcttatatctaataatatatctatgtagctatgcacctgcacatcaaagcgtccttttatttttaaaatatatgtaatgaagctagcgcaaggtggttatgtagaggtgtaaaaactccagccaaggcattattgcactaataagggggtgtttgggaacaaagtttttctgcagttttggaagaatactgcagtattctcaaatactgcagtattatatacataatggtgtttggcaagctgggtaaaatctctgttttcaaaactgaagtattgcaaatactatagttgttttaaggcattctaaacttagctctggacctcagttttcaaaactgcggtattataaactacggtattgtcataactaaagtatagtatagtatttcaaaaactgtggttttcaaaaactttgttcccaaacagggcctaacttgtttgtcacgtgataaaggatgcaaactgaaccagagcctacaggtatgttcctcctacactaatgtggcatatgaatgcgcccttagccagtactcctccgttccaaattaaaatttgttttattaattaatgggtttatacaatacttgatgtatttgttttatatatgtctaagttcatgttcatctatttgaatatagacataaaactaagagctaaaataactactattttagaacgaatgaagtatataattaccatgtaagaaattaaaacttgtgtgatcaagaaattaaaacaagagacggttttatttcaagttttgagtaatagtgcttgcttgattaaacttatctcttttactggtaatggttcattgatgatttgttcaattgtatatacattattttaggattcttgcaatcaagtcttttgaactttgatgatcaatagacaattgttgacgtaaggctgatgttagtgaatttatcctggcaaatacttgcatatttgttcgtttggattttatgctttcacataaattacctgaacttgttgatgtagtaaactacttgtagctgtgatcagaccatagacttagtacattacaacaatttaaaaattatttgaatgtaacaacctatgcatggcagaacgactgagcatgcatatagtgttagttcagcgtatggccttctatctgtttacttccttggagcagcttacacacataaagtcatttaaagtggagatgtatgatatatatgaacatatattttatttatttcggtcttcattttgtgacccgcatgaattttactgccttggtcccgaaaaatgcaactgtagctatttttggatcatatgttaaagtttgaccaagtttgtagaagatagtatcaataataggtatagctataaac

SEQ ID NO: 17384 - DNA, 1679 bp, Zea Mays
gggtaggcatgccgctgcttcaccaccggcctcggcctcggtgccggcgccgatcgcccaggccgcgcaccccgcccgtcgtagtactgtcagtcatatcatagcaccccgctcagatttccacaacccaaatctacccacctcctcagacctcactccactcaccgttgccaaaagctcccacccacctctcatgggcagggttcatgtcacggcagccggccgcccgcccgcccgcgttcggcggcgcgcatgcagcatacaccgccccaggcccgatcgatggaggggaggggagcgcccgcgagaaccctaaaaagcctccgctcaacctctatgctggatgggatcagctggacggaggcctggagcgtccagcactccagcctgccacacgcctgggctggggcccacctccccgctataaagcggagccgccgggttaccgttgaagtctgaggagacctgatccacaagcaccgccgccgtgtgccagagatgagatgccatggaagagcaagaagacgcatggaattgtgacgccaaggagagcgaggcacaggagcacggtgacacggtcggccggcagatctgcagtggctgccgccgtctccgcacgatatctcgatcggcaaaagaatttttgttagttttccagttccaacatggcgctacaatggttaatggcagtgcatataaattttcaagtatataaagtcttaatccagcataggaataatcaggggcctaacttgtttgtcacgtgataaaggatgcaaactgaaccagagcctacaggtatgttcctcctacactaatgtggcatatgaatgcgcccttagccagtactcctccgttccaaattaaaatttgttttattaattaatgggtttatacaatacttgatgtatttgttttatatatgtctaagttcatgttcatctatttgaatatagacataaaactaagagctaaaataactactattttagaacgaatgaagtatataattaccatgtaagaaattaaaacttgtgtgatcaagaaattaaaacaagagacggttttatttcaagttttgagtaatagtgcttgcttgattaaacttatctcttttactggtaatggttcattgatgatttgttcaattgtatatacattattttaggattcttgcaatcaagtcttttgaactttgatgatcaatagacaattgttgacgtaaggctgatgttagtgaatttatcctggcaaatacttgcatatttgttcgtttggattttatgctttcacataaattacctgaacttgttgatgtagtaaactacttgtagctgtgatcagaccatagacttagtacattacaacaatttaaaaattatttgaatgtaacaacctatgcatggcagaacgactgagcatgcatatagtgttagttcagcgtatggccttctatctgtttacttccttggagcagcttacacacataaagtcatttaaagtggagatgtatgatatatatgaacatatattttatttatttcggtcttcattttgtgacccgcatgaattttactgccttggtcccgaaaaatgcaactgtagctatttttggatcatatgttaaagtttgaccaagtttgtagaagatagtatcaataataggtatagctataaac

SEQ ID NO: 17385 - DNA, 2408 bp, Zea Mays
aagaaatccacggggtaggcatgccgctgcttcaccaccggcctcggcctcggtgccggcgccgatcgcccaggccgcgcaccccgcccgtcgtagtactgtcagtcatatcatagcaccccgctcagatttccacaacccaaatctacccacctcctcagacctcactccactcaccgttgccaaaagctcccacccacctctcatgggcagggttcatgtcacggcagccggccgcccgcccgcccgcgttcggcggcgcgcatgcagcatacaccgccccaggcccgatcgatggaggggaggggagcgcccgcgagaaccctaaaaagcctccgctcaacctctatgctggatgggatcagctggacggaggcctggagcgtccagcactccagcctgccacacgcctgggctggggcccacctccccgctataaagcggagccgccgggttaccgttgaagtctgaggagacctgatccacaagcaccgccgccgtgtgccagagatgagatgccatggaagagcaagaagacgcatggaattgtgacgccaaggagagcgaggcacaggagcacggtgacacggtcggccggcagatctgcagtggctgccgccgtctccgcacgatatctcgatcggatactgttgagatagctagccggccgccgttccattcatggtgcttgtactcgtccgatcgaattcctggccgcacacgccatttctttgacttttgtgctgccgctcgatcggtctaataaattaaggggctcgggcgatatgcattcctgaatttattttttttccttgcgcaaattaagtttatatatcggcgtttgatgttcataaagacggcataatttcactgaatagtgtgaaacaaattatagttccggaggttttgttgaattattgggctttgcaggatttatattgttttatacttcgattacctgggacaatgtaagctttattttttttctgtctttattatatgggcaagtaaaaagtcaagtcggctgtaaataatagcattgaaggtttcaaggtacgcgcaagcatggtccctggtgaaagttgtaggttggttaagaaataaatattttctggtatatgtagccaaagtttgcgttgggggtttctaaatttgaattcaacctacgaacttttcaccagcaggagtgttgatttttcacacacaagtattctataaaaaagaaaggccaagctagttgctgccagttcttttttactggacaaacgttgaactttcaactttttcctatgttgcaatattgcatgctttctttacaattagtaaagtctgatgttgcttttaaactgctcacttacaggcaaaagaatttttgttagttttccagttccaacatggcgctacaatggttaatggcagtgcatataaattttcaagtatataaagtcttaatccagcataggaataatcaggggcctaacttgtttgtcacgtgataaaggatgcaaactgaaccagagcctacaggtatgttcctcctacactaatgtggcatatgaatgcgcccttagccagtactcctccgttccaaattaaaatttgttttattaattaatgggtttatacaatacttgatgtatttgttttatatatgtctaagttcatgttcatctatttgaatatagacataaaactaagagctaaaataactactattttagaacgaatgaagtatataattaccatgtaagaaattaaaacttgtgtgatcaagaaattaaaacaagagacggttttatttcaagttttgagtaatagtgcttgcttgattaaacttatctcttttactggtaatggttcattgatgatttgttcaattgtatatacattattttaggattcttgcaatcaagtcttttgaactttgatgatcaatagacaattgttgacgtaaggctgatgttagtgaatttatcctggcaaatacttgcatatttgttcgtttggattttatgctttcacataaattacctgaacttgttgatgtagtaaactacttgtagctgtgatcagaccatagacttagtacattacaacaatttaaaaattatttgaatgtaacaacctatgcatggcagaacgactgagcatgcatatagtgttagttcagcgtatggccttctatctgtttacttccttggagcagcttacacacataaagtcatttaaagtggagatgtatgatatatatgaacatatattttatttatttcggtcttcattttgtgacccgcatgaattttactgccttggtcccgaaaaatgcaactgtagctatttttggatcatatgttaaagtttgaccaagtttgtagaagatagtatcaataataggtatagctataaac

SEQ ID NO: 17386 - DNA, 2285 bp, Zea Mays
aagagttgacagaaaggggtgctatttcttctgttattgagataatggcagccaaagggaaactttctgaaaagcctgtttctgacgagtcaccacaggaaacttcaaaggtagaccaaaatgtcaattgcctaggccaagaaggtagtagtccaaacagtactccgacaaccgccattagcaatggtgctgctccagttgacaatgtcaaatctccagatggaccagattcttcaaaacagaagcaagaactgacttctggtgacgagcagacaccagattcttctaaacagaagcaagaactgacttctggtgatgagcagacaccagattcttctaaacagaagccagaactgacttctcttgacaagcagaccaaaagttctgagcaattgatatcttgtgaccaagaagtacgagaaccagtgactgttgaaactgaaaagctatctgatgtcaattcaaagaaagatcacaagctttgttcttccattggatctgagatggctgaacaatcaaaggttgttaaagacaatgagagtatagtagcatctgaggagttatccccagggacaaatgatgttgataaaaagcagataacagagaccggcaatataactactgaggaatcatcaaaaccaagtgatactaagcctgctgtggttaagccaaagagaggccgacctccagcagcaaagtctcaggagaaaaagcctgctggaaagaaacatgcatcagacctaaaatctgcaaaacttgatcctatcactgattctggagggagagctacacggcacctgaataaagatgctgcgaagtcttcatcaaccaaggctgctgaaggagaatctgagaagaagcaacataaaaccagtatgaaattgcagaaagaagatgctgtctctgataaagacaccaatgaggatattagtttgaagtctttcacagtgacttgatcaattatcataattcaggaaatgatgtccccaacaaaaatcgataaatcaaaaggccaacaagaggataatggggcatcatcaaaaagaaaaagtttgcaggaagctcaagagacccctctatcaaagaaaaataaaatacttgatgaaaaccttattggctcaagaatcaaagtttggtggccagatgacaaaatgttctatgcgggtgttgttgaatcattcgatgcctcttcaaagaagcacaaggtttcgtatgatgatggtgatgttgaggtactaatgcttaagaaggaaagatgggagttcatttctgaggaacaagacactgatcctgatgcggtatctaatatgccacgtggcagaaaagctaaggggagctcgggtccacaaatgaaaggagggaaaacaggaacacctcaaagtgatgttaagaatcctcccaagaagagagggcgtccaaaaggcatgcacgacagcaataatatgccaaatgctgatagctctgtgactccagccagactgaagggaaaaagtgttgagaaggatactcaagtgacacctaagactggcaataactccaagaaggaaggtgcaaggcactctcgatctactactggaaaagctcagaatgctgttgtcaaggcaagcagcaaggatgaacctgatagcaccgacaactcaaaagatgatgctggtagtgaagacaagaattcaaaagatgaagtgaaatccagcgaaggtaacgatggatccaagaccaatggtctttcaaccaaaaggaagctagaggagaatgaaggtgagtcatcagaggagaagggttctgctaaaactactaccagaaagaagcgcagaagaaagagccgcaactagttgctcagaagctatgcagctcatcatcttaggggcgttccgcccttgcagtctaaagtctcaagttgctggcatgggacatgccatgtatgctttatattgcctggaccgttttaccagcttagcgctttggcaatttgggcatcatgagtcggctcgtagttgtagcagtcttaaactctcaataggagctataatgtttggtcttacttttctttttagaatctcgttgccaacggttgtgcctctggcaaaaatggatttgatgcttttgctctgcttaaagcttttgtgccaaatcgtaatgcatttcgacttatcttctggcaaacaaaagtatgctcctgttatgaagcgaatgtttcagaagaaaagtagtctgagtttgtacttcctctgtttctttgtacttcttctgttttatattatatgttatttatttttgtaaagaag

SEQ ID NO: 17387 - DNA, 2261 bp, Zea Mays
ggctgcttttgtaagagttgacagaaaggggtgctatttcttctgttattgagataatggcagccaaagggaaactttctgaaaagcctgtttctgacgagtcaccacaggaaacttcaaaggtagaccaaaatgtcaattgcctaggccaagaaggtagtagtccaaacagtactccgacaaccgccattagcaatggtgctgctccagttgacaatgtcaaatctccagatggaccagattcttcaaaacagaagcaagaactgacttctggtgacgagcagacaccagattcttctaaacagaagcaagaactgacttctggtgatgagcagacaccagattcttctaaacagaagccagaactgacttctcttgacaagcagaccaaaagttctgagcaattgatatcttgtgaccaagaagtacgagaaccagtgactgttgaaactgaaaagctatctgatgtcaattcaaagaaagatcacaagctttgttcttccattggatctgagatggctgaacaatcaaaggttgttaaagacaatgagagtatagtagcatctgaggagttatccccagggacaaatgatgttgataaaaagcagataacagagaccggcaatataactactgaggaatcatcaaaaccaagtgatactaagcctgctgtggttaagccaaagagaggccgacctccagcagcaaagtctcaggagaaaaagcctgctggaaagaaacatgcatcagacctaaaatctgcaaaacttgatcctatcactgattctggagggagagctacacggcacctgaataaagatgctgcgaagtcttcatcaaccaaggctgctgaaggagaatctgagaagaagcaacataaaaccagtatgaaattgcagaaagaagatgctgtctctgataaagacaccaatgaggatattagtttgaaggaaatgatgtccccaacaaaaatcgataaatcaaaaggccaacaagaggataatggggcatcatcaaaaagaaaaagtttgcaggaagctcaagagacccctctatcaaagaaaaataaaatacttgatgaaaaccttattggctcaagaatcaaagtttggtggccagatgacaaaatgttctatgcgggtgttgttgaatcattcgatgcctcttcaaagaagcacaaggtttcgtatgatgatggtgatgttgaggtactaatgcttaagaaggaaagatgggagttcatttctgaggaacaagacactgatcctgatgcggtatctaatatgccacgtggcagaaaagctaaggggagctcgggtccacaaatgaaaggagggaaaacaggaacacctcaaagtgatgttaagaatcctcccaagaagagagggcgtccaaaaggcatgcacgacagcaataatatgccaaatgctgatagctctgtgactccagccagactgaagggaaaaagtgttgagaaggatactcaagtgacacctaagactggcaataactccaagaaggaaggtgcaaggcactctcgatctactactggaaaagctcagaatgctgttgtcaaggcaagcagcaaggatgaacctgatagcaccgacaactcaaaagatgatgctggtagtgaagacaagaattcaaaagatgaagtgaaatccagcgaaggtaacgatggatccaagaccaatggtctttcaaccaaaaggaagctagaggagaatgaaggtgagtcatcagaggagaagggttctgctaaaactactaccagaaagaagcgcagaagaaagagccgcaactagttgctcagaagctatgcagctcatcatcttaggggcgttccgcccttgcagtctaaagtctcaagttgctggcatgggacatgccatgtatgctttatattgcctggaccgttttaccagcttagcgctttggcaatttgggcatcatgagtcggctcgtagttgtagcagtcttaaactctcaataggagctataatgtttggtcttacttttctttttagaatctcgttgccaacggttgtgcctctggcaaaaatggatttgatgcttttgctctgcttaaagcttttgtgccaaatcgtaatgcatttcgacttatcttctggcaaacaaaagtatgctcctgttatgaagcgaatgtttcagaagaaaagtagtctgagtttgtacttcctctgtttctttgtacttcttctgttttatattatatgttatttatttttgtaaagaag

SEQ ID NO: 17388 - DNA, 3296 bp, Zea Mays
gccagcgtgatctgtctcatcgcagttgctgtagccggtatttttggtaaactggttgaaggggcctcaacagctcagcccctgctcaacctcagccaacccgggatgttcccgttgcacgattcgaacggcggcgaatcgcgtaaaattggaaggagggagaggtcgagtgcgaacgccacctcctcgccgccgctgccgccaccacaggcgtgtcatcggctataaaaccctacccctgctagtcttcccgtcgccaccagcctcctcgccgaaaccctaaacccttctccccgttaggtttgcccgcgcgccccgacgatggcggaggacgcaccgcctgcagctcctgcgatgacgccggaggaagtgcaggctgagaccgagttgcggatgcgcgacataggccagcgctttggcgctatcccggaggaccacgacgagctgctccgtttactcgaggaagccgaaacctggctgtccagggtggatcaatctccgcccgagggcatgtacaatgctcttcgccccaccatggctgttttgattacaaatgagctactggagcaccctgatcccaacgtgaaggttgctctcacctcttgcttaactgaagttaccaggattactgcgccagaggccccctatgacgatgatgttatgaaggatgtgtttaagagaattgtggagacttttgctgagttggatgacatgaacaacccctcctttgcaaggagggtttcaatccttgattctgttgcaagggttcgttgttgtgttctgatgttggatcttgacttggaccatatgatactggacatgttccgtcatttcttcaaaactgcctcgagagcgatgatgtccatgctgaactggcatcgtgcctgcttcagaaccttacaagagaagcacaagaaactctcccagcatcttttggacttgcagagagggtactaggcctatgtagggacaagctcaaaccagtgcttcatgagttacttaagggaactcctttggatgaatacagcaacgttgttacgacgttgttccaagatgctggagaaaacaatgttgatgcatcaggagaagacatggcagccaaagggaaactttctgaaaagcctgtttctgacgagtcaccacaggaaacttcaaaggtagaccaaaatgtcaattgcctaggccaagaaggtagtagtccaaacagtactccgacaaccgccattagcaatggtgctgctccagttgacaatgtcaaatctccagatggaccagattcttcaaaacagaagcaagaactgacttctggtgacgagcagacaccagattcttctaaacagaagcaagaactgacttctggtgatgagcagacaccagattcttctaaacagaagccagaactgacttctcttgacaagcagaccaaaagttctgagcaattgatatcttgtgaccaagaagtacgagaaccagtgactgttgaaactgaaaagctatctgatgtcaattcaaagaaagatcacaagctttgttcttccattggatctgagatggctgaacaatcaaaggttgttaaagacaatgagagtatagtagcatctgaggagttatccccagggacaaatgatgttgataaaaagcagataacagagaccggcaatataactactgaggaatcatcaaaaccaagtgatactaagcctgctgtggttaagccaaagagaggccgacctccagcagcaaagtctcaggagaaaaagcctgctggaaagaaacatgcatcagacctaaaatctgcaaaacttgatcctatcactgattctggagggagagctacacggcacctgaataaagatgctgcgaagtcttcatcaaccaaggctgctgaaggagaatctgagaagaagcaacataaaaccagtatgaaattgcagaaagaagatgctgtctctgataaagacaccaatgaggatattagtttgaaggaaatgatgtccccaacaaaaatcgataaatcaaaaggccaacaagaggataatggggcatcatcaaaaagaaaaagtttgcaggaagctcaagagacccctctatcaaagaaaaataaaatacttgatgaaaaccttattggctcaagaatcaaagtttggtggccagatgacaaaatgttctatgcgggtgttgttgaatcattcgatgcctcttcaaagaagcacaaggtttcgtatgatgatggtgatgttgaggtactaatgcttaagaaggaaagatgggagttcatttctgaggaacaagacactgatcctgatgcggtatctaatatgccacgtggcagaaaagctaaggggagctcgggtccacaaatgaaaggagggaaaacaggaacacctcaaagtgatgttaagaatcctcccaagaagagagggcgtccaaaaggcatgcacgacagcaataatatgccaaatgctgatagctctgtgactccagccagactgaagggaaaaagtgttgagaaggatactcaagtgacacctaagactggcaataactccaagaaggaaggtgcaaggcactctcgatctactactggaaaagctcagaatgctgttgtcaaggcaagcagcaaggatgaacctgatagcaccgacaactcaaaagatgatgctggtagtgaagacaagaattcaaaagatgaagtgaaatccagcgaaggtaacgatggatccaagaccaatggtctttcaaccaaaaggaagctagaggagaatgaaggtgagtcatcagaggagaagggttctgctaaaactactaccagaaagaagcgcagaagaaagagccgcaactagttgctcagaagctatgcagctcatcatcttaggggcgttccgcccttgcagtctaaagtctcaagttgctggcatgggacatgccatgtatgctttatattgcctggaccgttttaccagcttagcgctttggcaatttgggcatcatgagtcggctcgtagttgtagcagtcttaaactctcaataggagctataatgtttggtcttacttttctttttagaatctcgttgccaacggttgtgcctctggcaaaaatggatttgatgcttttgctctgcttaaagcttttgtgccaaatcgtaatgcatttcgacttatcttctggcaaacaaaagtatgctcctgttatgaagcgaatgtttcagaagaaaagtagtctgagtttgtacttcctctgtttctttgtacttcttctgttttatattatatgttatttatttttgtaaagaag

SEQ ID NO: 17389 - DNA, 3407 bp, Zea Mays
cgaagcttgaaccagccagcgtgatctgtctcatcgcagttgctgtagccggtatttttggtaaactggttgaaggggcctcaacagctcagcccctgctcaacctcagccaacccgggatgttcccgttgcacgattcgaacggcggcgaatcgcgtaaaattggaaggagggagaggtcgagtgcgaacgccacctcctcgccgccgctgccgccaccacaggcgtgtcatcggctataaaaccctacccctgctagtcttcccgtcgccaccagcctcctcgccgaaaccctaaacccttctccccgttaggtttgcccgcgcgccccgacgatggcggaggacgcaccgcctgcagctcctgcgatgacgccggaggaagtgcaggctgagaccgagttgcggatgcgcgacataggccagcgctttggcgctatcccggaggaccacgacgagctgctccgtttactcgaggaagccgaaacctggctgtccagggtggatcaatctccgcccgagggcatgtacaatgctcttcgccccaccatggctgttttgattacaaatgagctactggagcaccctgatcccaacgtgaaggttgctctcacctcttgcttaactgaagttaccaggattactgcgccagaggccccctatgacgatgatgttatgaaggatgtgtttaagagaattgtggagacttttgctgagttggatgacatgaacaacccctcctttgcaaggagggtttcaatccttgattctgttgcaagggttcgttgttgtgttctgatgttggatcttgacttggaccatatgatactggacatgttccgtcatttcttcaaaactgcctccaccaggcattcagaacaagtcacccactgtatggaaattataatgatgtttgtaattcaggagagcgatgatgtccatgctgaactggcatcgtgcctgcttcagaaccttacaagagaagcacaagaaactctcccagcatcttttggacttgcagagagggtactaggcctatgtagggacaagctcaaaccagtgcttcatgagttacttaagggaactcctttggatgaatacagcaacgttgttacgacgttgttccaagatgctggagaaaacaatgttgatgcatcaggagaagacatggcagccaaagggaaactttctgaaaagcctgtttctgacgagtcaccacaggaaacttcaaaggtagaccaaaatgtcaattgcctaggccaagaaggtagtagtccaaacagtactccgacaaccgccattagcaatggtgctgctccagttgacaatgtcaaatctccagatggaccagattcttcaaaacagaagcaagaactgacttctggtgacgagcagacaccagattcttctaaacagaagcaagaactgacttctggtgatgagcagacaccagattcttctaaacagaagccagaactgacttctcttgacaagcagaccaaaagttctgagcaattgatatcttgtgaccaagaagtacgagaaccagtgactgttgaaactgaaaagctatctgatgtcaattcaaagaaagatcacaagctttgttcttccattggatctgagatggctgaacaatcaaaggttgttaaagacaatgagagtatagtagcatctgaggagttatccccagggacaaatgatgttgataaaaagcagataacagagaccggcaatataactactgaggaatcatcaaaaccaagtgatactaagcctgctgtggttaagccaaagagaggccgacctccagcagcaaagtctcaggagaaaaagcctgctggaaagaaacatgcatcagacctaaaatctgcaaaacttgatcctatcactgattctggagggagagctacacggcacctgaataaagatgctgcgaagtcttcatcaaccaaggctgctgaaggagaatctgagaagaagcaacataaaaccagtatgaaattgcagaaagaagatgctgtctctgataaagacaccaatgaggatattagtttgaagtctttcacagtgacttgatcaattatcataattcaggaaatgatgtccccaacaaaaatcgataaatcaaaaggccaacaagaggataatggggcatcatcaaaaagaaaaagtttgcaggaagctcaagagacccctctatcaaagaaaaataaaatacttgatgaaaaccttattggctcaagaatcaaagtttggtggccagatgacaaaatgttctatgcgggtgttgttgaatcattcgatgcctcttcaaagaagcacaaggtttcgtatgatgatggtgatgttgaggtactaatgcttaagaaggaaagatgggagttcatttctgaggaacaagacactgatcctgatgcggtatctaatatgccacgtggcagaaaagctaaggggagctcgggtccacaaatgaaaggagggaaaacaggaacacctcaaagtgatgttaagaatcctcccaagaagagagggcgtccaaaaggcatgcacgacagcaataatatgccaaatgctgatagctctgtgactccagccagactgaagggaaaaagtgttgagaaggatactcaagtgacacctaagactggcaataactccaagaaggaaggtgcaaggcactctcgatctactactggaaaagctcagaatgctgttgtcaaggcaagcagcaaggatgaacctgatagcaccgacaactcaaaagatgatgctggtagtgaagacaagaattcaaaagatgaagtgaaatccagcgaaggtaacgatggatccaagaccaatggtctttcaaccaaaaggaagctagaggagaatgaaggtgagtcatcagaggagaagggttctgctaaaactactaccagaaagaagcgcagaagaaagagccgcaactagttgctcagaagctatgcagctcatcatcttaggggcgttccgcccttgcagtctaaagtctcaagttgctggcatgggacatgccatgtatgctttatattgcctggaccgttttaccagcttagcgctttggcaatttgggcatcatgagtcggctcgtagttgtagcagtcttaaactctcaataggagctataatgtttggtcttacttttctttttagaatctcgttgccaacggttgtgcctctggcaaaaatggatttgatgcttttgctctgcttaaagcttttgtgccaaatcgtaatgcatttcgacttatcttctggcaaacaaaagtatgctcctgttatgaagcgaatgtttcagaagaaaagtagtctgagtttgtacttcctctgtttctttgtacttcttctgttttatattatatgttatttatttttgtaaagaag

SEQ ID NO: 17390 - DNA, 3174 bp, Zea Mays
ctcgtcttcatcatcttctttattctgccatacatgagcactttctttcattctagtatgaaggaatgcttcgatggtgccacaagaggtttacaacttagggattatatagaccttgtgtttttggtggctatgatgctcaactttgtaacctaccaatcaggaagccgaaacctggctgtccagggtggatcaatctccgcccgagggcatgtacaatgctcttcgccccaccatggctgttttgattacaaatgagctactggagcaccctgatcccaacgtgaaggttgctctcacctcttgcttaactgaagttaccaggattactgcgccagaggccccctatgacgatgatgttatgaaggatgtgtttaagagaattgtggagacttttgctgagttggatgacatgaacaacccctcctttgcaaggagggtttcaatccttgattctgttgcaagggttcgttgttgtgttctgatgttggatcttgacttggaccatatgatactggacatgttccgtcatttcttcaaaactgcctccaccaggcattcagaacaagtcacccactgtatggaaattataatgatgtttgtaattcaggagagcgatgatgtccatgctgaactggcatcgtgcctgcttcagaaccttacaagagaagcacaagaaactctcccagcatcttttggacttgcagagagggtactaggcctatgtagggacaagctcaaaccagtgcttcatgagttacttaagggaactcctttggatgaatacagcaacgttgttacgacgttgttccaagatgctggagaaaacaatgttgatgcatcaggagaagacatgatacataatcaactgagaaaggctgcttttgtaagagttgacagaaaggggtgctatttcttctgttattgagataatggtaggagaggaacatgtgatctgtactgctattacaggcagccaaagggaaactttctgaaaagcctgtttctgacgagtcaccacaggaaacttcaaaggtagaccaaaatgtcaattgcctaggccaagaaggtagtagtccaaacagtactccgacaaccgccattagcaatggtgctgctccagttgacaatgtcaaatctccagatggaccagattcttcaaaacagaagcaagaactgacttctggtgacgagcagacaccagattcttctaaacagaagcaagaactgacttctggtgatgagcagacaccagattcttctaaacagaagccagaactgacttctcttgacaagcagaccaaaagttctgagcaattgatatcttgtgaccaagaagtacgagaaccagtgactgttgaaactgaaaagctatctgatgtcaattcaaagaaagatcacaagctttgttcttccattggatctgagatggctgaacaatcaaaggttgttaaagacaatgagagtatagtagcatctgaggagttatccccagggacaaatgatgttgataaaaagcagataacagagaccggcaatataactactgaggaatcatcaaaaccaagtgatactaagcctgctgtggttaagccaaagagaggccgacctccagcagcaaagtctcaggagaaaaagcctgctggaaagaaacatgcatcagacctaaaatctgcaaaacttgatcctatcactgattctggagggagagctacacggcacctgaataaagatgctgcgaagtcttcatcaaccaaggctgctgaaggagaatctgagaagaagcaacataaaaccagtatgaaattgcagaaagaagatgctgtctctgataaagacaccaatgaggatattagtttgaaggaaatgatgtccccaacaaaaatcgataaatcaaaaggccaacaagaggataatggggcatcatcaaaaagaaaaagtttgcaggaagctcaagagacccctctatcaaagaaaaataaaatacttgatgaaaaccttattggctcaagaatcaaagtttggtggccagatgacaaaatgttctatgcgggtgttgttgaatcattcgatgcctcttcaaagaagcacaaggtttcgtatgatgatggtgatgttgaggtactaatgcttaagaaggaaagatgggagttcatttctgaggaacaagacactgatcctgatgcggtatctaatatgccacgtggcagaaaagctaaggggagctcgggtccacaaatgaaaggagggaaaacaggaacacctcaaagtgatgttaagaatcctcccaagaagagagggcgtccaaaaggcatgcacgacagcaataatatgccaaatgctgatagctctgtgactccagccagactgaagggaaaaagtgttgagaaggatactcaagtgacacctaagactggcaataactccaagaaggaaggtgcaaggcactctcgatctactactggaaaagctcagaatgctgttgtcaaggcaagcagcaaggatgaacctgatagcaccgacaactcaaaagatgatgctggtagtgaagacaagaattcaaaagatgaagtgaaatccagcgaaggtaacgatggatccaagaccaatggtctttcaaccaaaaggaagctagaggagaatgaaggtgagtcatcagaggagaagggttctgctaaaactactaccagaaagaagcgcagaagaaagagccgcaactagttgctcagaagctatgcagctcatcatcttaggggcgttccgcccttgcagtctaaagtctcaagttgctggcatgggacatgccatgtatgctttatattgcctggaccgttttaccagcttagcgctttggcaatttgggcatcatgagtcggctcgtagttgtagcagtcttaaactctcaataggagctataatgtttggtcttacttttctttttagaatctcgttgccaacggttgtgcctctggcaaaaatggatttgatgcttttgctctgcttaaagcttttgtgccaaatcgtaatgcatttcgacttatcttctggcaaacaaaagtatgctcctgttatgaagcgaatgtttcagaagaaaagtagtctgagtttgtacttcctctgtttctttgtacttcttctgttttatattatatgttatttatttttgtaaagaag

SEQ ID NO: 17391 - DNA, 3094 bp, Zea Mays
ctcgtcttcatcatcttctttattctgccatacatgagcactttctttcattctagtatgaaggaatgcttcgatggtgccacaagaggtttacaacttagggattatatagaccttgtgtttttggtggctatgatgctcaactttgtaacctaccaatcaggaagccgaaacctggctgtccagggtggatcaatctccgcccgagggcatgtacaatgctcttcgccccaccatggctgttttgattacaaatgagctactggagcaccctgatcccaacgtgaaggttgctctcacctcttgcttaactgaagttaccaggattactgcgccagaggccccctatgacgatgatgttatgaaggatgtgtttaagagaattgtggagacttttgctgagttggatgacatgaacaacccctcctttgcaaggagggtttcaatccttgattctgttgcaagggttcgttgttgtgttctgatgttggatcttgacttggaccatatgatactggacatgttccgtcatttcttcaaaactgcctccaccaggcattcagaacaagtcacccactgtatggaaattataatgatgtttgtaattcaggagagcgatgatgtccatgctgaactggcatcgtgcctgcttcagaaccttacaagagaagcacaagaaactctcccagcatcttttggacttgcagagagggtactaggcctatgtagggacaagctcaaaccagtgcttcatgagttacttaagggaactcctttggatgaatacagcaacgttgttacgacgttgttccaagatgctggagaaaacaatgttgatgcatcaggagaagacatggcagccaaagggaaactttctgaaaagcctgtttctgacgagtcaccacaggaaacttcaaaggtagaccaaaatgtcaattgcctaggccaagaaggtagtagtccaaacagtactccgacaaccgccattagcaatggtgctgctccagttgacaatgtcaaatctccagatggaccagattcttcaaaacagaagcaagaactgacttctggtgacgagcagacaccagattcttctaaacagaagcaagaactgacttctggtgatgagcagacaccagattcttctaaacagaagccagaactgacttctcttgacaagcagaccaaaagttctgagcaattgatatcttgtgaccaagaagtacgagaaccagtgactgttgaaactgaaaagctatctgatgtcaattcaaagaaagatcacaagctttgttcttccattggatctgagatggctgaacaatcaaaggttgttaaagacaatgagagtatagtagcatctgaggagttatccccagggacaaatgatgttgataaaaagcagataacagagaccggcaatataactactgaggaatcatcaaaaccaagtgatactaagcctgctgtggttaagccaaagagaggccgacctccagcagcaaagtctcaggagaaaaagcctgctggaaagaaacatgcatcagacctaaaatctgcaaaacttgatcctatcactgattctggagggagagctacacggcacctgaataaagatgctgcgaagtcttcatcaaccaaggctgctgaaggagaatctgagaagaagcaacataaaaccagtatgaaattgcagaaagaagatgctgtctctgataaagacaccaatgaggatattagtttgaagtctttcacagtgacttgatcaattatcataattcaggaaatgatgtccccaacaaaaatcgataaatcaaaaggccaacaagaggataatggggcatcatcaaaaagaaaaagtttgcaggaagctcaagagacccctctatcaaagaaaaataaaatacttgatgaaaaccttattggctcaagaatcaaagtttggtggccagatgacaaaatgttctatgcgggtgttgttgaatcattcgatgcctcttcaaagaagcacaaggtttcgtatgatgatggtgatgttgaggtactaatgcttaagaaggaaagatgggagttcatttctgaggaacaagacactgatcctgatgcggtatctaatatgccacgtggcagaaaagctaaggggagctcgggtccacaaatgaaaggagggaaaacaggaacacctcaaagtgatgttaagaatcctcccaagaagagagggcgtccaaaaggcatgcacgacagcaataatatgccaaatgctgatagctctgtgactccagccagactgaagggaaaaagtgttgagaaggatactcaagtgacacctaagactggcaataactccaagaaggaaggtgcaaggcactctcgatctactactggaaaagctcagaatgctgttgtcaaggcaagcagcaaggatgaacctgatagcaccgacaactcaaaagatgatgctggtagtgaagacaagaattcaaaagatgaagtgaaatccagcgaaggtaacgatggatccaagaccaatggtctttcaaccaaaaggaagctagaggagaatgaaggtgagtcatcagaggagaagggttctgctaaaactactaccagaaagaagcgcagaagaaagagccgcaactagttgctcagaagctatgcagctcatcatcttaggggcgttccgcccttgcagtctaaagtctcaagttgctggcatgggacatgccatgtatgctttatattgcctggaccgttttaccagcttagcgctttggcaatttgggcatcatgagtcggctcgtagttgtagcagtcttaaactctcaataggagctataatgtttggtcttacttttctttttagaatctcgttgccaacggttgtgcctctggcaaaaatggatttgatgcttttgctctgcttaaagcttttgtgccaaatcgtaatgcatttcgacttatcttctggcaaacaaaagtatgctcctgttatgaagcgaatgtttcagaagaaaagtagtctgagtttgtacttcctctgtttctttgtacttcttctgttttatattatatgttatttatttttgtaaagaag

SEQ ID NO: 17392 - DNA, 3655 bp, Zea Mays
cgcacactagccacctataataggcatacatgatatcttccctaacaccgctggtccgccgccatccctcgtcttcatcatcttctttattctgccatacatgagcactttctttcattctagtatgaaggaatgcttcgatggtgccacaagaggtttacaacttagggattatatagaccttgtgtttttggtggctatgatgctcaactttgtaacctaccaatcagggatctaaaccgggtatcaaccctatctgccgccaagtttttccttgttgaattcgaagcttgaaccagccagcgtgatctgtctcatcgcagttgctgtagccggtatttttggtaaactggttgaaggggcctcaacagctcagcccctgctcaacctcagccaacccgggatgttcccgttgcacgattcgaacggcggcgaatcgcgtaaaattggaaggagggagaggtcgagtgcgaacgccacctcctcgccgccgctgccgccaccacaggcgtgtcatcggctataaaaccctacccctgctagtcttcccgtcgccaccagcctcctcgccgaaaccctaaacccttctccccgttaggtttgcccgcgcgccccgacgatggcggaggacgcaccgcctgcagctcctgcgatgacgccggaggaagtgcaggctgagaccgagttgcggatgcgcgacataggccagcgctttggcgctatcccggaggaccacgacgagctgctccgtttactcgaggaagccgaaacctggctgtccagggtggatcaatctccgcccgagggcatgtacaatgctcttcgccccaccatggctgttttgattacaaatgagctactggagcaccctgatcccaacgtgaaggttgctctcacctcttgcttaactgaagttaccaggattactgcgccagaggccccctatgacgatgatgttatgaaggatgtgtttaagagaattgtggagacttttgctgagttggatgacatgaacaacccctcctttgcaaggagggtttcaatccttgattctgttgcaagggttcgttgttgtgttctgatgttggatcttgacttggaccatatgatactggacatgttccgtcatttcttcaaaactgcctccaccaggcattcagaacaagtcacccactgtatggaaattataatgatgtttgtaattcaggagagcgatgatgtccatgctgaactggcatcgtgcctgcttcagaaccttacaagagaagcacaagaaactctcccagcatcttttggacttgcagagagggtactaggcctatgtagggacaagctcaaaccagtgcttcatgagttacttaagggaactcctttggatgaatacagcaacgttgttacgacgttgttccaagatgctggagaaaacaatgttgatgcatcaggagaagacatggcagccaaagggaaactttctgaaaagcctgtttctgacgagtcaccacaggaaacttcaaaggtagaccaaaatgtcaattgcctaggccaagaaggtagtagtccaaacagtactccgacaaccgccattagcaatggtgctgctccagttgacaatgtcaaatctccagatggaccagattcttcaaaacagaagcaagaactgacttctggtgacgagcagacaccagattcttctaaacagaagcaagaactgacttctggtgatgagcagacaccagattcttctaaacagaagccagaactgacttctcttgacaagcagaccaaaagttctgagcaattgatatcttgtgaccaagaagtacgagaaccagtgactgttgaaactgaaaagctatctgatgtcaattcaaagaaagatcacaagctttgttcttccattggatctgagatggctgaacaatcaaaggttgttaaagacaatgagagtatagtagcatctgaggagttatccccagggacaaatgatgttgataaaaagcagataacagagaccggcaatataactactgaggaatcatcaaaaccaagtgatactaagcctgctgtggttaagccaaagagaggccgacctccagcagcaaagtctcaggagaaaaagcctgctggaaagaaacatgcatcagacctaaaatctgcaaaacttgatcctatcactgattctggagggagagctacacggcacctgaataaagatgctgcgaagtcttcatcaaccaaggctgctgaaggagaatctgagaagaagcaacataaaaccagtatgaaattgcagaaagaagatgctgtctctgataaagacaccaatgaggatattagtttgaaggaaatgatgtccccaacaaaaatcgataaatcaaaaggccaacaagaggataatggggcatcatcaaaaagaaaaagtttgcaggaagctcaagagacccctctatcaaagaaaaataaaatacttgatgaaaaccttattggctcaagaatcaaagtttggtggccagatgacaaaatgttctatgcgggtgttgttgaatcattcgatgcctcttcaaagaagcacaaggtttcgtatgatgatggtgatgttgaggtactaatgcttaagaaggaaagatgggagttcatttctgaggaacaagacactgatcctgatgcggtatctaatatgccacgtggcagaaaagctaaggggagctcgggtccacaaatgaaaggagggaaaacaggaacacctcaaagtgatgttaagaatcctcccaagaagagagggcgtccaaaaggcatgcacgacagcaataatatgccaaatgctgatagctctgtgactccagccagactgaagggaaaaagtgttgagaaggatactcaagtgacacctaagactggcaataactccaagaaggaaggtgcaaggcactctcgatctactactggaaaagctcagaatgctgttgtcaaggcaagcagcaaggatgaacctgatagcaccgacaactcaaaagatgatgctggtagtgaagacaagaattcaaaagatgaagtgaaatccagcgaaggtaacgatggatccaagaccaatggtctttcaaccaaaaggaagctagaggagaatgaaggtgagtcatcagaggagaagggttctgctaaaactactaccagaaagaagcgcagaagaaagagccgcaactagttgctcagaagctatgcagctcatcatcttaggggcgttccgcccttgcagtctaaagtctcaagttgctggcatgggacatgccatgtatgctttatattgcctggaccgttttaccagcttagcgctttggcaatttgggcatcatgagtcggctcgtagttgtagcagtcttaaactctcaataggagctataatgtttggtcttacttttctttttagaatctcgttgccaacggttgtgcctctggcaaaaatggatttgatgcttttgctctgcttaaagcttttgtgccaaatcgtaatgcatttcgacttatcttctggcaaacaaaagtatgctcctgttatgaagcgaatgtttcagaagaaaagtagtctgagtttgtacttcctctgtttctttgtacttcttctgttttatattatatgttatttatttttgtaaagaag

SEQ ID NO: 17393 - DNA, 3125 bp, Zea Mays
cgcacactagccacctataataggcatacatgatatcttccctaacaccgctggtccgccgccatccctcgtcttcatcatcttctttattctgccatacatgagcactttctttcattctagtatgaaggaatgcttcgatggtgccacaagaggtttacaacttagggattatatagaccttgtgtttttggtggctatgatgctcaactttgtaacctaccaatcaggaagccgaaacctggctgtccagggtggatcaatctccgcccgagggcatgtacaatgctcttcgccccaccatggctgttttgattacaaatgagctactggagcaccctgatcccaacgtgaaggttgctctcacctcttgcttaactgaagttaccaggattactgcgccagaggccccctatgacgatgatgttatgaaggatgtgtttaagagaattgtggagacttttgctgagttggatgacatgaacaacccctcctttgcaaggagggtttcaatccttgattctgttgcaagggttcgttgttgtgttctgatgttggatcttgacttggaccatatgatactggacatgttccgtcatttcttcaaaactgcctccaccaggcattcagaacaagtcacccactgtatggaaattataatgatgtttgtaattcaggagagcgatgatgtccatgctgaactggcatcgtgcctgcttcagaaccttacaagagaagcacaagaaactctcccagcatcttttggacttgcagagagggtactaggcctatgtagggacaagctcaaaccagtgcttcatgagttacttaagggaactcctttggatgaatacagcaacgttgttacgacgttgttccaagatgctggagaaaacaatgttgatgcatcaggagaagacatggcagccaaagggaaactttctgaaaagcctgtttctgacgagtcaccacaggaaacttcaaaggtagaccaaaatgtcaattgcctaggccaagaaggtagtagtccaaacagtactccgacaaccgccattagcaatggtgctgctccagttgacaatgtcaaatctccagatggaccagattcttcaaaacagaagcaagaactgacttctggtgacgagcagacaccagattcttctaaacagaagcaagaactgacttctggtgatgagcagacaccagattcttctaaacagaagccagaactgacttctcttgacaagcagaccaaaagttctgagcaattgatatcttgtgaccaagaagtacgagaaccagtgactgttgaaactgaaaagctatctgatgtcaattcaaagaaagatcacaagctttgttcttccattggatctgagatggctgaacaatcaaaggttgttaaagacaatgagagtatagtagcatctgaggagttatccccagggacaaatgatgttgataaaaagcagataacagagaccggcaatataactactgaggaatcatcaaaaccaagtgatactaagcctgctgtggttaagccaaagagaggccgacctccagcagcaaagtctcaggagaaaaagcctgctggaaagaaacatgcatcagacctaaaatctgcaaaacttgatcctatcactgattctggagggagagctacacggcacctgaataaagatgctgcgaagtcttcatcaaccaaggctgctgaaggagaatctgagaagaagcaacataaaaccagtatgaaattgcagaaagaagatgctgtctctgataaagacaccaatgaggatattagtttgaaggaaatgatgtccccaacaaaaatcgataaatcaaaaggccaacaagaggataatggggcatcatcaaaaagaaaaagtttgcaggaagctcaagagacccctctatcaaagaaaaataaaatacttgatgaaaaccttattggctcaagaatcaaagtttggtggccagatgacaaaatgttctatgcgggtgttgttgaatcattcgatgcctcttcaaagaagcacaaggtttcgtatgatgatggtgatgttgaggtactaatgcttaagaaggaaagatgggagttcatttctgaggaacaagacactgatcctgatgcggtatctaatatgccacgtggcagaaaagctaaggggagctcgggtccacaaatgaaaggagggaaaacaggaacacctcaaagtgatgttaagaatcctcccaagaagagagggcgtccaaaaggcatgcacgacagcaataatatgccaaatgctgatagctctgtgactccagccagactgaagggaaaaagtgttgagaaggatactcaagtgacacctaagactggcaataactccaagaaggaaggtgcaaggcactctcgatctactactggaaaagctcagaatgctgttgtcaaggcaagcagcaaggatgaacctgatagcaccgacaactcaaaagatgatgctggtagtgaagacaagaattcaaaagatgaagtgaaatccagcgaaggtaacgatggatccaagaccaatggtctttcaaccaaaaggaagctagaggagaatgaaggtgagtcatcagaggagaagggttctgctaaaactactaccagaaagaagcgcagaagaaagagccgcaactagttgctcagaagctatgcagctcatcatcttaggggcgttccgcccttgcagtctaaagtctcaagttgctggcatgggacatgccatgtatgctttatattgcctggaccgttttaccagcttagcgctttggcaatttgggcatcatgagtcggctcgtagttgtagcagtcttaaactctcaataggagctataatgtttggtcttacttttctttttagaatctcgttgccaacggttgtgcctctggcaaaaatggatttgatgcttttgctctgcttaaagcttttgtgccaaatcgtaatgcatttcgacttatcttctggcaaacaaaagtatgctcctgttatgaagcgaatgtttcagaagaaaagtagtctgagtttgtacttcctctgtttctttgtacttcttctgttttatattatatgttatttatttttgtaaagaag

SEQ ID NO: 17394 - DNA, 706 bp, Zea Mays
ggtatgtgcacttccttccagccaggatttgctttccagcaacagcttgttccaggcatgaggcctgggggtcctcatatgccaaactattatgttccggttgtccaacagggccaacagggtccacgcccaggtattaggcgtggagctggagcccagggccagcaacctgtgccaccatttcagcagcagattcttccgcgaggacggatgtaccgttacccaactggtcgcaacatgcctgaagctccagcgatgccaggggttgctggaggtatgattcaggcatatgatatgggaggcttccctgtgagagatgctgccttatcaccggccgctcaaattgggactctgacttctgcccttgcaaatgctaatcctgagcagcaaagaacgatacttggtgaaaacctatacccactggttgagcaactggaaccaaaccaagctgcaaaggtcactggaatgcttttggagatggatcagaccgaggtcctccacctgctcgagtcccctgatgctctcaagtccaaggttgctgaggcgatggatgttctccgcaatgtggcccaccagcaaaacccaaacctcccgaccagtcagcttgccgcattatcactgaccgaaggcattatgtcctaacttgaaggccataacaaactatcttcagtttccaactcagtgcgggtgtttccagaggttgagt

SEQ ID NO: 17395 - DNA, 1751 bp, Zea Mays
cgagcgccgagcccactgttgctggcgcgagcaaaccctaggcgcgggcgccgaccgtctcctctctctctcctactataaccacctctccacccactagaaccccccctctcgtcgagagagtcgtccccccgcgtgctctccgcctgcggcctctgtatcccgcaaccaaaaactacccccaaaaaaagaagaaaaccccaaatcctcgagatctatcagtatcgagcgacttaccaatccgattgctagggtttagtttcgaaaaaatctgaaaaaaaattctggtcgaggggaggaggcgatgtcggcgcaagtggcggtggtgcctaatgggggcccgggcgctgtccccgcggtggtgtcgccgggagctgtcggcgtggctcagcctctcccgaccacgtcgctctacgtgggcgacctggagggggccgtctcggactcgcagctgtacgaactcttcagccaggcggggcaggtggtgtcggtgcgcgtctgcagggatgtcacctcgcgccgctcgctcggatacgcctacgtcaactacagcaatcccttggatgctgcgagagcattggaagtgctgaactttgctgctcttaacaacaagcctatccgggtgatgtattcaaaccgtgatccaagcagccgcaggagtggatctgctaacattttcataaaagtagctgtggatgaagcaggccaatccaaaggctttggttttgttcagtatgacaaagaagaagctgcgcagaacgctataaaaagtcttaacgggatgcttataaatgataagcctgtttttgttggaccttttgttcgcaagcaagaaagagatcattcttttgacaagacaaaatttaacaatgtctttgtgaaaaatttgtctgagtctaccacaaaggaagatttactcaaaatctttggtgaatatggggatattacaagtgctgttgtgatgattggtatggatggtaaatcaaggtgttttggtttcatcaattttgagaatccagatgcagcttcccatgctgttcaggaacttaatggtaagaagataaatgacaaagagtggtatgttggaagagctcagaagaagtcagaaagagagatggaactaaaaaggagatttgagcaaagcttgaaagatgctgctgacaaatatcaaggactgaacttatacctcaagaacttggatgatagcattggagatgatcaactttgtgaattgttctctaactttggcaaaattacttcgtacaaggtgatgcgtgaccaaaatggtcttagcaaaggctctggatttgttgctttctcaactcgtgaggaagcatctcaggctttaactgaaatgaatggcaaaatgatatctggaaaaccattgtatgttgcatttgcacagcgcaaagaagatagaaaagcgatgttgcaggtaactgttctcaaaccagttgaatttgtgtaatgcatttatgctaattcaaatgtgaaaatagacacaagtgtttactacacagttatgttgttcgtcagaacctagtactctttttggttgtaccgatctggttggtcgcccccagttggtctccatgaataatcctgtctttgctagatgataatcgtcagttgccttgcatacctgaatcaggtgatgcctctagtcggatatctctacttcctgcttgtttgtcgtcctggtgttctggttgtctgtcgcagacatgagacttggtgtatttctattatgc

SEQ ID NO: 17396 - DNA, 1679 bp, Zea Mays
gcggacccagtcctggagcaccatgcctaccaacgggccaaccagaccagacgctagtgctggcgccagctggtgcacgagcgccgagcccactgttgctggcgcgagcaaaccctaggcgcgggcgccgaccgtctcctctctctctcctactataaccacctctccacccactagaaccccccctctcgtcgagagagtcgtccccccgcgtgctctccgcctgcggcctctgtatcccgcaaccaaaaactacccccaaaaaaagaagaaaaccccaaatcctcgagatctatcagtatcgagcgacttaccaatccgattgctagggtttagtttcgaaaaaatctgaaaaaaaattctggtcgaggggaggaggcgatgtcggcgcaagtggcggtggtgcctaatgggggcccgggcgctgtccccgcggtggtgtcggtgcgcgtctgcagggatgtcacctcgcgccgctcgctcggatacgcctacgtcaactacagcaatcccttggatgctgcgagagcattggaagtgctgaactttgctgctcttaacaacaagcctatccgggtgatgtattcaaaccgtgatccaagcagccgcaggagtggatctgctaacattttcataaaaaatcttgacaagacaatagacaataaaacccttcatgagaccttttcttcatttggtaccattctctcgtgtaaggtagctgtggatgaagcaggccaatccaaaggctttggttttgttcagtatgacaaagaagaagctgcgcagaacgctataaaaagtcttaacgggatgcttataaatgataagcctgtttttgttggaccttttgttcgcaagcaagaaagagatcattcttttgacaagacaaaatttaacaatgtctttgtgaaaaatttgtctgagtctaccacaaaggaagatttactcaaaatctttggtgaatatggggatattacaagtgctgttgtgatgattggtatggatggtaaatcaaggtgttttggtttcatcaattttgagaatccagatgcagcttcccatgctgttcaggaacttaatggtaagaagataaatgacaaagagtggtatgttggaagagctcagaagaagtcagaaagagagatggaactaaaaaggagatttgagcaaagcttgaaagatgctgctgacaaatatcaaggactgaacttatacctcaagaacttggatgatagcattggagatgatcaactttgtgaattgttctctaactttggcaaaattacttcgtacaaggtgatgcgtgaccaaaatggtcttagcaaaggctctggatttgttgctttctcaactcgtgaggaagcatctcaggctttaactgaaatgaatggcaaaatgatatctggaaaaccattgtatgttgcatttgcacagcgcaaagaagatagaaaagcgatgttgcagaacctagtactctttttggttgtaccgatctggttggtcgcccccagttggtctccatgaataatcctgtctttgctagatgataatcgtcagttgccttgcatacctgaatcaggtgatgcctctagtcggatatctctacttcctgcttgtttgtcgtcctggtgttctggttgtctgtcgcagacatgagacttggtgtatttctattatgc

SEQ ID NO: 17397 - DNA, 1447 bp, Zea Mays
ccccgaaccggcaccgtctcctactctccttctctggtgcgggtctgcgggatgcacggccctgccatgccaacgccatccccgccggccgccgcatcaccacctacacccacctgaagaacgccgtaccaataaactctctcgggctcgatactttccccatctcccatcccatcctccgatttcccttcccacgccgtccccccaccccccagatcggcaaatccgcccgcacctgctctgcgcgcgtcgcgcgtcccggatggccatcgtctcctccgcccgactcgtggttccgtagcatgggccactccccctcttccctttccaaatccggcccctcctctccaccgcgccgcagcaggtcattctcccccatggcgccgccgcagcagctgctgctgaccgcgccgttgcaggtcgctgcggggggcagcggcagcgactcgtcctcctcgctgcacgtgctcctggccttgttgagcttcaccttgagaagctacaggttggcgaccgtgggcttgcggcgctttccgcctgtgccaatctggaagttctgttccttgtcaagacccctgagtgcactgattcaggcatcatcagtgttgccgagaagtgccacaaactccgcaaactgcatgtggatgggtggcgcacaaacaggattggggatttcggactcatggctgtggcacgaggatgtccagatctgcaggagctcgttttgataggggtcaaccccaccgtgctgagccttcggatgcttggtgagcactgccggttgctggaacggctggcactttgtgggtgtgaaactgtgggtgatgctgagatcatttgcttggctgagcgatgggctgcgctcaagaagctctgcatcaagggttgccctgtgtcagatcgtgggatggaagcactaaatggggggtgccccagtttagtcaaggtgaagctgaagagatgtcgtggagtgtcatacgagtgcattgagaacctgaaggttactaggggggagtcattttccatcagcttggatgttgtattggagcatgatgccgggagcactagtgaaaatggtgcacaagagaatggacagacacaaattacagagctggccggtcaaatgacaggcatggacctcctcaccaatgccgctggcacacaatcatcgattcataccattaacaggatgaggagtgtcatgtcagcgatccggcgattccatgcccataagaccaagattgattattcaaatgacggttgctgaaaaattctacatgactatattattactctattccataacaaagaaaagctagaacgatctttttgtcaaagggtacagcaaccaatgcgtttgctggcaaaaactggtggttgaaagggggattatgtacttatgctcatctcagcctatatgataaaatgtactgcgccctccttccct

SEQ ID NO: 17398 - DNA, 2174 bp, Zea Mays
ccccgaaccggcaccgtctcctactctccttctctggtgcgggtctgcgggatgcacggccctgccatgccaacgccatccccgccggccgccgcatcaccacctacacccacctgaagaacgccgtaccaataaactctctcgggctcgatactttccccatctcccatcccatcctccgatttcccttcccacgccgtccccccaccccccagatcggcaaatccgcccgcacctgctctgcgcgcgtcgcgcgtcccggatggccatcgtctcctccgcccgactcgtggttccgtagcatgggccactccccctcttccctttccaaatccggcccctcctctccaccgcgccgcagcaggtcattctcccccatggcgccgccgcagcagctgctgctgaccgcgccgttgcaggtcgctgcggggggcagcggcagcgactcgtcctcctcgttcgcgccccccgctcgggactacacccaggacctgcccgacgagatcctcgcgctggtattcgcgtcgctctcgcccaccgaccgcaacgcctgctccctcatctgctcccgatggatggaggtcgacgccaccacgcgccaccggctctccctcgacgcccgcgccgcgctggggaacgcggccaccgcgctgttctcgcggttcacggctgtcacgaagctcgcgctccgctgcgcgcgcgactcaggatcggacagcctctccgaccacggtgctgcggcgctggccgccgcgcttccctcggagcgcctagccaggctcaagctccgcggtctaaggcagctctccgacgccgggctagcctccctcgctgccggcgcgccagcgatccgcaagctctctattgcgtcctgcaccttcggacccagggcattcgtcgcggtgctccagtcgtgccccctcctcgaggacctctccgtcaagcgcctccgcagcgtagcagacacgtccggtgccgccagttccattgctgaggagatcaagtttccaccggctttatccctgcgttcggtttgcgtcaaggatctatataacgctctgtgctttgtgccgcttgtggcgtcctcaccgaacctccgctccctcaagatactgcggtgctccggcgcctgggacctgccattggaggtcatcgctgcacgtgctcctggccttgttgagcttcaccttgagaagctacaggttggcgaccgtgggcttgcggcgctttccgcctgtgccaatctggaagttctgttccttgtcaagacccctgagtgcactgattcaggcatcatcagtgttgccgagaagtgccacaaactccgcaaactgcatgtggatgggtggcgcacaaacaggattggggatttcggactcatggctgtggcacgaggatgtccagatctgcaggagctcgttttgataggggtcaaccccaccgtgctgagccttcggatgcttggtgagcactgccggttgctggaacggctggcactttgtgggtgtgaaactgtgggtgatgctgagatcatttgcttggctgagcgatgggctgcgctcaagaagctctgcatcaagggttgccctgtgtcagatcgtgggatggaagcactaaatggggggtgccccagtttagtcaaggtgaagctgaagagatgtcgtggagtgtcatacgagtgcattgagaacctgaaggttactaggggggagtcattttccatcagcttggatgttgtattggagcatgatgccgggagcactagtgaaaatggtgcacaagagaatggacagacacaaattacagagctggccggtcaaatgacaggcatggacctcctcaccaatgccgctggcacacaatcatcgattcataccattaacaggatgaggagtgtcatgtcagcgatccggcgtaggtttggcaatcctctgccaccatgatgattccatgcccataagaccaagattgattattcaaatgacggttgctgaaaaattctacatgactatattattactctattccataacaaagaaaagctagaacgatctttttgtcaaagggtacagcaaccaatgcgtttgctggcaaaaactggtggttgaaagggggattatgtacttatgctcatctcagcctatatgataaaatgtactgcgccctccttccct

SEQ ID NO: 17399 - DNA, 2027 bp, Zea Mays
ttcatttcataatgattaaaggactggtggttttgcataaaagcatggtttggtatcagtagtgagccatctgcctagttggtaaccaaaactagcttccttgtgaaacttgttcagtttcttgttatggtacaatgtgcaatgtgaaacttgacattgggtatagctatgtcttatttagtttagatatttgcaagcggctcagagcctattggaaaaaatacattgtgtttggtatttgtgaggctcgaagaagaggttggatgcttcctactatatctcccttatcaaaggactgtgttgtggaggaaagttcaagtgcaatggatttagtaggactatttccttactggcttgatgttaatcaaggaaatgcaatattgaatgatgtccacatgcactctttatttgttcttactggcccaaatggtggtggtaaatctagcatgttgcgatcagtctgtgcagctgtgcttcttggaatatgtggcctgatggtaccttcaacttcagctgtaatcccacattttgattccattatgctgcatatgaaagcctatgatagcccagcagatgggaaaagttcatttcagattgaaatgtcggagatacgtgctttagtcagccgagctactgctaggagtcttgttctgattgatgaaatatgtagaggcacagaaactgcaaaaggaacatgtatagctggtagcatcattgaaagacttgataatgttggctgcctaggcatcatatcaactcacctgcatgggattttcgacctgcctctctcacttagcaacactgatttcaaagctatgggaactgaagtggtcgatggatgcattcatccaacatggaaactgattgatggcatatgtagagaaagccttgcttttcaaacagcaaggagggaaggcatgcctgacttgataatcaccagggctgaggagctatatttgagtatgagtacaaataacaagcagggagcatcagtggcgcacaatgagcctcctaatggcagccccagtgtaaatggcttggttgaggagcctgaatctctgaagaacagactagaaatgctgcctggtacctttgagccgctgcggaaggaagttgagagtgctgttactacgatgtgtaagaaaatactgtcggacctttacaacaaaagtagcatcccagaactggtcgaggtggtctgcgttgctgtaggtgctagagagcaaccaccgccttccactgttggcagatctagcatctacgtgattatcagaagcgacaacaggctctatgttggacagacggacgatcttctggggcgcttgaacgcccacagatcgaaggaaggcatgcgggacgctacggtattatacgtcttggtccctggcaagagcgttgcctgccagctggaaacccttctcataaaccagctcccttcgaggggcttcaagctcatcaacaaggcagacgggaagcacaggaacttcggtatatctcgaatctctggcgaggcagttgctactggacggaactagtcagctgaaggtctttttgctattggatattcaataggaggcgggagctaactgacaccatgccgccctagttttgttgaactgatagtggtgctagccttgtgcatagtaggggccaggggagtaataatatttcccttgtctaaggaagtaattaaggatgtaggagcgcagagcaaatgattagcaaaacgatcacgttcgcagtgcggcaggcattgtgcagctgattcgtttgttcaatcagtgctctcgctcagtgacctgacagcgtgatcactaaacctagtagctgggcgcgcctttctaggccagaacagaacattggcgtgaattagattccagtgcggcagggtgttccctaagtacatgttttcagttcagcggcacttggaatatttttatgagaaaaagctgcgtcttttagcttggatgtcctgtgctcatgaatctcaattcgcaccattagattagattccatgaggacggaag

SEQ ID NO: 17400 - DNA, 3491 bp, Zea Mays
atcatgcataaaattggagtggtgaatggtctagtcagacatgatatggattgctactatatttttcttgggtaatacgttgacttttaatgaattttggatatataatcctggacctgtataacaaaatagcaattccttataatttcttacgctgatattgaatataaatatcttgtaatatatacattgatataaaatttctgtgtttgtgacccatctagctcccaacaacacattttcactattgtgttcctggaatggaagtcaaatactgaatttcatgaggccactggatgctgatttgagatagcacatcatggtgttctcattcatcagggatttcacattctgcaaaaggttattgcttgatatctgtgctagagacaatgaaaacttattcagctgaggagggcttaacagaggaggctattgttactaagctccgcatatgtcgttatcaccatctataccttcacaattctttgaagaataattcttcagggacatcacgctggggtgaattcggtgaaggtgggctcttgtggggagagtgcagtgggaagtcctttgagtggtttgacggttcacctattcaagaacttttatgcaaggtacgggaaatatatggccttgatgagaaaacggtttttcgcgatgtcaccgtctcattggaaggcaggccccaacctcttcatcttgggactgctactcaaattggagtcataccaactgagggaataccgagtttgttaagaatggtgcttccttcaaattgtggcgggcttccatcaatgtatattagagatcttcttcttaatcctccatcatttgaggttgcagcagcgatccaagaggcttgcaggcttatgggcaacataacctgctccattcctgaatttacatgcatatcagcagcaaagcttgtgaaactacttgagtcgaaagaggtcaatcacattgaattttgtagaataaaaaatgtccttgatgagattatgctcatgaacagggatgctgagctttctgcaatcctgcatgaattactggtacctgcttctgtggctactggtttcaaagttgaagctgatatgctaatgaacggatgtagcattatttcacaacgaatagctgaagtgatttctttaggtgttgaaagtgatcaggcaataacttcattggaatatattccaaaggagttcttcaatgatatggagtcatcttggaaggggcgcgtgaaaaggatccatgctgaagaagagtttgcaaatgttgatagggctgctgaggcattatcaattgcggtcattgaagattttatgccaattatttcgagggtgaaatctgtagtgtcctcgaatggaggtttgaaaggagaaatcggttatgcaaaagaacatgaagctgtttggtttaaaggaaagagattcataccaaatgtatgggctaacacacctggtgagcagcaaataaaacaactgaagcctgcaattgattcaaaaggcagaaaggttggggaggaatggtttacaacaagcaaagttgagaatgctttagccaggtaccatgaagcttgtgataatgcaagaaataaagttcttgagctgttgagaggcctttctagtgaattgcaggacaaaattaacatacttgtcttttgctcaacactgctcatcattgcaaaagcactttttggtcatgttagtgaggctcgaagaagaggttggatgcttcctactatatctcccttatcaaaggactgtgttgtggaggaaagttcaagtgcaatggatttagtaggactatttccttactggcttgatgttaatcaaggaaatgcaatattgaatgatgtccacatgcactctttatttgttcttactggcccaaatggtggtggtaaatctagcatgttgcgatcagtctgtgcagctgtgcttcttggaatatgtggcctgatggtaccttcaacttcagctgtaatcccacattttgattccattatgctgcatatgaaagcctatgatagcccagcagatgggaaaagttcatttcagattgaaatgtcggagatacgtgctttagtcagccgagctactgctaggagtcttgttctgattgatgaaatatgtagaggcacagaaactgcaaaaggaacatgtatagctggtagcatcattgaaagacttgataatgttggctgcctaggcatcatatcaactcacctgcatgggattttcgacctgcctctctcacttagcaacactgatttcaaagctatgggaactgaagtggtcgatggatgcattcatccaacatggaaactgattgatggcatatgtagagaaagccttgcttttcaaacagcaaggagggaaggcatgcctgacttgataatcaccagggctgaggagctatatttgagtatgagtacaaataacaagcagggagcatcagtggcgcacaatgagcctcctaatggcagccccagtgtaaatggcttggttgaggagcctgaatctctgaagaacagactagaaatgctgcctggtacctttgagccgctgcggaaggaagttgagagtgctgttactacgatgtgtaagaaaatactgtcggacctttacaacaaaagtagcatcccagaactggtcgaggtggtctgcgttgctgtaggtgctagagagcaaccaccgccttccactgttggcagatctagcatctacgtgattatcagaagcgacaacaggctctatgttggacagacggacgatcttctggggcgcttgaacgcccacagatcgaaggaaggcatgcgggacgctacggtattatacgtcttggtccctggcaagagcgttgcctgccagctggaaacccttctcataaaccagctcccttcgaggggcttcaagctcatcaacaaggcagacgggaagcacaggaacttcggtatatctcgaatctctggcgaggcagttgctactggacggaactagtcagctgaaggtctttttgctattggatattcaataggaggcgggagctaactgacaccatgccgccctagttttgttgaactgatagtggtgctagccttgtgcatagtaggggccaggggagtaataatatttcccttgtctaaggaagtaattaaggatgtaggagcgcagagcaaatgattagcaaaacgatcacgttcgcagtgcggcaggcattgtgcagctgattcgtttgttcaatcagtgctctcgctcagtgacctgacagcgtgatcactaaacctagtagctgggcgcgcctttctaggccagaacagaacattggcgtgaattagattccagtgcggcagggtgttccctaagtacatgttttcagttcagcggcacttggaatatttttatgagaaaaagctgcgtcttttagcttggatgtcctgtgctcatgaatctcaattcgcaccattagattagattccatgaggacggaag

SEQ ID NO: 17401 - DNA, 4066 bp, Zea Mays
gcgcactaccccgagaaacgtgcgacgggaacctccgcggttccccaagttcgcctccttcactactctcgcgccccggcacgcctgaaaaaccccacccctcctgccgctccgcctctcccatcacttcccacgcccctcgccgcctcccattccagcgtggacacgacgccactcgccagcacggagacgcgcgcctcgaagcactactgcactagccagccgtcgttcttccgcgccggcgccatgcaccgggtgctcgtgagctcgcttgtggccgccacgccgcgatggctgcccctcgccgactccatcctccggcgccgccggccgcgctgctcccctcttcccgtgctgatgttcgatcggagggcttggtccaagccaaggaaggtctcacgaggcatttcagtggcgtccaggaaagctaacaaacagggagaatactgtgatgaaagtatgctgtcgcatatcatgtggtggaaagagaaaatggagaggtgcagaaaaccatcatccatacaattgactcagaggcttgtgtattcaaatatattagggttggatccgaatttaagaaacggaagcttgaaagatggaaccctgaacatggagattttggtatttaaatcaaaatttcctcgtgaggttctactttgcagagtaggagatttctatgaagctatcggttttgatgcctgtattctcgtagagcatgcaggcttaaatccttttggaggtttgcgttccgacagtattcctaaagctgggtgtccagtcgtgaatttacggcagacattggatgatttgactcgatgtggttattccgtgtgcatagtcgaggaaattcaaggcccaactcaagcccgtgctcggaaaagtcgatttatttctgggcatgcccatcctggtagtccttatgtatttggtcttgctgaagtagaccatgatgtagagttccctgatccgatgcctgttgttgggatttcacattctgcaaaaggttattgcttgatatctgtgctagagacaatgaaaacttattcagctgaggagggcttaacagaggaggctattgttactaagctccgcatatgtcgttatcaccatctataccttcacaattctttgaagaataattcttcagggacatcacgctggggtgaattcggtgaaggtgggctcttgtggggagagtgcagtgggaagtcctttgagtggtttgacggttcacctattcaagaacttttatgcaaggtacgggaaatatatggccttgatgagaaaacggtttttcgcgatgtcaccgtctcattggaaggcaggccccaacctcttcatcttgggactgctactcaaattggagtcataccaactgagggaataccgagtttgttaagaatggtgcttccttcaaattgtggcgggcttccatcaatgtatattagagatcttcttcttaatcctccatcatttgaggttgcagcagcgatccaagcttgtgaaactacttgagtcgaaagaggtcaatcacattgaattttgtagaataaaaaatgtccttgatgagattatgctcatgaacagggatgctgagctttctgcaatcctgcatgaattactggtacctgcttctgtggctactggtttcaaagttgaagctgatatgctaatgaacggatgtagcattatttcacaacgaatagctgaagtgatttctttaggtgttgaaagtgatcaggcaataacttcattggaatatattccaaaggagttcttcaatgatatggagtcatcttggaaggggcgcgtgaaaaggatccatgctgaagaagagtttgcaaatgttgatagggctgctgaggcattatcaattgcggtcattgaagattttatgccaattatttcgagggtgaaatctgtagtgtcctcgaatggaggtttgaaaggagaaatcggttatgcaaaagaacatgaagctgtttggtttaaaggaaagagattcataccaaatgtatgggctaacacacctggtgagcagcaaataaaacaactgaagcctgcaattgattcaaaaggcagaaaggttggggaggaatggtttacaacaagcaaagttgagaatgctttagccaggtaccatgaagcttgtgataatgcaagaaataaagttcttgagctgttgagaggcctttctagtgaattgcaggacaaaattaacatacttgtcttttgctcaacactgctcatcattgcaaaagcactttttggtcatgttagtgaggctcgaagaagaggttggatgcttcctactatatctcccttatcaaaggactgtgttgtggaggaaagttcaagtgcaatggatttagtaggactatttccttactggcttgatgttaatcaaggaaatgcaatattgaatgatgtccacatgcactctttatttgttcttactggcccaaatggtggtggtaaatctagcatgttgcgatcagtctgtgcagctgtgcttcttggaatatgtggcctgatggtaccttcaacttcagctgtaatcccacattttgattccattatgctgcatatgaaagcctatgatagcccagcagatgggaaaagttcatttcagattgaaatgtcggagatacgtgctttagtcagccgagctactgctaggagtcttgttctgattgatgaaatatgtagaggcacagaaactgcaaaaggaacatgtatagctggtagcatcattgaaagacttgataatgttggctgcctaggcatcatatcaactcacctgcatgggattttcgacctgcctctctcacttagcaacactgatttcaaagctatgggaactgaagtggtcgatggatgcattcatccaacatggaaactgattgatggcatatgtagagaaagccttgcttttcaaacagcaaggagggaaggcatgcctgacttgataatcaccagggctgaggagctatatttgagtatgagtacaaataacaagcagggagcatcagtggcgcacaatgagcctcctaatggcagccccagtgtaaatggcttggttgaggagcctgaatctctgaagaacagactagaaatgctgcctggtacctttgagccgctgcggaaggaagttgagagtgctgttactacgatgtgtaagaaaatactgtcggacctttacaacaaaagtagcatcccagaactggtcgaggtggtctgcgttgctgtaggtgctagagagcaaccaccgccttccactgttggcagatctagcatctacgtgattatcagaagcgacaacaggctctatgttggacagacggacgatcttctggggcgcttgaacgcccacagatcgaaggaaggcatgcgggacgctacggtattatacgtcttggtccctggcaagagcgttgcctgccagctggaaacccttctcataaaccagctcccttcgaggggcttcaagctcatcaacaaggcagacgggaagcacaggaacttcggtatatctcgaatctctggcgaggcagttgctactggacggaactagtcagctgaaggtctttttgctattggatattcaataggaggcgggagctaactgacaccatgccgccctagttttgttgaactgatagtggtgctagccttgtgcatagtaggggccaggggagtaataatatttcccttgtctaaggaagtaattaaggatgtaggagcgcagagcaaatgattagcaaaacgatcacgttcgcagtgcggcaggcattgtgcagctgattcgtttgttcaatcagtgctctcgctcagtgacctgacagcgtgatcactaaacctagtagctgggcgcgcctttctaggccagaacagaacattggcgtgaattagattccagtgcggcagggtgttccctaagtacatgttttcagttcagcggcacttggaatatttttatgagaaaaagctgcgtcttttagcttggatgtcctgtgctcatgaatctcaattcgcaccattagattagattccatgaggacggaag

SEQ ID NO: 17402 - DNA, 3459 bp, Zea Mays
  misc_feature (3458)..(3459): n is a, c, g, or t
aagccccaaccacccttagcacccgctttcgtctcgctgcgtgcgctctctgtcactccccctcccctcccccctcctcatcagatccggccacctcctgctcacctcgcctcgccgccggtcccgcgccccggagccctagagctctccccgcggcgtgggccgccggagtccccgggcgcgcggagagaatggaggcggcgctggaggcggcgcgcgccaaggacaccaaggagcgtctggccggggtcgagcggctgcacgaggcgctcgacgccgccgcgcggcgcgggctggcggcggccgaggtcaccgcgctggtggacacctgcatggatctgacgcgggacgccaacttccgcatcgcccagggcggcctccaggcgctctccgccgccgccgtcgtcgccggcgaccacttcaagatccacctcaacgccctcgtccccgccgccgtcgagcgcctcggcgacggcaagcagcccgtccgcgacgccgcgcgccagctcctcatcacgctcatggaggtttcttcaccaacaatcatagttgaaagagctggtagttatgcatggactcataagagttggagggtgagggaagagtttgtacgtacggtggcatctgcagttgggctatttgcttctacggagatttccttgcaacgagttttgctttcacctgtcctgcaactaatgaatgattcgaaccaaagtgttcgagatgctgctatctcttgtattgaggagatgtacaagcacatgggatcacaatttcatgaagagttgcagcgccataatctgccttcatacatgctaaaagaaataaattcaaggttggataaaatagaaccaaaggttcgatcctctgatacagcaatgcagtataaggctgtagagtctagatctgttagtgctaatccaaaaagaggcagcccaaggacaaaaaacataccaagggaaagtacactatatggaggtgacacagatgttacagaaaaacctgtggaaccagtaaaagttcattctgagaaagaattgcttcgggagtttgagaagatcgcggctacccttgttccagaaaaggactggtctttacgtattgctgccatgcaaaggattgaagccctggtttatggaggtgcaatcgataatccatcatttcttatgctcctgaagcaactggttcctccattgtctactcagctgtctgatcgacgttctagtattgtcaaacaggcatgccacctacttaatatactatccaaagaactccttggtgattttgagccatttgctgaactattcattccgatgctttttaagcttgttgtcataacagtgcttgtaatcgctgaatctgcagatacatgcataaaaactatcctgcggaattgcaaggttgctaggattcttcctcgcatagttgacacagcaaagaatgatcgaagtgcaatactccgtgcaaggtgctgtgagtatgcacttctggtactggagtattgggctgatgcaccagaaatacaacgttcagctgatttatatcaggatatgataaaatgctgtgtagcagatgcgatgagtgaggttcgtgcaactgcaagaacttgctatagaatgtttgcaaagacatggcctgagcgctcacgccgtcttttcatgtcatttgatcccgcgatacagaggataataaatgatgaagatggtggtgtgcacaaaagctattgtcgcaatggacaagagtgcagctatttcttcagattcatcttttccatcaaacactcttcggttatcacagtcaaagacgattgacagaagttctgagaggagcctggagagtgtgcttagctccagcaaagaaaaagtttccgccattgaaagtttgctgaaaggtgtcagcatgtcagggcaaaatttctctgctgcacgctcaacaagtttggaccttgcaccagcatcaaacgttctgtcattgcagaactcagcactgttggactcatcccttcctaccatcccacctagttcacgaaatggaggttcccgcttattggatacgatgacaacacacttgcccaccaaagaacgatcaaggtcaccatacttgagtaatatgtcatctgagtccatgtctggcttatcactgccttactcaagaaaatctttggagaggctccaagaaggtggccgcatggatgagagctatgatatccgttcaactaggcgaatcccccaaatgcacttggacagaaactatgttgatatgccttatagggattcacataataaccacgtccctaatttccagagacctcttctaagaaaacaagtaatgtcaagagcttctgcaagtggcagacacagctttgatgatagccatgtaccattaggtgatgtgcctggctatacagattctctggcttctctaaatgatgcactttccgagggtctcagccctagttctgactgggtagcaagagtttcagcttttgaatttattaggaatttattgaaacaaggacagaagggcattcaagaaattattcaaaattttgagaaggttatgaagctgtttttccgtcatttggatgatcctcaccataaggttgcacaggcagctttctctacacttgcagagattatcccagcttgcaagaagccatttgaaagttacgtcgagcgaattctaccatatgtattttcacggcttattgatccaaaagagttggtgaaaaaaccatgctccataacattggagattgttggtcgaacatatgctattgatatgttgctacccgcgctagtacgctcattagatgaacagaggtccccaaaggcaaaattggctgttctggagttcgcaaataaatcattcagcaagtactctgtggactctgatggttatagtaacagtggctttcttaaactatggctttcaaaattggcacctttggtaaatgaaaagaatgcaaaattgaaggaggcatctatttctgagcaagaaagaacgcccgcgccccaaaccttatgaccaggtggattttggaacttcttcggaggatggctatgcactgacatccaagaagagctatccatttgggcggttttcttctagttcccttgatgctgaagggggcaagatgatcagctcgatgcaagaaccagcgctgcataatgtctctataggtcgaacagtttctgatatgagcatggatcatgctattcaaagtttggagtcatctacaggagctgaagttcatttaactaggggtagagaaccaaagaataacagtaacttagttgcggaagctgctcgctcttggacaagctaccctgaaaaaactgatgcctccgtagatggtgaaactgctaccggtactcctcggttagatttcggtcggtttattacttctgatgggcataatactgttggttcaactaccgaaggaagtgttcaagacnn

SEQ ID NO: 17403 - DNA, 3537 bp, Zea Mays
  misc_feature (3536)..(3537): n is a, c, g, or t
aagccccaaccacccttagcacccgctttcgtctcgctgcgtgcgctctctgtcactccccctcccctcccccctcctcatcagatccggccacctcctgctcacctcgcctcgccgccggtcccgcgccccggagccctagagctctccccgcggcgtgggccgccggagtccccgggcgcgcggagagaatggaggcggcgctggaggcggcgcgcgccaaggacaccaaggagcgtctggccggggtcgagcggctgcacgaggcgctcgacgccgccgcgcggcgcgggctggcggcggccgaggtcaccgcgctggtggacacctgcatggatctgacgcgggacgccaacttccgcatcgcccagggcggcctccaggcgctctccgccgccgccgtcgtcgccggcgaccacttcaagatccacctcaacgccctcgtccccgccgccgtcgagcgcctcggcgacggcaagcagcccgtccgcgacgccgcgcgccagctcctcatcacgctcatggaggtttcttcaccaacaatcatagttgaaagagctggtagttatgcatggactcataagagttggagggtgagggaagagtttgtacgtacggtggcatctgcagttgggctatttgcttctacggagatttccttgcaacgagttttgctttcacctgtcctgcaactaatgaatgattcgaaccaaagtgttcgagatgctgctatctcttgtattgaggagatgtacaagcacatgggatcacaatttcatgaagagttgcagcgccataatctgccttcatacatggtgacacagatgttacagaaaaacctgtggaaccagtaaaagttcattctgagaaagaattgcttcgggagtttgagaagatcgcggctacccttgttccagaaaaggactggtctttacgtattgctgccatgcaaaggattgaagccctggtttatggaggtgcaatcgataatccatcatttcttatgctcctgaagcaactggttcctccattgtctactcagctgtctgatcgacgttctagtattgtcaaacaggcatgccacctacttaatatactatccaaagaactccttggtgattttgagccatttgctgaactattcattccgatgctttttaagcttgttgtcataacagtgcttgtaatcgctgaatctgcagatacatgcataaaaactatcctgcggaattgcaaggttgctaggattcttcctcgcatagttgacacagcaaagaatgatcgaagtgcaatactccgtgcaaggtgctgtgagtatgcacttctggtactggagtattgggctgatgcaccagaaatacaacgttcagctgatttatatcaggatatgataaaatgctgtgtagcagatgcgatgagtgaggttcgtgcaactgcaagaacttgctatagaatgtttgcaaagacatggcctgagcgctcacgccgtcttttcatgtcatttgatcccgcgatacagaggataataaatgatgaagatggtggtgtgcacaaaaggtatgcttctccctcgttgcgtgatagagtcgtgcagccttcacgtgcttcctctcattcaagtggtacacatgtacctggatatggcacttcagctattgtcgcaatggacaagagtgcagctatttcttcagattcatcttttccatcaaacactcttcggttatcacagtcaaagacgattgacagaagttctgagaggagcctggagagtgtgcttagctccagcaaagaaaaagtttccgccattgaaagtttgctgaaaggtgtcagcatgtcagggcaaaatttctctgctgcacgctcaacaagtttggaccttgcaccagcatcaaacgttctgtcattgcagaactcagcactgttggactcatcccttcctaccatcccacctagttcacgaaatggaggttcccgcttattggatacgatgacaacacacttgcccaccaaagaacgatcaaggtcaccatacttgagtaatatgtcatctgagtccatgtctggcttatcactgccttactcaagaaaatctttggagaggctccaagaaggtggccgcatggatgagagctatgatatccgttcaactaggcgaatcccccaaatgcacttggacagaaactatgttgatatgccttatagggattcacataataaccacgtccctaatttccagagacctcttctaagaaaacaagtaatgtcaagagcttctgcaagtggcagacacagctttgatgatagccatgtaccattaggtgatgtgcctggctatacagattctctggcttctctaaatgatgcactttccgagggtctcagccctagttctgactgggtagcaagagtttcagcttttgaatttattaggaatttattgaaacaaggacagaagggcattcaagaaattattcaaaattttgagaaggttatgaagctgtttttccgtcatttggatgatcctcaccataaggttgcacaggcagctttctctacacttgcagagattatcccagcttgcaagaagccatttgaaagttacgtcgagcgaattctaccatatgtattttcacggcttattgatccaaaagagttggtgaaaaaaccatgctccataacattggagattgttggtcgaacatatgctattgatatgttgctacccgcgctagtacgctcattagatgaacagaggtccccaaaggcaaaattggctgttctggagttcgcaaataaatcattcagcaagtactctgtggactctgatggttatagtaacagtggctttcttaaactatggctttcaaaattggcacctttggtaaatgaaaagaatgcaaaattgaaggaggcatctatttctggtatcatatctgtttattctcattttgattcaacagctgtgctaaattttattctcagtttgtcagttgaagatcaaaacctcctgaggagagcgttgaagatcaaaacccctcgtattgaggttgatctggtgaactacttgcagagcaagaaagaacgcccgcgccccaaaccttatgaccaggtggattttggaacttcttcggaggatggctatgcactgacatccaagaagagctatccatttgggcggttttcttctagttcccttgatgctgaagggggcaagatgatcagctcgatgcaagaaccagcgctgcataatgtctctataggtcgaacagtttctgatatgagcatggatcatgctattcaaagtttggagtcatctacaggagctgaagttcatttaactaggggtagagaaccaaagaataacagtaacttagttgcggaagctgctcgctcttggacaagctaccctgaaaaaactgatgcctccgtagatggtgaaactgctaccggtactcctcggttagatttcggtcggtttattacttctgatgggcataatactgttggttcaactaccgaaggaagtgttcaagacnn

SEQ ID NO: 17404 - DNA, 3575 bp, Zea Mays
  misc_feature (3574)..(3575): n is a, c, g, or t
aagccccaaccacccttagcacccgctttcgtctcgctgcgtgcgctctctgtcactccccctcccctcccccctcctcatcagatccggccacctcctgctcacctcgcctcgccgccggtcccgcgccccggagccctagagctctccccgcggcgtgggccgccggagtccccgggcgcgcggagagaatggaggcggcgctggaggcggcgcgcgccaaggacaccaaggagcgtctggccggggtcgagcggctgcacgaggcgctcgacgccgccgcgcggcgcgggctggcggcggccgaggtcaccgcgctggtggacacctgcatggatctgacgcgggacgccaacttccgcatcgcccagggcggcctccaggcgctctccgccgccgccgtcgtcgccggcgaccacttcaagatccacctcaacgccctcgtccccgccgccgtcgagcgcctcggcgacggcaagcagcccgtccgcgacgccgcgcgccagctcctcatcacgctcatggaggtttcttcaccaacaatcatagttgaaagagctggtagttatgcatggactcataagagttggagggtgagggaagagtttgtacgtacggtggcatctgcagttgggctatttgcttctacggagatttccttgcaacgagttttgctttcacctgtcctgcaactaatgaatgattcgaaccaaagtgttcgagatgctgctatctcttgtattgaggagatgtacaagcacatgggatcacaatttcatgaagagttgcagcgccataatctgccttcatacatgctaaaagaaataaattcaaggttggataaaatagaaccaaaggttcgatcctctgatacagcaatgcagtataaggctgtagagtctagatctgttagtgctaatccaaaaagaggcagcccaaggacaaaaaacataccaagggaaagtacactatatggaggtgacacagatgttacagaaaaacctgtggaaccagtaaaagttcattctgagaaagaattgcttcgggagtttgagaagatcgcggctacccttgttccagaaaaggactggtctttacgtattgctgccatgcaaaggattgaagccctggtttatggaggtgcaatcgataatccatcatttcttatgctcctgaagcaactggttcctccattgtctactcagctgtctgatcgacgttctagtattgtcaaacagatgctttttaagcttgttgtcataacagtgcttgtaatcgctgaatctgcagatacatgcataaaaactatcctgcggaattgcaaggttgctaggattcttcctcgcatagttgacacagcaaagaatgatcgaagtgcaatactccgtgcaaggtgctgtgagtatgcacttctggtactggagtattgggctgatgcaccagaaatacaacgttcagctgatttatatcaggatatgataaaatgctgtgtagcagatgcgatgagtgaggttcgtgcaactgcaagaacttgctatagaatgtttgcaaagacatggcctgagcgctcacgccgtcttttcatgtcatttgatcccgcgatacagaggataataaatgatgaagatggtggtgtgcacaaaagctattgtcgcaatggacaagagtgcagctatttcttcagattcatcttttccatcaaacactcttcggttatcacagtcaaagacgattgacagaagttctgagaggagcctggagagtgtgcttagctccagcaaagaaaaagtttccgccattgaaagtttgctgaaaggtgtcagcatgtcagggcaaaatttctctgctgcacgctcaacaagtttggaccttggagttgatcctccatcatctcgtgatcctcctgtgccgcttgcagcaccagcatcaaacgttctgtcattgcagaactcagcactgttggactcatcccttcctaccatcccacctagttcacgaaatggaggttcccgcttattggatacgatgacaacacacttgcccaccaaagaacgatcaaggtcaccatacttgagtaatatgtcatctgagtccatgtctggcttatcactgccttactcaagaaaatctttggagaggctccaagaaggtggccgcatggatgagagctatgatatccgttcaactaggcgaatcccccaaatgcacttggacagaaactatgttgatatgccttatagggattcacataataaccacgtccctaatttccagagacctcttctaagaaaacaagtaatgtcaagagcttctgcaagtggcagacacagctttgatgatagccatgtaccattaggtgatgtgcctggctatacagattctctggcttctctaaatgatgcactttccgagggtctcagccctagttctgactgggtagcaagagtttcagcttttgaatttattaggaatttattgaaacaaggacagaagggcattcaagaaattattcaaaattttgagaaggttatgaagctgtttttccgtcatttggatgatcctcaccataaggttgcacaggcagctttctctacacttgcagagattatcccagcttgcaagaagccatttgaaagttacgtcgagcgaattctaccatatgtattttcacggcttattgatccaaaagagttggtgaaaaaaccatgctccataacattggagattgttggtcgaacatatgctattgatatgttgctacccgcgctagtacgctcattagatgaacagaggtccccaaaggcaaaattggctgttctggagttcgcaaataaatcattcagcaagtactctgtggactctgatggttatagtaacagtggctttcttaaactatggctttcaaaattggcacctttggtaaatgaaaagaatgcaaaattgaaggaggcatctatttctggtatcatatctgtttattctcattttgattcaacagctgtgctaaattttattctcagtttgtcagttgaagatcaaaacctcctgaggagagcgttgaagatcaaaacccctcgtattgaggttgatctggtgaactacttgcagagcaagaaagaacgcccgcgccccaaaccttatgaccaggtggattttggaacttcttcggaggatggctatgcactgacatccaagaagagctatccatttgggcggttttcttctagttcccttgatgctgaagggggcaagatgatcagctcgatgcaagaaccagcgctgcataatgtctctataggtcgaacagtttctgatatgagcatggatcatgctattcaaagtttggagtcatctacaggagctgaagttcatttaactaggggtagagaaccaaagaataacagtaacttagttgcggaagctgctcgctcttggacaagctaccctgaaaaaactgatgcctccgtagatggtgaaactgctaccggtactcctcggttagatttcggtcggtttattacttctgatgggcataatactgttggttcaactaccgaaggaagtgttcaagacnn

SEQ ID NO: 17405 - DNA, 3650 bp, Zea Mays
  misc_feature (3649)..(3650): n is a, c, g, or t
aagccccaaccacccttagcacccgctttcgtctcgctgcgtgcgctctctgtcactccccctcccctcccccctcctcatcagatccggccacctcctgctcacctcgcctcgccgccggtcccgcgccccggagccctagagctctccccgcggcgtgggccgccggagtccccgggcgcgcggagagaatggaggcggcgctggaggcggcgcgcgccaaggacaccaaggagcgtctggccggggtcgagcggctgcacgaggcgctcgacgccgccgcgcggcgcgggctggcggcggccgaggtcaccgcgctggtggacacctgcatggatctgacgcgggacgccaacttccgcatcgcccagggcggcctccaggcgctctccgccgccgccgtcgtcgccggcgaccacttcaagatccacctcaacgccctcgtccccgccgccgtcgagcgcctcggcgacggcaagcagcccgtccgcgacgccgcgcgccagctcctcatcacgctcatggaggtttcttcaccaacaatcatagttgaaagagctggtagttatgcatggactcataagagttggagggtgagggaagagtttgtacgtacggtggcatctgcagttgggctatttgcttctacggagatttccttgcaacgagttttgctttcacctgtcctgcaactaatgaatgattcgaaccaaagtgttcgagatgctgctatctcttgtattgaggagatgtacaagcacatgggatcacaatttcatgaagagttgcagcgccataatctgccttcatacatgctaaaagaaataaattcaaggttggataaaatagaaccaaaggttcgatcctctgatacagcaatgcagtataaggctgtagagtctagatctgttagtgctaatccaaaaagaggcagcccaaggacaaaaaacataccaagggaaagtacactatatggaggtgacacagatgttacagaaaaacctgtggaaccagtaaaagttcattctgagaaagaattgcttcgggagtttgagaagatcgcggctacccttgttccagaaaaggactggtctttacgtattgctgccatgcaaaggattgaagccctggtttatggaggtgcaatcgataatccatcatttcttatgctcctgaagcaactggttcctccattgtctactcagctgtctgatcgacgttctagtattgtcaaacaggcatgccacctacttaatatactatccaaagaactccttggtgattttgagccatttgctgaactattcattccgatgctttttaagcttgttgtcataacagtgcttgtaatcgctgaatctgcagatacatgcataaaaactatcctgcggaattgcaaggttgctaggattcttcctcgcatagttgacacagcaaagaatgatcgaagtgcaatactccgtgcaaggtgctgtgagtatgcacttctggtactggagtattgggctgatgcaccagaaatacaacgttcagctgatttatatcaggatatgataaaatgctgtgtagcagatgcgatgagtgaggttcgtgcaactgcaagaacttgctatagaatgtttgcaaagacatggcctgagcgctcacgccgtcttttcatgtcatttgatcccgcgatacagaggataataaatgatgaagatggtggtgtgcacaaaagctattgtcgcaatggacaagagtgcagctatttcttcagattcatcttttccatcaaacactcttcggttatcacagtcaaagacgattgacagaagttctgagaggagcctggagagtgtgcttagctccagcaaagaaaaagtttccgccattgaaagtttgctgaaaggtgtcagcatgtcagggcaaaatttctctgctgcacgctcaacaagtttggaccttggagttgatcctccatcatctcgtgatcctcctgtgccgcttgcagcaccagcatcaaacgttctgtcattgcagaactcagcactgttggactcatcccttcctaccatcccacctagttcacgaaatggaggttcccgcttattggatacgatgacaacacacttgcccaccaaagaacgatcaaggtcaccatacttgagtaatatgtcatctgagtccatgtctggcttatcactgccttactcaagaaaatctttggagaggctccaagaaggtggccgcatggatgagagctatgatatccgttcaactaggcgaatcccccaaatgcacttggacagaaactatgttgatatgccttatagggattcacataataaccacgtccctaatttccagagacctcttctaagaaaacaagtaatgtcaagagcttctgcaagtggcagacacagctttgatgatagccatgtaccattaggtgatgtgcctggctatacagattctctggcttctctaaatgatgcactttccgagggtctcagccctagttctgactgggtagcaagagtttcagcttttgaatttattaggaatttattgaaacaaggacagaagggcattcaagaaattattcaaaattttgagaaggttatgaagctgtttttccgtcatttggatgatcctcaccataaggttgcacaggcagctttctctacacttgcagagattatcccagcttgcaagaagccatttgaaagttacgtcgagcgaattctaccatatgtattttcacggcttattgatccaaaagagttggtgaaaaaaccatgctccataacattggagattgttggtcgaacatatgctattgatatgttgctacccgcgctagtacgctcattagatgaacagaggtccccaaaggcaaaattggctgttctggagttcgcaaataaatcattcagcaagtactctgtggactctgatggttatagtaacagtggctttcttaaactatggctttcaaaattggcacctttggtaaatgaaaagaatgcaaaattgaaggaggcatctatttctggtatcatatctgtttattctcattttgattcaacagctgtgctaaattttattctcagtttgtcagttgaagatcaaaacctcctgaggagagcgttgaagatcaaaacccctcgtattgaggttgatctggtgaactacttgcagagcaagaaagaacgcccgcgccccaaaccttatgaccaggtggattttggaacttcttcggaggatggctatgcactgacatccaagaagagctatccatttgggcggttttcttctagttcccttgatgctgaagggggcaagatgatcagctcgatgcaagaaccagcgctgcataatgtctctataggtcgaacagtttctgatatgagcatggatcatgctattcaaagtttggagtcatctacaggagctgaagttcatttaactaggggtagagaaccaaagaataacagtaacttagttgcggaagctgctcgctcttggacaagctaccctgaaaaaactgatgcctccgtagatggtgaaactgctaccggtactcctcggttagatttcggtcggtttattacttctgatgggcataatactgttggttcaactaccgaaggaagtgttcaagacnn

SEQ ID NO: 17406 - DNA, 3561 bp, Zea Mays
  misc_feature (3560)..(3561): n is a, c, g, or t
aagccccaaccacccttagcacccgctttcgtctcgctgcgtgcgctctctgtcactccccctcccctcccccctcctcatcagatccggccacctcctgctcacctcgcctcgccgccggtcccgcgccccggagccctagagctctccccgcggcgtgggccgccggagtccccgggcgcgcggagagaatggaggcggcgctggaggcggcgcgcgccaaggacaccaaggagcgtctggccggggtcgagcggctgcacgaggcgctcgacgccgccgcgcggcgcgggctggcggcggccgaggtcaccgcgctggtggacacctgcatggatctgacgcgggacgccaacttccgcatcgcccagggcggcctccaggcgctctccgccgccgccgtcgtcgccggcgaccacttcaagatccacctcaacgccctcgtccccgccgccgtcgagcgcctcggcgacggcaagcagcccgtccgcgacgccgcgcgccagctcctcatcacgctcatggaggtttcttcaccaacaatcatagttgaaagagctggtagttatgcatggactcataagagttggagggtgagggaagagtttgtacgtacggtggcatctgcagttgggctatttgcttctacggagatttccttgcaacgagttttgctttcacctgtcctgcaactaatgaatgattcgaaccaaagtgttcgagatgctgctatctcttgtattgaggagatgtacaagcacatgggatcacaatttcatgaagagttgcagcgccataatctgccttcatacatgctaaaagaaataaattcaaggttggataaaatagaaccaaaggttcgatcctctgatacagcaatgcagtataaggctgtagagtctagatctgttagtgctaatccaaaaagaggcagcccaaggacaaaaaacataccaagggaaagtacactatatggaggtgacacagatgttacagaaaaacctgtggaaccagtaaaagttcattctgagaaagaattgcttcgggagtttgagaagatcgcggctacccttgttccagaaaaggactggtctttacgtattgctgccatgcaaaggattgaagccctggtttatggaggtgcaatcgataatccatcatttcttatgctcctgaagcaactggttcctccattgtctactcagctgtctgatcgacgttctagtattgtcaaacaggcatgccacctacttaatatactatccaaagaactccttggtgattttgagccatttgctgaactattcattccgatgctttttaagcttgttgtcataacagtgcttgtaatcgctgaatctgcagatacatgcataaaaactatcctgcggaattgcaaggttgctaggattcttcctcgcatagttgacacagcaaagaatgatcgaagtgcaatactccgtgcaaggtgctgtgagtatgcacttctggtactggagtattgggctgatgcaccagaaatacaacgttcagctgatttatatcaggatatgataaaatgctgtgtagcagatgcgatgagtgaggttcgtgcaactgcaagaacttgctatagaatgtttgcaaagacatggcctgagcgctcacgccgtcttttcatgtcatttgatcccgcgatacagaggataataaatgatgaagatggtggtgtgcacaaaagtcaaagacgattgacagaagttctgagaggagcctggagagtgtgcttagctccagcaaagaaaaagtttccgccattgaaagtttgctgaaaggtgtcagcatgtcagggcaaaatttctctgctgcacgctcaacaagagttgatcctccatcatctcgtgatcctcctgtgccgcttgcagcaccagcatcaaacgttctgtcattgcagaactcagcactgttggactcatcccttcctaccatcccacctagttcacgaaatggaggttcccgcttattggatacgatgacaacacacttgcccaccaaagaacgatcaaggtcaccatacttgagtaatatgtcatctgagtccatgtctggcttatcactgccttactcaagaaaatctttggagaggctccaagaaggtggccgcatggatgagagctatgatatccgttcaactaggcgaatcccccaaatgcacttggacagaaactatgttgatatgccttatagggattcacataataaccacgtccctaatttccagagacctcttctaagaaaacaagtaatgtcaagagcttctgcaagtggcagacacagctttgatgatagccatgtaccattaggtgatgtgcctggctatacagattctctggcttctctaaatgatgcactttccgagggtctcagccctagttctgactgggtagcaagagtttcagcttttgaatttattaggaatttattgaaacaaggacagaagggcattcaagaaattattcaaaattttgagaaggttatgaagctgtttttccgtcatttggatgatcctcaccataaggttgcacaggcagctttctctacacttgcagagattatcccagcttgcaagaagccatttgaaagttacgtcgagcgaattctaccatatgtattttcacggcttattgatccaaaagagttggtgaaaaaaccatgctccataacattggagattgttggtcgaacatatgctattgatatgttgctacccgcgctagtacgctcattagatgaacagaggtccccaaaggcaaaattggctgttctggagttcgcaaataaatcattcagcaagtactctgtggactctgatggttatagtaacagtggctttcttaaactatggctttcaaaattggcacctttggtaaatgaaaagaatgcaaaattgaaggaggcatctatttctggtatcatatctgtttattctcattttgattcaacagctgtgctaaattttattctcagtttgtcagttgaagatcaaaacctcctgaggagagcgttgaagatcaaaacccctcgtattgaggttgatctggtgaactacttgcagagcaagaaagaacgcccgcgccccaaaccttatgaccaggtggattttggaacttcttcggaggatggctatgcactgacatccaagaagagctatccatttgggcggttttcttctagttcccttgatgctgaagggggcaagatgatcagctcgatgcaagaaccagcgctgcataatgtctctataggtcgaacagtttctgatatgagcatggatcatgctattcaaagtttggagtcatctacaggagctgaagttcatttaactaggggtagagaaccaaagaataacagtaacttagttgcggaagctgctcgctcttggacaagctaccctgaaaaaactgatgcctccgtagatggtgaaactgctaccggtactcctcggttagatttcggtcggtttattacttctgatgggcataatactgttggttcaactaccgaaggaagtgttcaagacnn

SEQ ID NO: 17407 - DNA, 3487 bp, Zea Mays
  misc_feature (3486)..(3487): n is a, c, g, or t
aagccccaaccacccttagcacccgctttcgtctcgctgcgtgcgctctctgtcactccccctcccctcccccctcctcatcagatccggccacctcctgctcacctcgcctcgccgccggtcccgcgccccggagccctagagctctccccgcggcgtgggccgccggagtccccgggcgcgcggagagaatggaggcggcgctggaggcggcgcgcgccaaggacaccaaggagcgtctggccggggtcgagcggctgcacgaggcgctcgacgccgccgcgcggcgcgggctggcggcggccgaggtcaccgcgctggtggacacctgcatggatctgacgcgggacgccaacttccgcatcgcccagggcggcctccaggcgctctccgccgccgccgtcgtcgccggcgaccacttcaagatccacctcaacgccctcgtccccgccgccgtcgagcgcctcggcgacggcaagcagcccgtccgcgacgccgcgcgccagctcctcatcacgctcatggaggtttcttcaccaacaatcatagttgaaagagctggtagttatgcatggactcataagagttggagggtgagggaagagtttgtacgtacggtggcatctgcagttgggctatttgcttctacggagatttccttgcaacgagttttgctttcacctgtcctgcaactaatgaatgattcgaaccaaagtgttcgagatgctgctatctcttgtattgaggagatgtacaagcacatgggatcacaatttcatgaagagttgcagcgccataatctgccttcatacatggtgacacagatgttacagaaaaacctgtggaaccagtaaaagttcattctgagaaagaattgcttcgggagtttgagaagatcgcggctacccttgttccagaaaaggactggtctttacgtattgctgccatgcaaaggattgaagccctggtttatggaggtgcaatcgataatccatcatttcttatgctcctgaagcaactggttcctccattgtctactcagctgtctgatcgacgttctagtattgtcaaacaggcatgccacctacttaatatactatccaaagaactccttggtgattttgagccatttgctgaactattcattccgatgctttttaagcttgttgtcataacagtgcttgtaatcgctgaatctgcagatacatgcataaaaactatcctgcggaattgcaaggttgctaggattcttcctcgcatagttgacacagcaaagaatgatcgaagtgcaatactccgtgcaaggtgctgtgagtatgcacttctggtactggagtattgggctgatgcaccagaaatacaacgttcagctgatttatatcaggatatgataaaatgctgtgtagcagatgcgatgagtgaggttcgtgcaactgcaagaacttgctatagaatgtttgcaaagacatggcctgagcgctcacgccgtcttttcatgtcatttgatcccgcgatacagaggataataaatgatgaagatggtggtgtgcacaaaagctattgtcgcaatggacaagagtgcagctatttcttcagattcatcttttccatcaaacactcttcggttatcacagtcaaagacgattgacagaagttctgagaggagcctggagagtgtgcttagctccagcaaagaaaaagtttccgccattgaaagtttgctgaaaggtgtcagcatgtcagggcaaaatttctctgctgcacgctcaacaagtttggaccttggagttgatcctccatcatctcgtgatcctcctgtgccgcttgcagcaccagcatcaaacgttctgtcattgcagaactcagcactgttggactcatcccttcctaccatcccacctagttcacgaaatggaggttcccgcttattggatacgatgacaacacacttgcccaccaaagaacgatcaaggtcaccatacttgagtaatatgtcatctgagtccatgtctggcttatcactgccttactcaagaaaatctttggagaggctccaagaaggtggccgcatggatgagagctatgatatccgttcaactaggcgaatcccccaaatgcacttggacagaaactatgttgatatgccttatagggattcacataataaccacgtccctaatttccagagacctcttctaagaaaacaagtaatgtcaagagcttctgcaagtggcagacacagctttgatgatagccatgtaccattaggtgatgtgcctggctatacagattctctggcttctctaaatgatgcactttccgagggtctcagccctagttctgactgggtagcaagagtttcagcttttgaatttattaggaatttattgaaacaaggacagaagggcattcaagaaattattcaaaattttgagaaggttatgaagctgtttttccgtcatttggatgatcctcaccataaggttgcacaggcagctttctctacacttgcagagattatcccagcttgcaagaagccatttgaaagttacgtcgagcgaattctaccatatgtattttcacggcttattgatccaaaagagttggtgaaaaaaccatgctccataacattggagattgttggtcgaacatatgctattgatatgttgctacccgcgctagtacgctcattagatgaacagaggtccccaaaggcaaaattggctgttctggagttcgcaaataaatcattcagcaagtactctgtggactctgatggttatagtaacagtggctttcttaaactatggctttcaaaattggcacctttggtaaatgaaaagaatgcaaaattgaaggaggcatctatttctggtatcatatctgtttattctcattttgattcaacagctgtgctaaattttattctcagtttgtcagttgaagatcaaaacctcctgaggagagcgttgaagatcaaaacccctcgtattgaggttgatctggtgaactacttgcagagcaagaaagaacgcccgcgccccaaaccttatgaccaggtggattttggaacttcttcggaggatggctatgcactgacatccaagaagagctatccatttgggcggttttcttctagttcccttgatgctgaagggggcaagatgatcagctcgatgcaagaaccagcgctgcataatgtctctataggtcgaacagtttctgatatgagcatggatcatgctattcaaagtttggagtcatctacaggagctgaagttcatttaactaggggtagagaaccaaagaataacagtaacttagttgcggaagctgctcgctcttggacaagctaccctgaaaaaactgatgcctccgtagatggtgaaactgctaccggtactcctcggttagatttcggtcggtttattacttctgatgggcataatactgttggttcaactaccgaaggaagtgttcaagacnn

SEQ ID NO: 17408 - DNA, 1502 bp, Zea Mays
gttataataaaataggcaaaaatcatgtatgtatcccaactatgctttcatcttacatttttgggtattacccggcggcggcaaggagtgtcagaagactcggaaatcgtttggcaacccacgcggcgggggcaaaatagtcaaaccgttttccatcgttccgtagcatatgcatatcctaaccacgattcgggggcaagcgaacggacacgatggtggccttgaccgcggggatttccgtagctaccggcgtcgtgttcagccccgccggccgccggcgaggccgtggacacgccgcctttcgctgctcgtcgtcctctgccggagagaggcaggctctcttcagccgcatcgcccccgtctacgatcatctgaacgacgtgctcagccttggacagcaccggacgtggaagcgcatatgcgtctcttggtcgagagcgaagatgggggatcgagttcttgatctctgctgcgggagcggggatttggcgttcctgctgtctcagaaggtcggcttagatggagaggtgatggctgttgatttttcaagtcagcaactacagactgctgctggccgtcaggagcaacggtggaagctgtgttacaagaacatcaaatggatcgagggtgatgcacttgatttaccattcacagactgctacttcgatgctgtaacagttggctacggattgcgcaatgtggttgataaatcgaaagcgatgcaagaaatatatagggtcctgaaaccaggatcaagagcttctattcttgattttaacaagagctcatcacttttcacagcgtcattacagagttgggcgatagacaatgttgtggttcctttagctagtggctatggactaactgaagaatacaagtacttgaaaagctccatatcacagtatctaacagagttggagaaactggccaaagaagctgggttctgtgcagcgaagcactacgagcttggtggagggcttatggggaatctagtagcgactagatgagtagaatgtagaacggaaaatcgagttgcatggttcctctgcatcattttagctgattgtacgctcttcttctatgtattggcctcagatgaggtcaatgacaagtgttgattccagaggggcctggacgtcttgattatcactgtcttctgtttgaacctgcgcttctgtagagcatcgacgttgtgattacgatcaagatggaccgagacgctgacgcatgcttctgcagattacaccggcatgttgttctacagcgcgggagcattcaaaggttcttattaattatgcgttgcaatgtctgagagcatgtgggaatttcagcttttcactgtgcgttgcccattttgcccagaactgacatccagcttttcaccgcgttgctcatttgctctgaactgaatcctttttccccctcagtaaaactgcgtgcagtcctctcctctaccctccggttctcccgtttactcggtccccattgcgacgggtgagatc

SEQ ID NO: 17409 - DNA, 1461 bp, Zea Mays
gttataataaaataggcaaaaatcatgtatgtatcccaactatgctttcatcttacatttttgggtattacccggcggcggcaaggagtgtcagaagactcggaaatcgtttggcaacccacgcggcgggggcaaaatagtcaaaccgttttccatcgttccgtagcatatgcatatcctaaccacgattcgggggcaagcgaacggacacgatggtggccttgaccgcggggatttccgtagctaccggcgtcgtgttcagccccgccggccgccggcgaggccgtggacacgccgcctttcgctgctcgtcgtcctctgccggagagaggcaggctctcttcagccgcatcgcccccgtctacgatcatctgaacgacgtgctcagccttggacagcaccggacgtggaagcgcatatgcgtctcttggtcgagagcgaagatgggggatcgagttcttgatctctgctgcgggagcggggatttggcgttcctgctgtctcagaaggtcggcttagatggagaggtgatggctgttgatttttcaagtcagcaactacagactgctgctggccgtcaggagcaacggtggaagctgtgttacaagaacatcaagtgagcatcctcaatttggctacggattgcgcaatgtggttgataaatcgaaagcgatgcaagaaatatatagggtcctgaaaccaggatcaagagcttctattcttgattttaacaagagctcatcacttttcacagcgtcattacagagttgggcgatagacaatgttgtggttcctttagctagtggctatggactaactgaagaatacaagtacttgaaaagctccatatcacagtatctaacaggagaagagttggagaaactggccaaagaagctgggttctgtgcagcgaagcactacgagcttggtggagggcttatggggaatctagtagcgactagatgagtagaatgtagaacggaaaatcgagttgcatggttcctctgcatcattttagctgattgtacgctcttcttctatgtattggcctcagatgaggtcaatgacaagtgttgattccagaggggcctggacgtcttgattatcactgtcttctgtttgaacctgcgcttctgtagagcatcgacgttgtgattacgatcaagatggaccgagacgctgacgcatgcttctgcagattacaccggcatgttgttctacagcgcgggagcattcaaaggttcttattaattatgcgttgcaatgtctgagagcatgtgggaatttcagcttttcactgtgcgttgcccattttgcccagaactgacatccagcttttcaccgcgttgctcatttgctctgaactgaatcctttttccccctcagtaaaactgcgtgcagtcctctcctctaccctccggttctcccgtttactcggtccccattgcgacgggtgagatc

SEQ ID NO: 17410 - DNA, 2217 bp, Zea Mays
caacattaggtttaatgtcccttccactatttgcatatttctttatgagggaatgtacaaacaaataaatcacagcatgatgcacaaattactttaagtgtcactaattaattactgacttttgaggtgttggttcacatgttataataaaataggcaaaaatcatgtatgtatcccaactatgctttcatcttacatttttgggtattacccggcggcggcaaggagtgtcagaagactcggaaatcgtttggcaacccacgcggcgggggcaaaatagtcaaaccgttttccatcgttccgtagcatatgcatatcctaaccacgattcgggggcaagcgaacggacacgatggtggccttgaccgcggggatttccgtagctaccggcgtcgtgttcagccccgccggccgccggcgaggccgtggacacgccgcctttcgctgctcgtcgtcctctgccggagagaggcaggctctcttcagccgcatcgcccccgtctacgatcatctgaacgacgtgctcagccttggacagcaccggacgtggaagcgcatatgcgtctcttggtcgaggtatagcgctagtggtaactgtagtagataagcaatgtgaatcaaaatgccctgttctacgatcgattgatgcaaaagtttgctcatatggagttagagcgaagatgggggatcgagttcttgatctctgctgcgggagcggggatttggcgttcctgctgtctcagaaggtcggcttagatggagaggtgatggctgttgatttttcaagtcagcaactacagactgctgctggccgtcaggagcaacggtggaagctgtgttacaagaacatcaagtgagcatcctcaatgtgagggtttgcagatccagaacatcttgtgatttcagagcaactacagtttgcagatccagaacagactgctgctaacatatgtgatatgacgacatgacgttatgtggtacacctacatctgacactggcacttgcagatggatcgagggtgatgcacttgatttaccattcacagactgctacttcgatgctgtaacagttggctacggattgcgcaatgtggttgataaatcgaaagcgatgcaagaaatatatagggtcctgaaaccaggatcaagagcttctattcttgattttaacaagagctcatcacttttcacagcgtcattacagagttgggcgatagacaatgttgtggttcctttagctagtggctatggactaactgaagaatacaagtacttgaaaagctccatatcacagtatctaacaggtatgtgtgtttatttccctcaccaagaacgcgtccatgaaagagcatggtattgtgtgtcattctgatggtagagctacactatacgtagagatactcatctcactattctcactcttggactgatgaggtgcaaattcaacatgataccatttttttccctcccttttcacaccaaaccactagcatttattttgtcacaaaatctgcgctctgctgttctggataataaaagtggtttgaaccatttgtttagtggccctataccctaccacgaaactacatctagcttgtgtcttgctctcttttctttttaggagaagagttggagaaactggccaaagaagctgggttctgtgcagcgaagcactacgagcttggtggagggcttatggggaatctagtagcgactagatgagtagaatgtagaacggaaaatcgagttgcatggttcctctgcatcattttagctgattgtacgctcttcttctatgtattggcctcagatgaggtcaatgacaagtgttgattccagaggggcctggacgtcttgattatcactgtcttctgtttgaacctgcgcttctgtagagcatcgacgttgtgattacgatcaagatggaccgagacgctgacgcatgcttctgcagattacaccggcatgttgttctacagcgcgggagcattcaaaggttcttattaattatgcgttgcaatgtctgagagcatgtgggaatttcagcttttcactgtgcgttgcccattttgcccagaactgacatccagcttttcaccgcgttgctcatttgctctgaactgaatcctttttccccctcagtaaaactgcgtgcagtcctctcctctaccctccggttctcccgtttactcggtccccattgcgacgggtgagatc

SEQ ID NO: 17411 - DNA, 2289 bp, Zea Mays
ctcatccttactttttgtgctgatcaatagacaatgactgatgcattacctcaaaccctcaattgatttcggtggacacaagactaaaaggatgttttagttttaatgttcagctgccctgccattgccacatggagaaatgtgcaatatgctttgctagcatgagatctggccatggacaggcccttttcactgcagagtgttcccacatgttccattttcagtgtatctcgtctaatgtaaaacatggaaactatgtctgtccggtttgtcgagcgaaatggaaagagataccctatcgctcactatcttctactagccctcatggaagaattggaggtgaccatactcgatcaccccaacaagatcctcatttggctcttcaccagcaagtttcgaaccgtcggcgggaggtccgtcggttacgtacttctgagccagcagactacaatgatgatgaacctttgcagcgcatggaggcttttgacgatcttaactttggatctagtaaaactgctgagatcagctcatacccagaattccaagctgtcccacagtcaacatgtctagatggatttgatattctgatccatgtgaaggccccaacttctagctcagatgatgctacaggaagtttggtcaatggaagctctttgaggttgtcaagacgagttcctattgatattgttactgtccttgatgttagtggcagtatggcaggcacaaaaatggcactcctgaagcaagcaatgggttttgttattcagcaccttcggccatctgaccgactttcagtcattgccttttcatctactgctcgacgactgttccccctccaacggatgtcacatcatggcaggcagcaggccttgcaggcaatcaactcacttggcgctggtggtggcacgaacattgctgatgcgctaaagaaagctgtgaaggtgattgcggaccgcagctataagaattctgtgtgcagtatcattcttctgtcagatggccaagatacttacaacatttcctcaaatttccaaggcacatcagcaggtcgtaggtcacttgttccatctgctaatccaaatgagctccatatggtacccctgcacacttttggatttggagcagaccacgattcagatacgctgcattcgatttctgaagcttctggtggcaccttttcttttattgaggatgaaggtgtgatgcaagatgcgtttgctcaatgtattggtgggcttcttagtgttgctgtccgtgagatgcgtctcagtatggagtgcgttgatcctggtgttctgctctgttccatcaaaagtggcagctatccaagtaaggtagcaagagatggacgaaatggatttgttgatatcgctcacttgtatgctgatgaggagaaagacattttgctttcagtgaccattccaaaatcttgtgaacagacttcactgttaagagttgcttgtgcttacaaagatccggtgagcaatgagactatcaagattcaaggtgacgaggtgaagatcaagaggccagcatctactgtatctgtaccagtttctattgaagttgatcgagagaggaaccgtatacgagctaccaattctatggagtctgcatgggctgctgccgagagaggcgctctctcggaggccgtcaccattcttgaggactgccggagggcactatcacagtgtgttgcaagccagaatggggaccgtctatgcatggcccttgtcgcagagctacgagagatgcaggagaggatggcgaaccgccaactttacgaggcttcagggagggcgtatatgctatctggattgagctctcattcatggcagagagcaacagcacgcggagactctacagatagcaccactcttgttcattcatatcaaacgccgtccatggttcagatgctggagcattcccagaattttggctccctgcctcagggccgaaggccacaagtccagggagcgggatcagtcttagagaagcctagtaagggaaggtaactcaccatcatctcgccagtgtcatgtttggatgatggtgaaaggttaatcttagctttcattagtcttagcatgattgctggtggtttagcagtgcctatttattcttttgctgataggtttatttgagtcctagtgaggttagagcaactccaacagatccttaaattataactcccaaaaggaagtgattgggatcttcttaaaactaatggatacaaaaaaggcaacgatccaacagttctctatatttccccaaaaaaatttgaattcc

SEQ ID NO: 17412 - DNA, 5822 bp, Zea Mays
ggtgcttccacatggcaatagcccataagacgtggcactgttggaatgatatcccggtggttgacaattctccaactgtcctttactttctggaaatagtccaaaagagatataaaaattgtggttgctttatattttttagtccatgcagtaaaattacaataaaaagtgtgtgaattacaacataacccaaaatgataggattattgttaaagtgtatgagtggattgcttaccttctcttaaaaacttaagctttttggttgaattggttagtacgtccactctaacatgatatcagagccggaggtctcgagtttaaatcatggtagaggattaatttgtgtccctgtccctttatttccacgtttgtgcatttctctctggctgcacatgagtgggggcgttgaagtgtatgagtggattatctaccttctcctaaaagtctaaccttttggtttgaattagttagtgcatccattctaacaattattacactaattgcaatagataggcttcaccaatggaaaatatcaataagatacacaaaagtcactgttgttgtacgactagatgtgactcttgaatttgatttgtaatgtatgctaataagaattggacttcctcaaattcatcccaattctctctacaatattcgccctttgattgccttgtaccccaaaaaaacaaactatttcattaatgttctctattgagaattgtaacttgcctatatcaagtcaacatatagtactatagtagggatgtcttctctcacaagttgctatttgtgtcagcatggtgtacgcgtagcttaccgaggagtgtaacaccactctcctgcatatggataacaaaatgtctggtatcttgttttccaaatgcaaatggaaggttgaattattcctgcttccttctttccttttatatttccggtcgagattttttttggcactaagaagagaagaagaaatactgtctagcaaaatggaacattatgtgccaacccaaagatcaaggaggcttaagaattagggacctagatattcaaaacaaggctttgctaagtaaatgactttatagacttttgacatctgatggaacttggcaacaactgatctgcaataaatacttgaatacgaaaccactctcccaagccttttggaaatcaggggattcctatttttgggctagattaatggaagtgaaagattactttttgaggtttgggactttcacaataaggaatggttctcagtttaggttctgggagcacatctggttgggtacatcgagcctacgtgaccaatacccttgtttgtaccatatagctagacataaacatgtgagtgtggctgacatcttcaacacttcgcctttgaatttgtcttggtgtagagatctgataggacataaattagtagtgtggaacgatctaactccacgacttgctgatgtagttctatcggatgaacaagatggatttcgatgtaatatgtgagtagatggacaattctttgtgaagtcacgttacactggcttaattcacctagatgtacccaaccttaataaaaagattatggaaactaaaggcccaaaataaaaatattcctttagtttttacgaaaaggcacaatattaactaaggataatctagcaaagtgaaaaggcacaatattaactaaggataatctagcaaagtgaaattggaattgcaacgtgttggcaagttgttcacagaacctcatttctgcttgctgttcaaaagatggtcaagattagcaagttgttcacagaacctcgtttctgcttgctgttcaaaagatggtctagatttttgcatgcttcctcgtcttgcatgtcgcatttagtggatgtggtgatctgagggatcccagaacatgcctggtttcgttcctcggcggaggtcatcctaatggactcatattgcattgaagaagttcatccagataccctgatgaagaaagatctttcatcctacgtggtgcgagcgtggtgctttgatccagcaatattacaacggaaattggcgcttcacatattggaaaaagggttgcaggttgaagagaggagatctctatcatatggtatcagtgtcaatgtaattctcgcggataatacggacgctgccttgaggtcctggcctcctttccttccggcggacggtcatcttcctagggactttgatgatcacgacgagcgggatcggcggatcctcattcttggcgtccggacggttccctgacaggcggtggtcggttcacctccggcttggaccacagccgccgcatggaaggggggagtctcgcgtgctcctggggaatcggactcatcacccccggttcttttgggtgcaccgccggagcaatcaatcttcctgaagggcgcggggcaaaggagatcctgacagaagatttggggctgccgcggcttcctgatgccgctggccgggaggaagacgaacagttccctagaggtggaactgcagacagtgtgaatggcacgatcgggtcgctgatccccccaggccgatttcgccccagcccttggtgactggaccgctggaatcgtttgggccaagatcgcccctactgctggcccctcttgtccccgttgtcccaccctctgggtccgctcttgggccgccggagacgggacatggatctgacattaggccgtctgaggtcttgttcggttagctctcaattcatgtggattgagtgagattgagtgggtttaaatctcaaataaggcaaagttttttaaattttttctaatctcattcaataaataaccgaacaaggtatgagatggtctgtgcgcctgtggtcttgccccattctgttgggccgcctgagacgcagattacagtaccagcctcgcaccattctcttcttgaagaactgaaccgtgatggtgatcaagctattcagtcagcttctactgtagatcccagttcctttcctgggcaagctgatctgcattcaagtaaaaccaagctcaaagtttactcaagaagaaaaggtggaccaactcaggagatacaagtggcccctaacccctcgagtgttggggctcccatcctggacatggcggatggtacaagcagtttgatcacagacatctcagtacctctggtcgatccatcaaccttcattagcaggatcaacaagaggtctgcacatcttcttccaacgcctagggctgaacagaggaacctgaattctcagactatgactgtgcctcgacgcagtaggcgcgttgctgggattggcgtcgaattttccatgcaagaatggcgcaacaggtcttctaggaaggctatgggggctctgcatataatcaaggaatctgatggagttaatcctgaagcactgatggggttagttctgcagacaggatggacaaccgtggtggttaacttgtgtatatgggccctagggggatgctgagaaaattctttttctcctagaactgagaaatgtcagggcagcttgtgttggaccttgagtggtagcaggagatttaaatctaatctataagactagtgacaaaaacaactccaacctcaacagagccatgatgggttgctttaggactctgattagcaatcttgcccttagagaaattcagttacatggaagaaaattcacctagtcaaatcagcaagataacccggtgcttgtgaagttggatagagttctttgttctgctgattgggaagccttcttcccaaatgtgctcctgcccatgtcttcttcccaagattcagatcattgtcctctgattctagggctgaaggacaatacttttggcaagaaaaggttccactttgaatctttctggacaagaatggaaggtttttaggaggtggtgttggatgcttggaactctatagtgcctactagttgtccctaaatctggataagaaactcaaggaaacagccagaagatttgaaacaggtggggcatatagtctctcagctttccttggcaaaggagctgcttcacagatttgaaatagcccaggatcgcagacctcttagtcctgctgagaactggctaaaaaacaaactcaagaaacagtccttacttttggcctccttcaaaagaacaatggcaagattacgttcaagaatcacatagataaaggaaggtgatgcaaacactaaatatttccatatgcatgctagatatgaccatgtggagggatggagaaaattttgtcactagccaaactgataaagctgcactggtggaccaattctactccaacctcattgggcagtctgggttcagggagagaaccattgacctggaagcccttggtcttccaactcataacctctcagctttggattacccttgtactgagcaggaggtgtgggaaactataaggaaccttccttcaactaaggcctctgggccggatggttttactgggagattttacaaggcttgttggaacattatcaaagtcgaggtgctaaatgcaatttctgcagtctggaacagtaatttcacaaagttggacagactaaattctgcttttattacaatgatcccaaagaaagatgatgcagatcaagtgaaagatttcagacctattagtttggtgcacaactttgctaagctggtaactaaaatcctagccaacaggcttgctagcaacctaaatggactggtttctccaaaccagagtgcattcataaaaggaagatttattcaggacaactttatgctagttcaacaaacgtcaagatttttgcatcaacaaaacaaggccagtcttcttttcaagttagacatcacaaaaggttttgacgttgtgtcgtggccttttctgattgaggtgctgcaacagttgggttttggccagaaatggagagatatctttttttttctcgaatacgtaggagagctgcgtatcattatattaagtagaataagatggggtgaggtgttaaagaacctcatacaactctacacaccacccaacaaaaaaaaagaaaaagaaaatgagcaggagcaccagtacactaagcatactagagaccaactcctcaaatagcatgcggaggtaaaaggatagcagataatccgcgagtcccagccctacaccaaagatgagactcagccatgacccaatttatgaccttgctagccctaggctgctctccgttgaaggattgattgcgatgaatccaaatggcccaagctcctaaaatgataagggagttcagccccttgcgcagcttcttattggaggggctaataagggtcatgcttacatcctcccaccattcatcaaaggaagtagaattgagactgggagagaggtgctgcaaaccgaccgttttcaggatattaaaccagacttcccttgagaatacacaggaaactagcagatgattcatagtttcttcctcctggtcacataacagacatctttgagggtgaggcaggcctctccttgccagccggtcagcggtccagcaacggccgtgcgccacaagccacatgaagaatttacattttccaggagcccaactcttccaaatcctcctccatgacctaaaggttgttaagccaataaataaaccatcataagccgacttggcggtataatttcctgagctagagagcagccatatatgcttatcttcctgttccgggtgcaaaatccagctggcagcgaggtcccagactttaaaaaaatcagacaacacattaacagtaatagcccctctaatgtcctgtacccagcttccagtagtgagtgcatcctgaacactccttttc

SEQ ID NO: 17413 - DNA, 701 bp, Zea Mays
ggttcacatgcatgttcaagaaaaaatgccgaaattacatgatgctactttattccatgcaagatatatagttccatcacattgaacatttttatctaggtcgtacactcgattaacacaccctatcagcccttgggtagccggtagcctaccacggtgtgcaagtttctccatgaaaaaaaatattggccaaaacggacttggatatttcttgagttattctcccaggtgtctatgaacttttctagaatttcaaacatcatacaatatattccaaagtgtgctagctacatcaacggaaaatagctcaaacaacatatctaccaattgacacggtgctacaagtatatccgccagtgaaaccagtttcatttcctctatcctgactgaggtccaaggctgttctgcctgttcatgtttccactaagagtaaggattgcacactttcatagccccattcagtgtccttcagaaatgaagtttttgcagggaaacacagtccatgatgttcagctgtgcagttttactaggatcacgctgtcaattggtattcatcattggcagtatctgccacttgataacttgatctcacattctgcaatattgaattgttatttagttgctgaccttgaggagcttttgacacaatttggtatgagaaaagcagaaatagttctcaaaaacctcaagaagggtgacat

SEQ ID NO: 17414 - DNA, 1717 bp, Zea Mays
ctcatacctctactctgcttaccctgatctcaagcctggtcaactaacagatctgaaatcattagctgtcaataacaattcatttgcttatgtcgccgttaagaaatctatccataggtatctcataaaggattctaactatcttacgacagcggtaaataaattcgcgaattatgttaacctttccagttcagagaaagacttgttagaagaaccaacatgtccaaagattctggcttcaacctgaaccatgtttggaagctaatgctaatgcttcttaaaccaatattgagcttttgtggcatgcacatcgatcctatgagagaactccgagaaacttgtcaatataatggttttgacttgggacttcccgaacctacgaagtacaatggagagttccatgtcaaagtagaagttaacataaacggcaagatgataagctgtactgcagcaaaccggaattcaaaagatgctagaaaagtagctgcacaagaaacactttcgaaactgaagaattatgggtacaagcataaaagaaagtcgctggaggaaattttgcgttctaccacgaaaaaagaatcggaactgataggctatgatgaagaaccaatcaatgttgaggatgacattgacatgcaaatgaataatctactgataaatggagaaagaacctccattcagagtacagcgggagataacaaggttgacaagaatgatgctaatagtggaaggaataataagtccaatgtggtcatgcagaatggttgcctacctagaggggcaactgataaaataaaccaaaaagaatatcatggtgatatggtccgcaaaacagcaaggtcattcctttatgaattatgtgctgcaaactattggaaacctcctgaatttgagttatgcaacgatgaaggaccaagtcaccttcgaaagttcacatgtaaggtccttattgagatcacgggaacttcggtgagccttttggagtgctatagtgatcctaagctacaaaagagagccgcgcaggagcatgcggcagagggagctctgtggtacctcaagcaccttggatacctaccaagagatgaaaatcgtttctagcgacattttaggttttgtagccttcagtcacataaataaacctcggatgggaagagttctgttattgtaagcatgcagtctattcagaggtatatagcatcctggaatctcaatccaacagtcaacagtgcaaaaaaatcataaaagatgcaaaaatgatgacgtgcttctcatcaggctgacatcggaggacatctgcattgtacaacatccaaattgtatgggaagattttcgtcggtatgggtacatatttgggagaaaatcttctcattagctatggtgggtatgtgtatgggaatgcagaattcgaacctgattataactagcaaaattagttgtgtaacccaatagataataaacccaataactaacccacttgtcctaacccttttaagcatccatctacccaacttagacgatcaaccacccgttgtcccatccactagttcacgtgtcatttatttttgttgttttatatagttaaacaatttttttcttgttaaatatcagtatatttgtgttatgttgttgactgtgaaccatacatgtgtcaggatcagaaattcacttacataactggatatcatcatacagtgttcaaataatagcgtaaaaaat

SEQ ID NO: 17415 - DNA, 1132 bp, Zea Mays
ctcatacctctactctgcttaccctgatctcaagcctggtcaactaacagatctgaaatcattagctgtcaataacaattcatttgcttatgtcgccgttaagaaatctatccataggtatctcataaaggattctaactatcttacgacagcggtaaataaattcgcgaattatgttaacctttccagttcagagaaagacttgttagaagaaccaacatgtccaaaggtgatatggtccgcaaaacagcaaggtcattcctttatgaattatgtgctgcaaactattggaaacctcctgaatttgagttatgcaacgatgaaggaccaagtcaccttcgaaagttcacatgtaaggtccttattgagatcacgggaacttcggtgagccttttggagtgctatagtgatcctaagctacaaaagagagccgcgcaggagcatgcggcagagggagctctgtggtacctcaagcaccttggatacctaccaagagatgaaaatcgtttctagcgacattttaggttttgtagccttcagtcacataaataaacctcggatgggaagagttctgttattgtaagcatgcagtctattcagaggtatatagcatcctggaatctcaatccaacagtcaacagtgcaaaaaaatcataaaagatgcaaaaatgatgacgtgcttctcatcaggctgacatcggaggacatctgcattgtacaacatccaaattgtatgggaagattttcgtcggtatgggtacatatttgggagaaaatcttctcattagctatggtgggtatgtgtatgggaatgcagaattcgaacctgattataactagcaaaattagttgtgtaacccaatagataataaacccaataactaacccacttgtcctaacccttttaagcatccatctacccaacttagacgatcaaccacccgttgtcccatccactagttcacgtgtcatttatttttgttgttttatatagttaaacaatttttttcttgttaaatatcagtatatttgtgttatgttgttgactgtgaaccatacatgtgtcaggatcagaaattcacttacataactggatatcatcatacagtgttcaaataatagcgtaaaaaat

SEQ ID NO: 17416 - DNA, 1678 bp, Zea Mays
  misc_feature (1)..(2): n is a, c, g, or t
nncctcatacctctactctgcttaccctgatctcaagcctggtcaactaacagatctgaaatcattagctgtcaataacaattcatttgcttatgtcgccgttaagaaatctatccataggtatctcataaaggattctaactatcttacgacagcggtaaataaattcgcgaattatgttaacctttccagttcagagaaagacttgttagaagaaccaacatgtccaaaggttcttggtgatattgttgaatcttgtgttggtgctgtgcttttagattctggcttcaacctgaaccatgtttggaagctaatgctaatgcttcttaaaccaatattgagcttttgtggcatgcacatcgatcctatgagagaactccgagaaacttgtcaatataatggttttgacttgggacttcccgaacctacgaagtacaatggagagttccatgtcaaagtagaagttaacataaacggcaagatgataagctgtactgcagcaaaccggaattcaaaagatgctagaaaagtagctgcacaagaaacactttcgaaactgaagaattatgggtacaagcataaaagaaagtcgctggaggaaattttgcgttctaccacgaaaaaagaatcggaactgataggctatgatgaagaaccaatcaatgttgaggatgacattgacatgcaaatgaataatctactgataaatggagaaagaacctccattcagagtacagcgggagataacaaggttgacaagaatgatgctaatagtggaaggaataataagtccaatgtggtcatgcagaatggttgcctacctagaggggcaactgataaaataaaccaaaaagaatatcatggtgatatggtccgcaaaacagcaaggtcattcctttatgaattatgtgctgcaaactattggaaacctcctgaatttgagttatgcaacgatgaaggaccaagtcaccttcgaaagttcacatgtaaggtccttattgagatcacgggaacttcggtgagccttttggagtgctatagtgatcctaagctacaaaagagagccgcgcaggagcatgcggcagagggagctctgtggtacctcaagcaccttggatacctaccaagagatgaaaatcgtttctagcgacattttaggttttgtagccttcagtcacataaataaacctcggatgggaagagttctgttattgtaagcatgcagtctattcagaggctgacatcggaggacatctgcattgtacaacatccaaattgtatgggaagattttcgtcggtatgggtacatatttgggagaaaatcttctcattagctatggtgggtatgtgtatgggaatgcagaattcgaacctgattataactagcaaaattagttgtgtaacccaatagataataaacccaataactaacccacttgtcctaacccttttaagcatccatctacccaacttagacgatcaaccacccgttgtcccatccactagttcacgtgtcatttatttttgttgttttatatagttaaacaatttttttcttgttaaatatcagtatatttgtgttatgttgttgactgtgaaccatacatgtgtcaggatcagaaattcacttacataactggatatcatcatacagtgttcaaataatagcgtaaaaaat

SEQ ID NO: 17417 - DNA, 3477 bp, Zea Mays
catcaattgacgcacgcctcctgcggcagatccgcaattccgcagcccgcacacgaaaaccaggcgagacagtttgggtatcctgtgaacccggcctccccggccatcagcagtgccccccgggccccggtctattcagctattcttctcgtgctcccacctctctctctctctctctctctctgcttacctcaacttggggaacgcgcacggccgttccacatacgccgagactccgacagactcagctcccagggttctgttcctttcccccacaatcgtacgcttccgctcgaagcttccgccatgagcgaggacgaggctgagagctcgagctccggcgcggccgcgagcgaacccaaggatccgagaacgatcgctcgcaaatatcagctggatctttgcaagagggcagtcgatgagaacatcatagtgtatcttggaacgggatgtgggaagacacacattgccgtgttactcatgtatgagcttggtcacctcatccgcaaacccagccgcgaggtctgcgtcttcctcgcaccgaccataccccttgtccgtcagcaagcaatggtgattgcagattccacaaattttaaagttcaacgttactatggaagtggtaaacactctagagatcaccaggcatgggagaaagagatgggagaatatgaggtccttgtaatgacccctcaaatattattgcacaatttgcggcattgtttcatcaggatggacttaattgcactattgatatttgatgaatgtcatcatgcacaagcacaaaaaaggcatccatatgcacaaattatgaaggaattctacaataatgctgataaacatcctcgtgtttttggcatgactgcttcaccaattattggaaaaggtggttctaacaagcttacctacactaaatgtatcaacagtctcgaggaattacttaatgcaaaggtttgttcagttgataatgtagaacttgaaagtgtgattgcttctcctaaggttgaagtgtacttttatggtccagttggtcactctaacttgactacagcttatatcaaagagcttggtggctataagtttcagtctgaatgcatgttaagagagagtgtatgcaatttcaatgagtcactgaagaaactgaagtccttatggaggttgcatgaaaatttgattttctgtttgcaagaagttggtctctttggagctctccaagctgcaaggacttttctctcttccagtagtgttagtctagatggaaagggggctgacattaatgattatgcaaacaaagcaatgtctcttctcagccgggacatcttagaaggtccggatgctgattcatttgacttagagacaatagaagaacctttcttctcaaaaaaatttgcagttcttattaacgttctatcgagatacaggttggaggaaaacatgaagtgcattgtttttgtgaaaagaatcattgtcgcaagagtagtagttcaaattctccaaaatctgaagtgccttgatttttggagatgtgagtttcttgtgggatgccactcggggttaaggaatatgtcaagggataagatgagttctatcattgaaaagttctcttcgggtgaggtaaaccttttggttgctactagtgtaggtgaggagggacttgatattcagacttgctgccttgttgtgcggtttgatctccctgaaactgttaatagctttatccaatcaagggggcgtgcccggatgagtaaatcgaaatatgtttttctcttggagaggggaaatcattctcaggagaagttacttgatgattatattactggtgaaatcattatggataaagagattaacttgagaacatcaaatgatatgttcaattgccttgaggagaacatctatcgagtcaatgatactggtgcttccattagcactgcttgcagtgtatctctattacatcgctactgtgataaccttcctagagatattttttttgttccttccccatcattcttctttgttgatgacgtcgatggaatagtatgcaaattaattcttccaccaaatgctgctttccgtcaagtgaatggtcaaccctgtccatcgaaagatgaagctaagagagatgcatgcttgaaagcatgcatcaaacttcatgaactcggtgctttgacagattttcttctacctggccaaggctctagaaagattaaggtatcaacaacaaataattcagaaagcaacaaagacgatgatgaaagttttagggaagagctttatgagatgttaatccctgcagttctgagaccttcaagatgcaaactagactcctcgtttaagttgcatttctattacatagaatttattcccataccagcagatagacgatatcagatgtttggtctttttgtgatcaatcgccttccagaggaatctgaaaagttggatgttgaattgcatcttgctcgtgcgaggattgtgaaagcaggaattaaatatttgggaaagattgagtttaacaaagaagagatgatactcgcacacaattttcaagaaatgtttttgaaagttctcctggatagatctgagttcacaccatcttatattttgttggggaatgatggtgcattggacatggattcaacattttaccttttacttcccatcaagcagaaattctatggtgataatatgattgattggccagcagtaaagcggtgtttatcatcacctgcatttcaagatccaatgggtttgtctctgcatgattcatatttaccaaatgagtctttgaagcttcttggtggaacatacaacaaagctgatgtgattggcagtttggtctatactccccacaccgacctgtttttcttcgttgatgccattctggatggaacaaatgctaaaagtgagttgaacggtgcaacgtatgcagaacattttaaacaaaggttacatatcaagctttcccatcctgagcagccgcttttgaaagctaagcaactcttctgtctgcgtaatctgcttcataaccgacaactagagagcacagaatctgaggctcgtgaattgatggagcactttgtggagttacctccagagctatgctctttgaagataattgggttctcaaaagatatgggcagttctttgtccttgctaccatctctaatgtatcgcttggagaatttgttggtggctattgagttgaaggatgtcatgtcatcttatttcccagaggcttctcaaattagtgcctcgggtatccttgaatcattgactactgaaaggtgtttagagaggatctctttggagcgattagaagtcctaggtgatgctttcttgaagtatgtagttgggcgtcataactttatttcatatgagggacttgatgaaggtcagttgaccaggagacgttctgatatagtgagtaattcgaatttgtatgagttatcaattagaagaaatttgcaggtataaatg

SEQ ID NO: 17418 - DNA, 4328 bp, Zea Mays
cacctctctctctctctctctctctctgcttacctcaacttggggaacgcgcacggccgttccacatacgccgagactccgacagactcagctcccagggttctgttcctttcccccacaatcgtacgcttccgctcgaagcttccgccatgagcgaggacgaggctgagagctcgagctccggcgcggccgcgagcgaacccaaggatccgagaacgatcgctcgcaaatatcagctggatctttgcaagagggcagtcgatgagaacatcatagtgtatcttggaacgggatgtgggaagacacacattgccgtgttactcatgtatgagcttggtcacctcatccgcaaacccagccgcgaggtctgcgtcttcctcgcaccgaccataccccttgtccgtcagcaagcaatggtgattgcagattccacaaattttaaagttcaacgttactatggaagtggtaaacactctagagatcaccaggcatgggagaaagagatgggagaatatgaggtccttgtaatgacccctcaaatattattgcacaatttgcggcattgtttcatcaggatggacttaattgcactattgatatttgatgaatgtcatcatgcacaagcacaaaaaaggcatccatatgcacaaattatgaaggaattctacaataatgctgataaacatcctcgtgtttttggcatgactgcttcaccaattattggaaaaggtggttctaacaagcttacctacactaaatgtatcaacagtctcgaggaattacttaatgcaaaggtttgttcagttgataatgtagaacttgaaagtgtgattgcttctcctaaggttgaagtgtacttttatggtccagttggtcactctaacttgactacagcttatatcaaagagcttggtggctataagtttcagtctgaatgcatgttaagagagagtgtatgcaatttcaatgagtcactgaagaaactgaagtccttatggaggttgcatgaaaatttgattttctgtttgcaagaagttggtctctttggagctctccaatgcaggctgcaaggacttttctctcttccagtagtgttagtctagatggaaagggggctgacattaatgattatgcaaacaaagcaatgtctcttctcagccgggacatcttagaaggtccggatgctgattcatttgacttagagacaatagaagaacctttcttctcaaaaaaatttgcagttcttattaacgttctatcgagatacaggttggaggaaaacatgaagtgcattgtttttgtgaaaagaatcattgtcgcaagagtagtagttcaaattctccaaaatctgaagtgccttgatttttggagatgtgagtttcttgtgggatgccactcggggttaaggaatatgtcaagggataagatgagttctatcattgaaaagttctcttcgggtgaggtaaaccttttggttgctactagtgtaggtgaggagggacttgatattcagacttgctgccttgttgtgcggtttgatctccctgaaactgttaatagctttatccaatcaagggggcgtgcccggatgagtaaatcgaaatatgtttttctcttggagaggggaaatcattctcaggagaagttacttgatgattatattactggtgaaatcattatggataaagagattaacttgagaacatcaaatgatatgttcaattgccttgaggagaacatctatcgagtcaatgatactggtgcttccattagcactgcttgcagtgtatctctattacatcgctactgtgataaccttcctagagatattttttttgttccttccccatcattcttctttgttgatgacgtcgatggaatagtatgcaaattaattcttccaccaaatgctgctttccgtcaagtgaatggtcaaccctgtccatcgaaagatgaagctaagagagatgcatgcttgaaagcatgcatcaaacttcatgaactcggtgctttgacagattttcttctacctggccaaggctctagaaagattaaggtatcaacaacaaataattcagaaagcaacaaagacgatgatgaaagttttagggaagagctttatgagatgttaatccctgcagttctgagaccttcaagatgcaaactagactcctcgtttaagttgcatttctattacatagaatttattcccataccagcagatagacgatatcagatgtttggtctttttgtgatcaatcgccttccagaggaatctgaaaagttggatgttgaattgcatcttgctcgtgcgaggattgtgaaagcaggaattaaatatttgggaaagattgagtttaacaaagaagagatgatactcgcacacaattttcaagaaatgtttttgaaagttctcctggatagatctgagttcacaccatcttatattttgttggggaatgatggtgcattggacatggattcaacattttaccttttacttcccatcaagcagaaattctatggtgataatatgattgattggccagcagtaaagcggtgtttatcatcacctgcatttcaagatccaatgggtttgtctctgcatgattcatatttaccaaatgagtctttgaagcttcttggtggaacatacaacaaagctgatgtgattggcagtttggtctatactccccacaccgacctgtttttcttcgttgatgccattctggatggaacaaatgctaaaagtgagttgaacggtgcaacgtatgcagaacattttaaacaaaggttacatatcaagctttcccatcctgagcagccgcttttgaaagctaagcaactcttctgtctgcgtaatctgcttcataaccgacaactagagagcacagaatctgaggctcgtgaattgatggagcactttgtggagttacctccagagctatgctctttgaagataattgggttctcaaaagatatgggcagttctttgtccttgctaccatctctaatgtatcgcttggagaatttgttggtggctattgagttgaaggatgtcatgtcatcttatttcccagaggcttctcaaattagtgcctcgggtatccttgaatcattgactactgaaaggtgtttagagaggatctctttggagcgattagaagtcctaggtgatgctttcttgaagtatgtagttgggcgtcataactttatttcatatgagggacttgatgaaggtcagttgaccaggagacgttctgatatagtgagtaattcgaatttgtatgagttatcaattagaagaaatttgcagacatccaatgtgcttgtccttgtgctattgacatggttggttgaacggttgaacctcaagcacaagatggcaaaagtttaaattatgatttttgtcacgactatttataaacagacccacgttgtggcttgggacttagtgttgcattttttttaacatgcaggagtacaatatcaaatatcccatgcaaaataagttaaggcatcgagaaaaaaaagttaaggcatatgcctcagtggttgagaaagaaaacaaacaaaaaaaggtcttaaagccctttgtgtgtcataatagccatcttgcagctccttttttctctcgaaccacacaggagaactgcgtgtcatttcattaagaaaaaagaaaggaattcaaatccctgagaggttagcaaccccttagggctagtttggaaactcaaatcccttcgggattgaaggggattggagaggaaattagttcatttcaacctcaatcccctccaatcccgaaagggatttgaggttcccaaagtagcccttaggggaaatccctcgctattcaaatcccccctcccccatggatcccttccaattcccttgtcaccaaaccagcccttaggggatagaaaaccaacaccgttctttttttctcgaacgtgcaggagaactgcgccccattatatattaagcagaaaaaaggggtggtcttaaaagaccaatacaaaaatcccagcttggtcacggcccttaggatggttagggaagaggcggtgctctggtccatgactggtgccaaggccttgtccttcctccaagtcgatgagttgctggcttaaaacagcggtgtgggtcgtgtttcctccatgttttagtcggtgatccgtagttagtctctagtggtgtgtgtgctgtattggggttctctcccccctttcttttcttctattaatacaaagatgtgcagctctcctgcgtattctagaaaaaaaggtctccttacggaggccagtagcaagcatacataaataacg

SEQ ID NO: 17419 - DNA, 4497 bp, Zea Mays
cgtgctcccacctctctctctctctctctctctctgcttacctcaacttggggaacgcgcacggccgttccacatacgccgagactccgacagactcagctcccagggttctgttcctttcccccacaatcgtacgcttccgctcgaagcttccgccatgagcgaggacgaggctgagagctcgagctccggcgcggccgcgagcgaacccaaggatccgagaacgatcgctcgcaaatatcagctggatctttgcaagagggcagtcgatgagaacatcatagtgtatcttggaacgggatgtgggaagacacacattgccgtgttactcatgtatgagcttggtcacctcatccgcaaacccagccgcgaggtctgcgtcttcctcgcaccgaccataccccttgtccgtcagcaagcaatggtgattgcagattccacaaattttaaagttcaacgttactatggaagtggtaaacactctagagatcaccaggcatgggagaaagagatgggagaatatgaggtccttgtaatgacccctcaaatattattgcacaatttgcggcattgtttcatcaggatggacttaattgcactattgatatttgatgaatgtcatcatgcacaagcacaaaaaaggcatccatatgcacaaattatgaaggaattctacaataatgctgataaacatcctcgtgtttttggcatgactgcttcaccaattattggaaaaggtggttctaacaagcttacctacactaaatgtatcaacagtctcgaggaattacttaatgcaaaggtttgttcagttgataatgtagaacttgaaagtgtgattgcttctcctaaggttgaagtgtacttttatggtccagttggtcactctaacttgactacagcttatatcaaagagcttggtggctataagtttcagtctgaatgcatgttaagagagagtgtatgcaatttcaatgagtcactgaagaaactgaagtccttatggaggttgcatgaaaatttgattttctgtttgcaagaagttggtctctttggagctctccaagctgcaaggacttttctctcttccagtagtgttagtctagatggaaagggggctgacattaatgattatgcaaacaaagcaatgtctcttctcagccgggacatcttagaaggtccggatgctgattcatttgacttagagacaatagaagaacctttcttctcaaaaaaatttgcagttcttattaacgttctatcgagatacaggttggaggaaaacatgaagtgcattgtttttgtgaaaagaatcattgtcgcaagagtagtagttcaaattctccaaaatctgaagtgccttgatttttggagatgtgagtttcttgtgggatgccactcggggttaaggaatatgtcaagggataagatgagttctatcattgaaaagttctcttcgggtaaaccttttggttgctactagtgtaggtgaggagggacttgatattcagacttgctgccttgttgtgcggtttgatctccctgaaactgttaatagctttatccaatcaagggggcgtgcccggatgagtaaatcgaaatatgtttttctcttggagaggggaaatcattctcaggagaagttacttgatgattatattactggtgaaatcattatggataaagagattaacttgagaacatcaaatgatatgttcaattgccttgaggagaacatctatcgagtcaatgatactggtgcttccattagcactgcttgcagtgtatctctattacatcgctactgtgataaccttcctagagatatgtatgcaaaggatcatttattattctacccattttgtgtcatgggaatatcctagaataatttgatacatcttgttgcagtttttttgttccttccccatcattcttctttgttgatgacgtcgatggaatagtatgcaaattaattcttccaccaaatgctgctttccgtcaagtgaatggtcaaccctgtccatcgaaagatgaagctaagagagatgcatgcttgaaagcatgcatcaaacttcatgaactcggtgctttgacagattttcttctacctggccaaggctctagaaagattaaggtatcaacaacaaataattcagaaagcaacaaagacgatgatgaaagttttagggaagagctttatgagatgttaatccctgcagttctgagaccttcaagatgcaaactagactcctcgtttaagttgcatttctattacatagaatttattcccataccagcagatagacgatatcagatgtttggtctttttgtgatcaatcgccttccagaggaatctgaaaagttggatgttgaattgcatcttgctcgtgcgaggattgtgaaagcaggaattaaatatttgggaaagattgagtttaacaaagaagagatgatactcgcacacaattttcaagaaatgtttttgaaagttctcctggatagatctgagttcacaccatcttatattttgttggggaatgatggtgcattggacatggattcaacattttaccttttacttcccatcaagcagaaattctatggtgataatatgattgattggccagcagtaaagcggtgtttatcatcacctgcatttcaagatccaatgggtttgtctctgcatgattcatatttaccaaatgagtctttgaagcttcttggtggaacatacaacaaagctgatgtgattggcagtttggtctatactccccacaccgacctgtttttcttcgttgatgccattctggatggaacaaatgctaaaagtgagttgaacggtgcaacgtatgcagaacattttaaacaaaggttacatatcaagctttcccatcctgagcagccgcttttgaaagctaagcaactcttctgtctgcgtaatctgcttcataaccgacaactagagagcacagaatctgaggctcgtgaattgatggagcactttgtggagttacctccagagctatgctctttgaagataattgggttctcaaaagatatgggcagttctttgtccttgctaccatctctaatgtatcgcttggagaatttgttggtggctattgagttgaaggatgtcatgtcatcttatttcccagaggcttctcaaattagtgcctcgggtatccttgaatcattgactactgaaaggtgtttagagaggatctctttggagcgattagaagtcctaggtgatgctttcttgaagtatgtagttgggcgtcataactttatttcatatgagggacttgatgaaggtcagttgaccaggagacgttctgatatagtgagtaattcgaatttgtatgagttatcaattagaagaaatttgcaggtgagttgattgtatcgatgatcccaatatttattttatgctaagttttatatatttatagcagttatttcatactatcttattgtagaagacatccaatgtgcttgtccttgtgctattgacatggttggttgaacggttgaacctcaagcacaagatggcaaaagtttaaattatgatttttgtcacgactatttataaacagacccacgttgtggcttgggacttagtgttgcattttttttaacatgcaggagtacaatatcaaatatcccatgcaaaataagttaaggcatcgagaaaaaaaagttaaggcatatgcctcagtggttgagaaagaaaacaaacaaaaaaaggtcttaaagccctttgtgtgtcataatagccatcttgcagctccttttttctctcgaaccacacaggagaactgcgtgtcatttcattaagaaaaaagaaaggaattcaaatccctgagaggttagcaaccccttagggctagtttggaaactcaaatcccttcgggattgaaggggattggagaggaaattagttcatttcaacctcaatcccctccaatcccgaaagggatttgaggttcccaaagtagcccttaggggaaatccctcgctattcaaatcccccctcccccatggatcccttccaattcccttgtcaccaaaccagcccttaggggatagaaaaccaacaccgttctttttttctcgaacgtgcaggagaactgcgccccattatatattaagcagaaaaaaggggtggtcttaaaagaccaatacaaaaatcccagcttggtcacggcccttaggatggttagggaagaggcggtgctctggtccatgactggtgccaaggccttgtccttcctccaagtcgatgagttgctggcttaaaacagcggtgtgggtcgtgtttcctccatgttttagtcggtgatccgtagttagtctctagtggtgtgtgtgctgtattggggttctctcccccctttcttttcttctattaatacaaagatgtgcagctctcctgcgtattctagaaaaaaaggtctccttacggaggccagtagcaagcatacataaataacg

SEQ ID NO: 17420 - DNA, 4422 bp, Zea Mays
agctattcttctcgtgctcccacctctctctctctctctctctctctgcttacctcaacttggggaacgcgcacggccgttccacatacgccgagactccgacagactcagctcccagggttctgttcctttcccccacaatcgtacgcttccgctcgaagcttccgccatgagcgaggacgaggctgagagctcgagctccggcgcggccgcgagcgaacccaaggatccgagaacgatcgctcgcaaatatcagctggatctttgcaagagggcagtcgatgagaacatcatagtgtatcttggaacgggatgtgggaagacacacattgccgtgttactcatgtatgagcttggtcacctcatccgcaaacccagccgcgaggtctgcgtcttcctcgcaccgaccataccccttgtccgtcagcaagcaatggtgattgcagattccacaaattttaaagttcaacgttactatggaagtggtaaacactctagagatcaccaggcatgggagaaagagatgggagaatatgaggtccttgtaatgacccctcaaatattattgcacaatttgcggcattgtttcatcaggatggacttaattgcactattgatatttgatgaatgtcatcatgcacaagcacaaaaaaggcatccatatgcacaaattatgaaggaattctacaataatgctgataaacatcctcgtgtttttggcatgactgcttcaccaattattggaaaaggtggttctaacaagcttacctacactaaatgtatcaacagtctcgaggaattacttaatgcaaaggtttgttcagttgataatgtagaacttgaaagtgtgattgcttctcctaaggttgaagtgtacttttatggtccagttggtcactctaacttgactacagcttatatcaaagagcttggtggctataagtttcaggtgatctgaatgcatgttaagagagagtgtatgcaatttcaatgagtcactgaagaaactgaagtccttatggaggttgcatgaaaatttgattttctgtttgcaagaagttggtctctttggagctctccaagctgcaaggacttttctctcttccagtagtgttagtctagatggaaagggggctgacattaatgattatgcaaacaaagcaatgtctcttctcagccgggacatcttagaaggtccggatgctgattcatttgacttagagacaatagaagaacctttcttctcaaaaaaatttgcagttcttattaacgttctatcgagatacaggttggaggaaaacatgaagtgcattgtttttgtgaaaagaatcattgtcgcaagagtagtagttcaaattctccaaaatctgaagtgccttgatttttggagatgtgagtttcttgtgggatgccactcggggttaaggaatatgtcaagggataagatgagttctatcattgaaaagttctcttcgggtgaggtaaaccttttggttgctactagtgtaggtgaggagggacttgatattcagacttgctgccttgttgtgcggtttgatctccctgaaactgttaatagctttatccaatcaagggggcgtgcccggatgagtaaatcgaaatatgtttttctcttggagaggggaaatcattctcaggagaagttacttgatgattatattactggtgaaatcattatggataaagagattaacttgagaacatcaaatgatatgttcaattgccttgaggagaacatctatcgagtcaatgatactggtgcttccattagcactgcttgcagtgtatctctattacatcgctactgtgataaccttcctagagatattttttttgttccttccccatcattcttctttgttgatgacgtcgatggaatagtatgcaaattaattcttccaccaaatgctgctttccgtcaagtgaatggtcaaccctgtccatcgaaagatgaagctaagagagatgcatgcttgaaagcatgcatcaaacttcatgaactcggtgctttgacagattttcttctacctggccaaggctctagaaagattaaggtatcaacaacaaataattcagaaagcaacaaagacgatgatgaaagttttagggaagagctttatgagatgttaatccctgcagttctgagaccttcaagatgcaaactagactcctcgtttaagttgcatttctattacatagaatttattcccataccagcagatagacgatatcagatgtttggtctttttgtgatcaatcgccttccagaggaatctgaaaagttggatgttgaattgcatcttgctcgtgcgaggattgtgaaagcaggaattaaatatttgggaaagattgagtttaacaaagaagaggcactgtcttgcttatctgttcagatgccaacacaaaattttcagggagcaatgcctgacatgtcttttttcttttatcttacagatgatactcgcacacaattttcaagaaatgtttttgaaagttctcctggatagatctgagttcacaccatcttatattttgttggggaatgatggtgcattggacatggattcaacattttaccttttacttcccatcaagcagaaattctatggtgataatatgattgattggccagcagtaaagcggtgtttatcatcacctgcatttcaagatccaatgggtttgtctctgcatgattcatatttaccaaatgagtctttgaagcttcttggtggaacatacaacaaagctgatgtgattggcagtttggtctatactccccacaccgacctgtttttcttcgttgatgccattctggatggaacaaatgctaaaagtgagttgaacggtgcaacgtatgcagaacattttaaacaaagaatctgaggctcgtgaattgatggagcactttgtggagttacctccagagctatgctctttgaagataattgggttctcaaaagatatgggcagttctttgtccttgctaccatctctaatgtatcgcttggagaatttgttggtggctattgagttgaaggatgtcatgtcatcttatttcccagaggcttctcaaattagtgcctcgggtatccttgaatcattgactactgaaaggtgtttagagaggatctctttggagcgattagaagtcctaggtgatgctttcttgaagtatgtagttgggcgtcataactttatttcatatgagggacttgatgaaggtcagttgaccaggagacgttctgatatagtgagtaattcgaatttgtatgagttatcaattagaagaaatttgcaggtgagttgattgtatcgatgatcccaatatttattttatgctaagttttatatatttatagcagttatttcatactatcttattgtagaagacatccaatgtgcttgtccttgtgctattgacatggttggttgaacggttgaacctcaagcacaagatggcaaaagtttaaattatgatttttgtcacgactatttataaacagacccacgttgtggcttgggacttagtgttgcattttttttaacatgcaggagtacaatatcaaatatcccatgcaaaataagttaaggcatcgagaaaaaaaagttaaggcatatgcctcagtggttgagaaagaaaacaaacaaaaaaaggtcttaaagccctttgtgtgtcataatagccatcttgcagctccttttttctctcgaaccacacaggagaactgcgtgtcatttcattaagaaaaaagaaaggaattcaaatccctgagaggttagcaaccccttagggctagtttggaaactcaaatcccttcgggattgaaggggattggagaggaaattagttcatttcaacctcaatcccctccaatcccgaaagggatttgaggttcccaaagtagcccttaggggaaatccctcgctattcaaatcccccctcccccatggatcccttccaattcccttgtcaccaaaccagcccttaggggatagaaaaccaacaccgttctttttttctcgaacgtgcaggagaactgcgccccattatatattaagcagaaaaaaggggtggtcttaaaagaccaatacaaaaatcccagcttggtcacggcccttaggatggttagggaagaggcggtgctctggtccatgactggtgccaaggccttgtccttcctccaagtcgatgagttgctggcttaaaacagcggtgtgggtcgtgtttcctccatgttttagtcggtgatccgtagttagtctctagtggtgtgtgtgctgtattggggttctctcccccctttcttttcttctattaatacaaagatgtgcagctctcctgcgtattctagaaaaaaaggtctccttacggaggccagtagcaagcatacataaataacg

SEQ ID NO: 17421 - DNA, 4476 bp, Zea Mays
atcctgtgaacccggcctccccggccatcagcagtgccccccgggccccggtctattcagctattcttctcgtgctcccacctctctctctctctctctctctctgcttacctcaacttggggaacgcgcacggccgttccacatacgccgagactccgacagactcagctcccagggttctgttcctttcccccacaatcgtacgcttccgctcgaagcttccgccatgagcgaggacgaggctgagagctcgagctccggcgcggccgcgagcgaacccaaggatccgagaacgatcgctcgcaaatatcagctggatctttgcaagagggcagtcgatgagaacatcatagtgtatcttggaacgggatgtgggaagacacacattgccgtgttactcatgtatgagcttggtcacctcatccgcaaacccagccgcgaggtctgcgtcttcctcgcaccgaccataccccttgtccgtcagcaagcaatggtgattgcagattccacaaattttaaagttcaacgttactatggaagtggtaaacactctagagatcaccaggcatgggagaaagagatgggagaatatgaggtccttgtaatgacccctcaaatattattgcacaatttgcggcattgtttcatcaggatggacttaattgcactattgatatttgatgaatgtcatcatgcacaagcacaaaaaaggcatccatatgcacaaattatgaaggaattctacaataatgctgataaacatcctcgtgtttttggcatgactgcttcaccaattattggaaaaggtggttctaacaagcttacctacactaaatgtatcaacagtctcgaggaattacttaatgcaaaggtttgttcagttgataatgtagaacttgaaagtgtgattgcttctcctaaggttgaagtgtacttttatggtccagttggtcactctaacttgactacagcttatatcaaagagcttggtggctataagtttcagtctgaatgcatgttaagagagagtgtatgcaatttcaatgagtcactgaagaaactgaagtccttatggaggttgcatgaaaatttgattttctgtttgcaagaagttggtctctttggagctctccaagctgcaaggacttttctctcttccagtagtgttagtctagatggaaagggggctgacattaatgattatgcaaacaaagcaatgtctcttctcagccgggacatcttagaaggtccggatgctgattcatttgacttagagacaatagaagaacctttcttctcaaaaaaatttgcagttcttattaacgttctatcgagatacaggttggaggaaaacatgaagtgcattgtttttgtgaaaagaatcattgtcgcaagagtagtagttcaaattctccaaaatctgaagtgccttgatttttggagatgtgagtttcttgtgggatgccactcggggttaaggaatatgtcaagggataagatgagttctatcattgaaaagttctcttcgggtgaggtaaaccttttggttgctactagtgtaggtgaggagggacttgatattcagacttgctgccttgttgtgcggtttgatctccctgaaactgttaatagctttatccaatcaagggggcgtgcccggatgagtaaatcgaaatatgtttttctcttggagaggggaaatcattctcaggagaagttacttgatgattatattactggtgaaatcattatggataaagagattaacttgagaacatcaaatgatatgttcaattgccttgaggagaacatctatcgagtcaatgatactggtgcttccattagcactgcttgcagtgtatctctattacatcgctactgtgataaccttcctagagatattttttttgttccttccccatcattcttctttgttgatgacgtcgatggaatagtatgcaaattaattcttccaccaaatgctgctttccgtcaagtgaatggtcaaccctgtccatcgaaagatgaagctaagagagatgcatgcttgaaagcatgcatcaaacttcatgaactcggtgctttgacagattttcttctacctggccaaggctctagaaagattaaggtatcaacaacaaataattcagaaagcaacaaagacgatgatgaaagttttagggaagagctttatgagatgttaatccctgcagttctgagaccttcaagatgcaaactagactcctcgtttaagttgcatttctattacatagaatttattcccataccagcagatagacgatatcagatgtttggtctttttgtgatcaatcgccttccagaggaatctgaaaagttggatgttgaattgcatcttgctcgtgcgaggattgtgaaagcaggaattaaatatttgggaaagattgagtttaacaaagaagaggcactgtcttgcttatctgttcagatgccaacacaaaattttcagggagcaatgcctgacatgtcttttttcttttatcttacagatgatactcgcacacaattttcaagaaatgtttttgaaagttctcctggatagatctgagttcacaccatcttatattttgttggggaatgatggtgcattggacatggattcaacattttaccttttacttcccatcaagcagaaattctatggtgataatatgattgattggccagcagtaaagcggtgtttatcatcacctgcatttcaagatccaatgggtttgtctctgcatgattcatatttaccaaatgagtctttgaagcttcttggtggaacatacaacaaagctgatgtgattggcagtttggtctatactccccacaccgacctgtttttcttcgttgatgccattctggatggaacaaatgctaaaagtgagttgaacggtgcaacgtatgcagaacattttaaacaaagaatctgaggctcgtgaattgatggagcactttgtggagttacctccagagctatgctctttgaagataattgggttctcaaaagatatgggcagttctttgtccttgctaccatctctaatgtatcgcttggagaatttgttggtggctattgagttgaaggatgtcatgtcatcttatttcccagaggcttctcaaattagtgcctcgggtatccttgaatcattgactactgaaaggtgtttagagaggatctctttggagcgattagaagtcctaggtgatgctttcttgaagtatgtagttgggcgtcataactttatttcatatgagggacttgatgaaggtcagttgaccaggagacgttctgatatagtgagtaattcgaatttgtatgagttatcaattagaagaaatttgcaggtgagttgattgtatcgatgatcccaatatttattttatgctaagttttatatatttatagcagttatttcatactatcttattgtagaagacatccaatgtgcttgtccttgtgctattgacatggttggttgaacggttgaacctcaagcacaagatggcaaaagtttaaattatgatttttgtcacgactatttataaacagacccacgttgtggcttgggacttagtgttgcattttttttaacatgcaggagtacaatatcaaatatcccatgcaaaataagttaaggcatcgagaaaaaaaagttaaggcatatgcctcagtggttgagaaagaaaacaaacaaaaaaaggtcttaaagccctttgtgtgtcataatagccatcttgcagctccttttttctctcgaaccacacaggagaactgcgtgtcatttcattaagaaaaaagaaaggaattcaaatccctgagaggttagcaaccccttagggctagtttggaaactcaaatcccttcgggattgaaggggattggagaggaaattagttcatttcaacctcaatcccctccaatcccgaaagggatttgaggttcccaaagtagcccttaggggaaatccctcgctattcaaatcccccctcccccatggatcccttccaattcccttgtcaccaaaccagcccttaggggatagaaaaccaacaccgttctttttttctcgaacgtgcaggagaactgcgccccattatatattaagcagaaaaaaggggtggtcttaaaagaccaatacaaaaatcccagcttggtcacggcccttaggatggttagggaagaggcggtgctctggtccatgactggtgccaaggccttgtccttcctccaagtcgatgagttgctggcttaaaacagcggtgtgggtcgtgtttcctccatgttttagtcggtgatccgtagttagtctctagtggtgtgtgtgctgtattggggttctctcccccctttcttttcttctattaatacaaagatgtgcagctctcctgcgtattctagaaaaaaaggtctccttacggaggccagtagcaagcatacataaataacg

SEQ ID NO: 17422 - DNA, 661 bp, Zea Mays
gttcattattcagaatataatgcggaaaatattgatgatactcgcacacaattttcaagaaatgtttttgaaagttctcctggatagatctgagttcacaccatcttatattttgttggggaatgatggtgcattggacatggattcaacattttaccttttacttcccatcaagcagaaattctatggtgataatatgattgattggccagcagtaaagcggtgtttatcatcacctgcatttcaagatccaatgggtttgtctctgcatgattcatatttaccaaatgagtctttgaagcttcttggtggaacatacaacaaagctgatgtgattggcagtttggtctatactccccacaccgacctgtttttcttcgttgatgccattctggatggaacaaatgctaaaagtgagttgaacggtgcaacgtatgcagaacattttaaacaaaggcacggtgtacggacatttttctgacactcttcttaatacaaagatacacaaccctcctgcgtgtagagaaaaaaaaccatgttgagcctccagcaaggcaaatatagttttttttaacaaatgcagaagagttgcgtgtcatttcattaagaaaaaaaaatacaaataggggcaggacaagacttgctggccccaattacagac

SEQ ID NO: 17423 - DNA, 3030 bp, Zea Mays
attcttctcgtgctcccacctctctctctctctctctctctctgcttacctcaacttggggaacgcgcacggccgttccacatacgccgagactccgacagactcagctcccagggttctgttcctttcccccacaatcgtacgcttccgctcgaagcttccgccatgagcgaggacgaggctgagagctcgagctccggcgcggccgcgagcgaacccaaggatccgagaacgatcgctcgcaaatatcagctggatctttgcaagagggcagtcgatgagaacatcatagtgtatcttggaacgggatgtgggaagacacacattgccgtgttactcatgtatgagcttggtcacctcatccgcaaacccagccgcgaggtctgcgtcttcctcgcaccgaccataccccttgtccgtcagcaagcaatggtgattgcagattccacaaattttaaagttcaacgttactatggaagtggtaaacactctagagatcaccaggcatgggagaaagagatgggagaatatgaggtccttgtaatgacccctcaaatattattgcacaatttgcggcattgtttcatcaggatggacttaattgcactattgatatttgatgaatgtcatcatgcacaagcacaaaaaaggcatccatatgcacaaattatgaaggaattctacaataatgctgataaacatcctcgtgtttttggcatgactgcttcaccaattattggaaaaggtggttctaacaagcttacctacactaaatgtatcaacagtctcgaggaattacttaatgcaaaggtttgttcagttgataatgtagaacttgaaagtgtgattgcttctcctaaggttgaagtgtacttttatggtccagttggtcactctaacttgactacagcttatatcaaagagcttggtggctataagtttcagcttctaatgtgctttgaacagtctgaatgcatgttaagagagagtgtatgcaatttcaatgagtcactgaagaaactgaagtccttatggaggttgcatgaaaatttgattttctgtttgcaagaagttggtctctttggagctctccaagctgcaaggacttttctctcttccagtagtgttagtctagatggaaagggggctgacattaatgattatgcaaacaaagcaatgtctcttctcagccgggacatcttagaaggtccggatgctgattcatttgacttagagacaatagaagaacctttcttctcaaaaaaatttgcagttcttattaacgttctatcgagatacaggttggaggaaaacatgaagtgcattgtttttgtgaaaagaatcattgtcgcaagagtagtagttcaaattctccaaaatctgaagtgccttgatttttggagatgtgagtttcttgtgggatgccactcggggttaaggaatatgtcaagggataagatgagttctatcattgaaaagttctcttcgggtgaggtaaaccttttggttgctactagtgtaggtgaggagggacttgatattcagacttgctgccttgttgtgcggtttgatctccctgaaactgttaatagctttatccaatcaagggggcgtgcccggatgagtaaatcgaaatatgtttttctcttggagaggggaaatcattctcaggagaagttacttgatgattatattactggtgaaatcattatggataaagagattaacttgagaacatcaaatgatatgttcaattgccttgaggagaacatctatcgagtcaatgatactggtgcttccattagcactgcttgcagtgtatctctattacatcgctactgtgataaccttcctagagatattttttttgttccttccccatcattcttctttgttgatgacgtcgatggaatagtatgcaaattaattcttccaccaaatgctgctttccgtcaagtgaatggtcaaccctgtccatcgaaagatgaagctaagagagatgcatgcttgaaagcatgcatcaaacttcatgaactcggtgctttgacagattttcttctacctggccaaggctctagaaagattaaggtatcaacaacaaataattcagaaagcaacaaagacgatgatgaaagttttagggaagagctttatgagatgttaatccctgcagttctgagaccttcaagatgcaaactagactcctcgtttaagttgcatttctattacatagaatttattcccataccagcagatagacgatatcagatgtttggtctttttgtgatcaatcgccttccagaggaatctgaaaagttggatgttgaattgcatcttgctcgtgcgaggattgtgaaagcaggaattaaatatttgggaaagattgagtttaacaaagaagagatgatactcgcacacaattttcaagaaatgtttttgaaagttctcctggatagatctgagttcacaccatcttatattttgttggggaatgatggtgcattggacatggattcaacattttaccttttacttcccatcaagcagaaattctatggtgataatatgattgattggccagcagtaaagcggtgtttatcatcacctgcatttcaagatccaatgggtttgtctctgcatgattcatatttaccaaatgagtctttgaagcttcttggtggaacatacaacaaagctgatgtgattggcagtttggtctatactccccacaccgacctgtttttcttcgttgatgccattctggatggaacaaatgctaaaagtgagttgaacggtgcaacgtatgcagaacattttaaacaaaggcacggtgtacggacatttttctgacactcttcttaatacaaagatacacaaccctcctgcgtgtagagaaaaaaaaccatgttgagcctccagcaaggcaaatatagttttttttaacaaatgcagaagagttgcgtgtcatttcattaagaaaaaaaaatacaaataggggcaggacaagacttgctggccccaattacagac

SEQ ID NO: 17424 - DNA, 639 bp, Zea Mays
cgcacggccgttccacatacgccgagactccgacagactcagctcccagggttctgttcctttcccccacaatcgtacgcttccgctcgaagcttccgccatgagcgaggacgaggctgagagctcgagctccggcgcggccgcgagcgaacccaaggatccgagaacgatcgctcgcaaatatcagctggatctttgcaagagggcagtcgatgagaacatcatagtgtatcttggaacgggatgtgggaagacacacattgccgtgttactcatgtatgagcttggtcacctcatccgcaaacccagccgcgaggtctgcgtcttcctcgcaccgaccataccccttgtccgtcagcaagcaatggtgattgcagattccacaaattttaaagttcaacgttactatggaagtggtaaacactctagagatcaccaggcatgggagaaagagatgggagaatatgaggtccttgtaatgacccctcaaatattattgcacaatttgcggcattgtttcatcaggatggacttaattgcactattgatatttgatgaatgtcatcatgcacaagcacaaaaaaggcatccatatgcacaaattatgaagtttattacataaagaatgctactcgattg

SEQ ID NO: 17425 - DNA, 615 bp, Zea Mays
cactgatctgccgatatatggttcatgccagtgaacttcgagaacctgttcagcaagtacgcgcgcacttccccggacaggctcacctacagggagctctggtcgatgacggaggggttccgcgacgccttcgacctctacggctggattgcggcgaagctggagtggacgatcctgtacgtgctggcgcgggacgacgaggggtacctgtcgcgggaggccatgcggcgcgtgtacgacggcagcctcttcgagtacgtggagaggcagcgcgcgcagcacgccaagatgtcctagctagagggaagaggatgcgacgtgggcacgtggcctcgatcgcgcgtgaatgaaatggaagccaagtgaacctgtctcggctggtatgtagatagtgagaagggtgtcggccggaaaacaagcagccgtgtgtactactccctcagctcccatcaataacgcagagttcgccggaccggcacctccccatctttgctacttcaacctggtttttcgcgcggtttatgtggctgtctgaagcgagacatgaatttgcgtattgtttaattttacaaaactactgaaatgaacaaaattggcctattagctcagttggtt

SEQ ID NO: 17426 - DNA, 1095 bp, Zea Mays
atacacgccagaaactaatccagatagctagcctttgatttctcacttcaatctgacgaagtgcacacctaggcaacaaactcgaacgcgcgcggtagtggagccgagatgcagggaggggcgacggccaagcagcagtcgccggtgaccgtcatgcgccccgtccgcggcgacctcgaggagcacctccccaagccatatctggcgcgagccctggtggccccggacatctaccaccccgacggcaccgcggccgacgagcacggccaccaccacatgagcgtgttgcagcagcacgtcgccttcttcgaccgcgacgacaacggcatcatctacccttgggagacgtactccggatgccgtgcgcttgggttcaacatgatcctgtctctcttgatcgctcttgtcgtgaacgggaccatgagctatgccacgctgcctgggtggctgccgtcccctctgttcccgatctacgtccacaacatccacaagagcaagcatggcagtgactctgggacctacgacaacgagggcaggttcatgccagtgaacttcgagaacctgttcagcaagtacgcgcgcacttccccggacaggctcacctacagggagctctggtcgatgacggaggggttccgcgacgccttcgacctctacggctggattgcggcgaagctggagtggacgatcctgtacgtgctggcgcgggacgacgaggggtacctgtcgcgggaggccatgcggcgcgtgtacgacggcagcctcttcgagtacgtggagaggcagcgcgcgcagcacgccaagatgtcctagctagagggaagaggatgcgacgtgggcacgtggcctcgatcgcgcgtgaatgaaatggaagccaagtgaacctgtctcggctggtatgtagatagtgagaagggtgtcggccggaaaacaagcagccgtgtgtactactccctcagctccccatctttgctacttcaacctggtttttcgcgcggtttatgtggctgtctgaagcgagacatgaatttgcgtattgtttaattttacaaaactactgaaatgaacaaaattggcctattagctcagttggtt

SEQ ID NO: 17427 - DNA, 1134 bp, Zea Mays
atacacgccagaaactaatccagatagctagcctttgatttctcacttcaatctgacgaagtgcacacctaggcaacaaactcgaacgcgcgcggtagtggagccgagatgcagggaggggcgacggccaagcagcaggcgtcgccggtgaccgtcatgcgccccgtccgcggcgacctcgaggagcacctccccaagccatatctggcgcgagccctggtggccccggacatctaccaccccgacggcaccgcggccgacgagcacggccaccaccacatgagcgtgttgcagcagcacgtcgccttcttcgaccgcgacgacaacggcatcatctacccttgggagacgtactccggatgccgtgcgcttgggttcaacatgatcctgtctctcttgatcgctcttgtcgtgaacgggaccatgagctatgccacgctgcctgggtggctgccgtcccctctgttcccgatctacgtccacaacatccacaagagcaagcatggcagtgactctgggacctacgacaacgagggcaggttcatgccagtgaacttcgagaacctgttcagcaagtacgcgcgcacttccccggacaggctcacctacagggagctctggtcgatgacggaggggttccgcgacgccttcgacctctacggctggattgcggcgaagctggagtggacgatcctgtacgtgctggcgcgggacgacgaggggtacctgtcgcgggaggccatgcggcgcgtgtacgacggcagcctcttcgagtacgtggagaggcagcgcgcgcagcacgccaagatgtcctagctagagggaagaggatgcgacgtgggcacgtggcctcgatcgcgcgtgaatgaaatggaagccaagtgaacctgtctcggctggtatgtagatagtgagaagggtgtcggccggaaaacaagcagccgtgtgtactactccctcagctcccatcaataacgcagagttcgccggaccggcacctccccatctttgctacttcaacctggtttttcgcgcggtttatgtggctgtctgaagcgagacatgaatttgcgtattgtttaattttacaaaactactgaaatgaacaaaattggcctattagctcagttggtt

SEQ ID NO: 17428 - DNA, 2025 bp, Zea Mays
ctgtttcaaggcattttgttgtagcaatagctggtgtcatatcgggagccctcctgtacattagagatgactttgctgcggtggaaaagagcactgtattaagggagacaatagtcagtatggctgttgctggagctatagttggagctgcatttggtggctggatgaacgacaagtttggaaggaggccttccatcatacttgccgatgcactgttctttggaggtgccgttatcatggcgttttccccaacacctagagttatcattgttgggagggtatttgttggtcttggtgttggaatggcttccatgacagctcctctgtacatctctgaagcctcccctgctaggatcagaggtgctctagtgagcacaaatgggcttctcatcactggtggccagttcttggcctacctcatcaatctagccttcactaaggtgccagggacctggcggtggatgcttggcattgcaggggttcctgccctggtccagttcgtactgatgctgatgctgccagaatcaccaagatggctctacaggaagggcaggaaagaggaagcagcagcaatcttgcacaagatttaccctgcgaatgaggtcgaggaagagattgactcaatgcgccggtctgtcgaagaagaggtgctccttgagggctccatcggtgagagtggcttcatgggcaagctgaggaaggcgatgggcagcaaggtcgttcgccgcgggctaacggccggcgtcatcgtccaggtcgcgcagcagttcgtgggcatcaataccgtcatgtactacagcccgacgatcgtgcagctggccggctatgcgtccaacaacacagccatggcactgtccctcatcacctcgggcctgaacgccatcggctcgatcgtcagcatgttcttcgtggacagggcaggccggaggcgcctgatgctgatcagcctggtcggaatcgtcgtgtggctcgccgtgctcggcggcacgttcctgggcgccgcacaccacgccccacccgtcagcgacctggagacccgactgttggcgaaccagaaccagacccagacccagacgtgtcccgagttcaacccgaacgtccgctggagctgcatggactgcctcaaggccgcgtccacgtgcggcttctgtgctcaccagggagacaagcttcttccgggggcgtgcttggcgctgaacaacgcgtctcggcatgcgtgccgcgcagaccaccgggagttctacacggaggggtgccccaacaacttcgggtggctggcactgatcggcctgggcgcgtacatcgtctcctactcgcccggcatgggcacggtgccgtggattgtcaactcggagatctacccgctgcggttcaggggcatctgcggcggcatcgctgccgtcgccaactgggtctccaatctcatcgtgacgcagacgttcctgtccctgaccaaggcgctcggaacatcggccaccttcttcctcttctgtgctgtctccttgctggcgctcgtcatcgtcttcctcaccgtgccggagactaaaggcctgcagttcgaggaagtggagcggatgctggaaagggaggactacaagccctggaagaggtaccatggtggcagcagcagcatcgagccggcgaagaacagtgatattggcctcaccccgccatgaaatccacttgttctgttatctagattcaagtagaagtagcaataattcgtagtggcagtttataataggccatctgctgctaatctctctctagatttccaagaagtgaaaaaatgaggtattagtcattcagtatgaaaatacgacatttggtagctgctatactttgttctagagcatttaatcttgattttagctctggggtggcttgtggcattagttgcgcactgtgtttaagacaacattcagaattgtttccttttttactttttaccatttggtgatgaagatacattctgcacttcactgcattagttaagatgaaataaaacttccaagtacaaaagca

SEQ ID NO: 17429 - DNA, 2203 bp, Zea Mays
ctgcagatcctagtttccataagattcgtgaagtggacgacggaccgagtacctacaccaacttaaacttggatatcaatggagggcggtgtgactgtagcggacaaggcagaattcaaggagtgcctgcggctgtcctggacacagccttacatccttcaacttgtcctgtctgctggcattggcggtcttcttttcggatatgatacaggtgtcatatcgggagccctcctgtacattagagatgactttgctgcggtggaaaagagcactgtattaagggagacaatagtcagtatggctgttgctggagctatagttggagctgcatttggtggctggatgaacgacaagtttggaaggaggccttccatcatacttgccgatgcactgttctttggaggtgccgttatcatggcgttttccccaacacctagagttatcattgttgggagggtatttgttggtcttggtgttggaatggcttccatgacagctcctctgtacatctctgaagcctcccctgctaggatcagaggtgctctagtgagcacaaatgggcttctcatcactggtggccagttcttggcctacctcatcaatctagccttcactaaggtgccagggacctggcggtggatgcttggcattgcaggggttcctgccctggtccagttcgtactgatgctgatgctgccagaatcaccaagatggctctacaggaagggcaggaaagaggaagcagcagcaatcttgcacaagatttaccctgcgaatgaggtcgaggaagagattgactcaatgcgccggtctgtcgaagaagaggtgctccttgagggctccatcggtgagagtggcttcatgggcaagctgaggaaggcgatgggcagcaaggtcgttcgccgcgggctaacggccggcgtcatcgtccaggtcgcgcagcagttcgtgggcatcaataccgtcatgtactacagcccgacgatcgtgcagctggccggctatgcgtccaacaacacagccatggcactgtccctcatcacctcgggcctgaacgccatcggctcgatcgtcagcatgttcttcgtggacagggcaggccggaggcgcctgatgctgatcagcctggtcggaatcgtcgtgtggctcgccgtgctcggcggcacgttcctgggcgccgcacaccacgccccacccgtcagcgacctggagacccgactgttggcgaaccagaaccagacccagacccagacgtgtcccgagttcaacccgaacgtccgctggagctgcatggactgcctcaaggccgcgtccacgtgcggcttctgtgctcaccagggagacaagcttcttccgggggcgtgcttggcgctgaacaacgcgtctcggcatgcgtgccgcgcagaccaccgggagttctacacggaggggtgccccaacaacttcgggtggctggcactgatcggcctgggcgcgtacatcgtctcctactcgcccggcatgggcacggtgccgtggattgtcaactcggagatctacccgctgcggttcaggggcatctgcggcggcatcgctgccgtcgccaactgggtctccaatctcatcgtgacgcagacgttcctgtccctgaccaaggcgctcggaacatcggccaccttcttcctcttctgtgctgtctccttgctggcgctcgtcatcgtcttcctcaccgtgccggagactaaaggcctgcagttcgaggaagtggagcggatgctggaaagggaggactacaagccctggaagaggtaccatggtggcagcagcagcatcgagccggcgaagaacagtgatattggcctcaccccgccatgaaatccacttgttctgttatctagattcaagtagaagtagcaataattcgtagtggcagtttataataggccatctgctgctaatctctctctagatttccaagaagtgaaaaaatgaggtattagtcattcagtatgaaaatacgacatttggtagctgctatactttgttctagagcatttaatcttgattttagctctggggtggcttgtggcattagttgcgcactgtgtttaagacaacattcagaattgtttccttttttactttttaccatttggtgatgaagatacattctgcacttcactgcattagttaagatgaaataaaacttccaagtacaaaagca

SEQ ID NO: 17430 - DNA, 2367 bp, Zea Mays
cactgacctctggcttgcgccgctactggcattccgttctcgttctcctcctcctcctcctcctcctcctcgtcctcttccgtgtggaggggtcggggattttgatgattgccttttactcgttccctcctcttcaagaatgtgaaggggtttcacgggaagtacggctacgggaggggtggttgttctgggtgaagtggacgacggaccgagtacctacaccaacttaaacttggatatcaatggagggcggtgtgactgtagcggacaaggcagaattcaaggagtgcctgcggctgtcctggacacagccttacatccttcaacttgtcctgtctgctggcattggcggtcttcttttcggatatgatacaggtgtcatatcgggagccctcctgtacattagagatgactttgctgcggtggaaaagagcactgtattaagggagacaatagtcagtatggctgttgctggagctatagttggagctgcatttggtggctggatgaacgacaagtttggaaggaggccttccatcatacttgccgatgcactgttctttggaggtgccgttatcatggcgttttccccaacacctagagttatcattgttgggagggtatttgttggtcttggtgttggaatggcttccatgacagctcctctgtacatctctgaagcctcccctgctaggatcagaggtgctctagtgagcacaaatgggcttctcatcactggtggccagttcttggcctacctcatcaatctagccttcactaaggtgccagggacctggcggtggatgcttggcattgcaggggttcctgccctggtccagttcgtactgatgctgatgctgccagaatcaccaagatggctctacaggaagggcaggaaagaggaagcagcagcaatcttgcacaagatttaccctgcgaatgaggtcgaggaagagattgactcaatgcgccggtctgtcgaagaagaggtgctccttgagggctccatcggtgagagtggcttcatgggcaagctgaggaaggcgatgggcagcaaggtcgttcgccgcgggctaacggccggcgtcatcgtccaggtcgcgcagcagttcgtgggcatcaataccgtcatgtactacagcccgacgatcgtgcagctggccggctatgcgtccaacaacacagccatggcactgtccctcatcacctcgggcctgaacgccatcggctcgatcgtcagcatgttcttcgtggacagggcaggccggaggcgcctgatgctgatcagcctggtcggaatcgtcgtgtggctcgccgtgctcggcggcacgttcctgggcgccgcacaccacgccccacccgtcagcgacctggagacccgactgttggcgaaccagaaccagacccagacccagacgtgtcccgagttcaacccgaacgtccgctggagctgcatggactgcctcaaggccgcgtccacgtgcggcttctgtgctcaccagggagacaagcttcttccgggggcgtgcttggcgctgaacaacgcgtctcggcatgcgtgccgcgcagaccaccgggagttctacacggaggggtgccccaacaacttcgggtggctggcactgatcggcctgggcgcgtacatcgtctcctactcgcccggcatgggcacggtgccgtggattgtcaactcggagatctacccgctgcggttcaggggcatctgcggcggcatcgctgccgtcgccaactgggtctccaatctcatcgtgacgcagacgttcctgtccctgaccaaggcgctcggaacatcggccaccttcttcctcttctgtgctgtctccttgctggcgctcgtcatcgtcttcctcaccgtgccggagactaaaggcctgcagttcgaggaagtggagcggatgctggaaagggaggactacaagccctggaagaggtaccatggtggcagcagcagcatcgagccggcgaagaacagtgatattggcctcaccccgccatgaaatccacttgttctgttatctagattcaagtagaagtagcaataattcgtagtggcagtttataataggccatctgctgctaatctctctctagatttccaagaagtgaaaaaatgaggtattagtcattcagtatgaaaatacgacatttggtagctgctatactttgttctagagcatttaatcttgattttagctctggggtggcttgtggcattagttgcgcactgtgtttaagacaacattcagaattgtttccttttttactttttaccatttggtgatgaagatacattctgcacttcactgcattagttaagatgaaataaaacttccaagtacaaaagca

SEQ ID NO: 17431 - DNA, 2399 bp, Zea Mays
ggcaggtctgcaccggcctggtagcgctgtctcgtggagctatctctagaggggataagcaggtgaaggggcaagtttctgcaacttaaataaatagagtgaatatgactgacatgaattctgatgagattcttgaggttcctgacactcctgaccgattacagcagtcaaaataccatgtttccagctctattgttgggagggatggtacaatggcagctgctaatccatcaccacagcgcaaatttagaattagattcaagaacaattccgtgcaaggttcatcaagtcaaaataatggttgtagcatactgcctgcagctttagatactgatcatattttcaaacaagctgaagcagcacagattctggaactgtctaaagactataaggcaaaattttccctacagaaacctgacagcacaaggatatctgttgacagtgaaaagagggctggaaaacatggctttgatcagagcagaagcatttcgaacaatataagttgtagtgtgactggaggaaggaaccctaccttccaagttaaagatggagaggttggtcagcaagatgcaggtcatcagagtgcaaactttctagacataggaccaggttttcctactattcaagtgggaaaaccaggatacagattatgcactcgcactactgataagctgaaaggtgtaacaggtgctgatgtttgtccaggatcaagttctggggaggtcaaaggggacttgatcactaacaaggtcattgcaggacctacaagccctctgcgtgtttttcctcgaaggcatgtgggccaaaaaaggctggtacgcaatggatgtatttccccctctaacatagccaagacagatgcaaaagttaatgaaaaacaggaaatgtgctctttaagtgaacatttggaccatccgcatcagcctgatgcatttgacggaggtgatgtgattgacctcacggagaattcaccaataatgacaaggcagagatctgaagtgaacaataaattgatgtctggacacaatatggacacaagggccgcaaaaaagctgagaacagacagatttggcaggactttggttcggcagtccaaatgtcatgcaaacaacagcagttgttctgaagttagcttatcaggcctcaacaacaatggaaaaggaattgactgtgatatcttggatagtgatcaaactggagaagctaatttgaggggggttgatcttagtactgctggaacttatctaaacaaaaacttttctgatataagcacggagcaaggttggagaacaacacacaaccacacaagtaaattacccatttcgtttatgggtaatataactagcagttccggatgggaatctggatcttctaccacacgatctaatcaaaaccatggatctgctggaggcaagcatagctctgttagtggagcaaacataatagttcctgataagatagggaataaaacaataatgcttggtagagaaaggagaaaacaaacctcaacttcttcccatattggtgaaagctctagtgctgctgacgaacctagaggtgatcttcaatcgtcaaaaatatcagctggcccaaatcatagcagtcatcagcataatattcctgtaataaacattgatgacgtatcccctgaagctagacctagttcgagtggattcactaatagaactcttgatcctaccatagaagcacaattggagtcggatgagttattggctcgccaactccaggagcagctctacaatgaatctgctcgttttgccccaacagaagagattgatgcaattgtagcaatgtcacttcaacatgaagaagatactcatcggacatctaggaccttaaggaggttccaaaaccatactagaggtgctcgggctactcgtttgagttcttatcgaaatgctcttagggctgaattagcaacagcaaacaatatgatttcccgtcagcggaatactgctccaataaatttgggattgagagctgctttagcaagatatcctggtgctttgcacattcaaccaaacattgacttaaatgactatgatgcactgcttgctctggatgaaaataaccaccagcacactggtgcttcagaaagccagatcaataatttgccacagtcagtagttcagtccaatagcattgaagatccatgttctgtctgccttgaaaatccttctgtgggagatactatccgccatttgccttgctttcacaagttccataaagagtgtattgacgagtggcttaggagaaagaaactgtgcccagtctgcaagtttgggattaactgaagtttgccgtaccagtctacagtggagttctacttggtagtggcagcgacgaggtgctgcaatttctcatacgggatgctttcc

SEQ ID NO: 17432 - DNA, 2339 bp, Zea Mays
attacctgatcccaggcggcagcggaaacgcaaggagaggggcggcgatgatacagtagatttcaaactcaaactgaccaccagagagagatagaggggagagatcggagaggaaggacgtttggagcaggcggctattgcaggctttgcagccgccgtcctcctgattcgggcccccctccccggatcgctccagattcgcacgatttggggatcgtgcgtttcgccatcagatcgggagaagaaaaatcaagtcaaaataccatgtttccagctctattgttgggagggatggtacaatggcagctgctaatccatcaccacagcgcaaatttagaattagattcaagaacaattccgtgcaaggttcatcaagtcaaaataatggttgtagcatactgcctgcagctttagatactgatcatattttcaaacaagctgaagcagcacagattctggaactgtctaaagactataaggcaaaattttccctacagaaacctgacagcacaaggatatctgttgacagtgaaaagagggctggaaaacatggctttgatcagagcagaagcatttcgaacaatataagttgtagtgtgactggaggaaggaaccctaccttccaagttaaagatggagaggttggtcagcaagatgcaggtcatcagagtgcaaactttctagacataggaccaggttttcctactattcaagtgggaaaaccaggatacagattatgcactcgcactactgataagctgaaaggtgtaacaggtgctgatgtttgtccaggatcaagttctggggaggtcaaaggggacttgatcactaacaaggtcattgcaggacctacaagccctctgcgtgtttttcctcgaaggcatgtgggccaaaaaaggctggtacgcaatggatgtatttccccctctaacatagccaagacagatgcaaaagttaatgaaaaacaggaaatgtgctctttaagtgaacatttggaccatccgcatcagcctgatgcatttgacggaggtgatgtgattgacctcacggagaattcaccaataatgacaaggcagagatctgaagtgaacaataaattgatgtctggacacaatatggacacaagggccgcaaaaaagctgagaacagacagatttggcaggactttggttcggcagtccaaatgtcatgcaaacaacagcagttgttctgaagttagcttatcaggcctcaacaacaatggaaaaggaattgactgtgatatcttggatagtgatcaaactggagaagctaatttgaggggggttgatcttagtactgctggaacttatctaaacaaaaacttttctgatataagcacggagcaaggttggagaacaacacacaaccacacaagtaaattacccatttcgtttatgggtaatataactagcagttccggatgggaatctggatcttctaccacacgatctaatcaaaaccatggatctgctggaggcaagcatagctctgttagtggagcaaacataatagttcctgataagatagggaataaaacaataatgcttggtagagaaaggagaaaacaaacctcaacttcttcccatattggtgaaagctctagtgctgctgacgaacctagagaagcacaattggagtcggatgagttattggctcgccaactccaggagcagctctacaatgaatctgctcgttttgccccaacagaagagattgatgcaattgtagcaatgtcacttcaacatgaagaagatactcatcggacatctaggaccttaaggaggttccaaaaccatactagaggtgctcgggctactcgtttgagttcttatcgaaatgctcttagggctgaattagcaacagcaaacaatatgatttcccgtcagcggaatactgctccaataaatttgggattgagagctgctttagcaagatatcctggtgctttgcacattcaaccaaacattgacttaaatgactatgatgcactgcttgctctggatgaaaataaccaccagcacactggtgcttcagaaagccagatcaataatttgccacagtcagtagttcagtccaatagcattgaagatccatgttctgtctgccttgaaaatccttctgtgggagatactatccgccatttgccttgctttcacaagttccataaagagtgtattgacgagtggcttaggagaaagaaactgtgcccagtctgcaagtttgggattaactgaagtttgccgtaccagtctacagtggagttctacttggtagtggcagcgacgaggtgctgcaatttctcatacgggatgctttcc

SEQ ID NO: 17433 - DNA, 2545 bp, Zea Mays
aaaccgtcgtgtatcacacagccggattcacccataggcccaccgattcccatatggagcccaccaaaacccaacccattacctgatcccaggcggcagcggaaacgcaaggagaggggcggcgatgatacagtagatttcaaactcaaactgaccaccagagagagatagaggggagagatcggagaggaaggacgtttggagcaggcggctattgcaggctttgcagccgccgtcctcctgattcgggcccccctccccggatcgctccagattcgcacgatttggggatcgtgcgtttcgccatcagatcgggagaagaaaaatcaaggtgaaggggcaagtttctgcaacttaaataaatagagtgaatatgactgacatgaattctgatgagattcttgaggttcctgacactcctgaccgattacagcagtcaaaataccatgtttccagctctattgttgggagggatggtacaatggcagctgctaatccatcaccacagcgcaaatttagaattagattcaagaacaattccgtgcaaggttcatcaagtcaaaataatggttgtagcatactgcctgcagctttagatactgatcatattttcaaacaagctgaagcagcacagattctggaactgtctaaagactataaggcaaaattttccctacagaaacctgacagcacaaggatatctgttgacagtgaaaagagggctggaaaacatggctttgatcagagcagaagcatttcgaacaatataagttgtagtgtgactggaggaaggaaccctaccttccaagttaaagatggagaggttggtcagcaagatgcaggtcatcagagtgcaaactttctagacataggaccaggttttcctactattcaagtgggaaaaccaggatacagattatgcactcgcactactgataagctgaaaggtgtaacaggtgctgatgtttgtccaggatcaagttctggggaggtcaaaggggacttgatcactaacaaggtcattgcaggacctacaagccctctgcgtgtttttcctcgaaggcatgtgggccaaaaaaggctggtacgcaatggatgtatttccccctctaacatagccaagacagatgcaaaagttaatgaaaaacaggaaatgtgctctttaagtgaacatttggaccatccgcatcagcctgatgcatttgacggaggtgatgtgattgacctcacggagaattcaccaataatgacaaggcagagatctgaagtgaacaataaattgatgtctggacacaatatggacacaagggccgcaaaaaagctgagaacagacagatttggcaggactttggttcggcagtccaaatgtcatgcaaacaacagcagttgttctgaagttagcttatcaggcctcaacaacaatggaaaaggaattgactgtgatatcttggatagtgatcaaactggagaagctaatttgaggggggttgatcttagtactgctggaacttatctaaacaaaaacttttctgatataagcacggagcaaggttggagaacaacacacaaccacacaagtaaattacccatttcgtttatgggtaatataactagcagttccggatgggaatctggatcttctaccacacgatctaatcaaaaccatggatctgctggaggcaagcatagctctgttagtggagcaaacataatagttcctgataagatagggaataaaacaataatgcttggtagagaaaggagaaaacaaacctcaacttcttcccatattggtgaaagctctagtgctgctgacgaacctagaggtgatcttcaatcgtcaaaaatatcagctggcccaaatcatagcagtcatcagcataatattcctgtaataaacattgatgacgtatcccctgaagctagacctagttcgagtggattcactaatagaactcttgatcctaccatagaagcacaattggagtcggatgagttattggctcgccaactccaggagcagctctacaatgaatctgctcgttttgccccaacagaagagattgatgcaattgtagcaatgtcacttcaacatgaagaagatactcatcggacatctaggaccttaaggaggttccaaaaccatactagaggtgctcgggctactcgtttgagttcttatcgaaatgctcttagggctgaattagcaacagcaaacaatatgatttcccgtcagcggaatactgctccaataaatttgggattgagagctgctttagcaagatatcctggtgctttgcacattcaaccaaacattgacttaaatgactatgatgcactgcttgctctggatgaaaataaccaccagcacactggtgcttcagaaagccagatcaataatttgccacagtcagtagttcagtccaatagcattgaagatccatgttctgtctgccttgaaaatccttctgtgggagatactatccgccatttgccttgctttcacaagttccataaagaggcgaggcaggttcatatccagaca

SEQ ID NO: 17434 - DNA, 2636 bp, Zea Mays
ctcaaccctaacgcgctgaaggcaggtctgcaccggcctggtagcgctgtctcgtggagctatctctagaggggataagcaggtgaaggggcaagtttctgcaacttaaataaatagagtgaatatgactgacatgaattctgatgagattcttgaggttcctgacactcctgaccgattacagcagtcaaaataccatgtttccagctctattgttgggagggatggtacaatggcagctgctaatccatcaccacagcgcaaatttagaattagattcaagaacaattccgtgcaaggttcatcaagtcaaaataatggttgtagcatactgcctgcagctttagatactgatcatattttcaaacaagctgaagcagcacagattctggaactgtctaaagactataaggcaaaattttccctacagaaacctgacagcacaaggatatctgttgacagtgaaaagagggctggaaaacatggctttgatcagagcagaagcatttcgaacaatataagttgtagtgtgactggaggaaggaaccctaccttccaagttaaagatggagaggttggtcagcaagatgcaggtcatcagagtgcaaactttctagacataggaccaggttttcctactattcaagtgggaaaaccaggatacagattatgcactcgcactactgataagctgaaaggtgtaacaggtgctgatgtttgtccaggatcaagttctggggaggtcaaaggggacttgatcactaacaaggtcattgcaggacctacaagccctctgcgtgtttttcctcgaaggcatgtgggccaaaaaaggctggtacgcaatggatgtatttccccctctaacatagccaagacagatgcaaaagttaatgaaaaacaggaaatgtgctctttaagtgaacatttggaccatccgcatcagcctgatgcatttgacggaggtgatgtgattgacctcacggagaattcaccaataatgacaaggcagagatctgaagtgaacaataaattgatgtctggacacaatatggacacaagggccgcaaaaaagctgagaacagacagatttggcaggactttggttcggcagtccaaatgtcatgcaaacaacagcagttgttctgaagttagcttatcaggcctcaacaacaatggaaaaggaattgactgtgatatcttggatagtgatcaaactggagaagctaatttgaggggggttgatcttagtactgctggaacttatctaaacaaaaacttttctgatataagcacggagcaaggttggagaacaacacacaaccacacaagtaaattacccatttcgtttatgggtaatataactagcagttccggatgggaatctggatcttctaccacacgatctaatcaaaaccatggatctgctggaggcaagcatagctctgttagtggagcaaacataatagttcctgataagatagggaataaaacaataatgcttggtagagaaaggagaaaacaaacctcaacttcttcccatattggtgaaagctctagtgctgctgacgaacctagaggtgatcttcaatcgtcaaaaatatcagctggcccaaatcatagcagtcatcagcataatattcctgtaataaacattgatgacgtatcccctgaagctagacctagttcgagtggattcactaatagaactcttgatcctaccatagaagcacaattggagtcggatgagttattggctcgccaactccaggagcagctctacaatgaatctgctcgttttgccccaacagaagagattgatgcaattgtagcaatgtcacttcaacatgaagaagatactcatcggacatctaggaccttaaggaggttccaaaaccatactagaggtgctcgggctactcgtttgagttcttatcgaaatgctcttagggctgaattagcaacagcaaacaatatgatttcccgtcagcggaatactgctccaataaatttgggattgagagctgctttagcaagatatcctggtgctttgcacattcaaccaaacattgacttaaatgactatgatgcactgcttgctctggatgaaaataaccaccagcacactggtgcttcagaaagccagatcaataatttgccacagtcagtagttcagtccaatagcattgaagatccatgttctgtctgccttgaaaatccttctgtgggagatactatccgccatttgccttgctttcacaagttccataaagagtgtattgacgagtggcttaggagaaagaaactgtgcccagtctgcaagtttgggattaactgaagtttgccgtaccagtctacagtggagttctacttggtagtggcagcgacgaggtgctgcaatttctcatacgggatgctttcctgcaaagatttttttttgtctaagataaaaaaacaatgtattgctgtgatctgcgcttttgggcatcattttgtatgcacgcacgttttgcttgctatttttgttgtcgtgatccaccaattcccatgaattggttaccagcatcttgtcaatcatttatgtcgccgcatatatgatccatcaattggcatcaatttatttttattttacgttcttg

SEQ ID NO: 17435 - DNA, 2798 bp, Zea Mays
aaaccgtcgtgtatcacacagccggattcacccataggcccaccgattcccatatggagcccaccaaaacccaacccattacctgatcccaggcggcagcggaaacgcaaggagaggggcggcgatgatacagtagatttcaaactcaaactgaccaccagagagagatagaggggagagatcggagaggaaggacgtttggagcaggcggctattgcaggctttgcagccgccgtcctcctgattcgggcccccctccccggatcgctccagattcgcacgatttggggatcgtgcgtttcgccatcagatcgggagaagaaaaatcaaggtgaaggggcaagtttctgcaacttaaataaatagagtgaatatgactgacatgaattctgatgagattcttgaggttcctgacactcctgaccgattacagcagtcaaaataccatgtttccagctctattgttgggagggatggtacaatggcagctgctaatccatcaccacagcgcaaatttagaattagattcaagaacaattccgtgcaaggttcatcaagtcaaaataatggttgtagcatactgcctgcagctttagatactgatcatattttcaaacaagctgaagcagcacagattctggaactgtctaaagactataaggcaaaattttccctacagaaacctgacagcacaaggatatctgttgacagtgaaaagagggctggaaaacatggctttgatcagagcagaagcatttcgaacaatataagttgtagtgtgactggaggaaggaaccctaccttccaagttaaagatggagaggttggtcagcaagatgcaggtcatcagagtgcaaactttctagacataggaccaggttttcctactattcaagtgggaaaaccaggatacagattatgcactcgcactactgataagctgaaaggtgtaacaggtgctgatgtttgtccaggatcaagttctggggaggtcaaaggggacttgatcactaacaaggtcattgcaggacctacaagccctctgcgtgtttttcctcgaaggcatgtgggccaaaaaaggctggtacgcaatggatgtatttccccctctaacatagccaagacagatgcaaaagttaatgaaaaacaggaaatgtgctctttaagtgaacatttggaccatccgcatcagcctgatgcatttgacggaggtgatgtgattgacctcacggagaattcaccaataatgacaaggcagagatctgaagtgaacaataaattgatgtctggacacaatatggacacaagggccgcaaaaaagctgagaacagacagatttggcaggactttggttcggcagtccaaatgtcatgcaaacaacagcagttgttctgaagttagcttatcaggcctcaacaacaatggaaaaggaattgactgtgatatcttggatagtgatcaaactggagaagctaatttgaggggggttgatcttagtactgctggaacttatctaaacaaaaacttttctgatataagcacggagcaaggttggagaacaacacacaaccacacaagtaaattacccatttcgtttatgggtaatataactagcagttccggatgggaatctggatcttctaccacacgatctaatcaaaaccatggatctgctggaggcaagcatagctctgttagtggagcaaacataatagttcctgataagatagggaataaaacaataatgcttggtagagaaaggagaaaacaaacctcaacttcttcccatattggtgaaagctctagtgctgctgacgaacctagaggtgatcttcaatcgtcaaaaatatcagctggcccaaatcatagcagtcatcagcataatattcctgtaataaacattgatgacgtatcccctgaagctagacctagttcgagtggattcactaatagaactcttgatcctaccatagaagcacaattggagtcggatgagttattggctcgccaactccaggagcagctctacaatgaatctgctcgttttgccccaacagaagagagaggtgctcgggctactcgtttgagttcttatcgaaatgctcttagggctgaattagcaacagcaaacaatatgatttcccgtcagcggaatactgctccaataaatttgggattgagagctgctttagcaagatatcctggtgctttgcacattcaaccaaacattgacttaaatgactatgatgcactgcttgctctggatgaaaataaccaccagcacactggtgcttcagaaagccagatcaataatttgccacagtcagtagttcagtccaatagcattgaagatccatgttctgtctgccttgaaaatccttctgtgggagatactatccgccatttgccttgctttcacaagttccataaagagtgtattgacgagtggcttaggagaaagaaactgtgcccagtctgcaagtttgggattaactgaagtttgccgtaccagtctacagtggagttctacttggtagtggcagcgacgaggtgctgcaatttctcatacgggatgctttcctgcaaagatttttttttgtctaagataaaaaaacaatgtattgctgtgatctgcgcttttgggcatcattttgtatgcacgcacgttttgcttgctatttttgttgtcgtgatccaccaattcccatgaattggttaccagcatcttgtcaatcatttatgtcgccgcatatatgatccatcaattggcatcaatttatttttattttacgttcttg

SEQ ID NO: 17436 - DNA, 2817 bp, Zea Mays
gtcagcatgttcctccctgccatgtacacttgcatctgcataccttcttcttgacctcaatcgtaacgtttgacgccagaaaccgtcgtgtatcacacagccggattcacccataggcccaccgattcccatatggagcccaccaaaacccaacccattacctgatcccaggcggcagcggaaacgcaaggagaggggcggcgatgatacagtagatttcaaactcaaactgaccaccagagagagatagaggggagagatcggagaggaaggacgtttggagcaggcggctattgcaggctttgcagccgccgtcctcctgattcgggcccccctccccggatcgctccagattcgcacgatttggggatcgtgcgtttcgccatcagatcgggagaagaaaaatcaaggtgaaggggcaagtttctgcaacttaaataaatagagtgaatatgactgacatgaattctgatgagattcttgaggttcctgacactcctgaccgattacagcagtcaaaataccatgtttccagctctattgttgggagggatggtacaatggcagctgctaatccatcaccacagcgcaaatttagaattagattcaagaacaattccgtgcaaggttcatcaagtcaaaataatggttgtagcatactgcctgcagctttagatactgatcatattttcaaacaagctgaagcagcacagattctggaactgtctaaagactataaggcaaaattttccctacagaaacctgacagcacaaggatatctgttgacagtgaaaagagggctggaaaacatggctttgatcagagcagaagcatttcgaacaatataagttgtagtgtgactggaggaaggaaccctaccttccaagttaaagatggagaggttggtcagcaagatgcaggtcatcagagtgcaaactttctagacataggaccaggttttcctactattcaagtgggaaaaccaggatacagattatgcactcgcactactgataagctgaaaggtgtaacaggtgctgatgtttgtccaggatcaagttctggggaggtcaaaggggacttgatcactaacaaggtcattgcaggacctacaagccctctgcgtgtttttcctcgaaggcatgtgggccaaaaaaggctggtacgcaatggatgtatttccccctctaacatagccaagacagatgcaaaagttaatgaaaaacaggaaatgtgctctttaagtgaacatttggaccatccgcatcagcctgatgcatttgacggaggtgatgtgattgacctcacggagaattcaccaataatgacaaggcagagatctgaagtgaacaataaattgatgtctggacacaatatggacacaagggccgcaaaaaagctgagaacagacagatttggcaggactttggttcggcagtccaaatgtcatgcaaacaacagcagttgttctgaagttagcttatcaggcctcaacaacaatggaaaaggaattgactgtgatatcttggatagtgatcaaactggagaagctaatttgaggggggttgatcttagtactgctggaacttatctaaacaaaaacttttctgatataagcacggagcaaggttggagaacaacacacaaccacacaagtaaattacccatttcgtttatgggtaatataactagcagttccggatgggaatctggatcttctaccacacgatctaatcaaaaccatggatctgctggaggcaagcatagctctgttagtggagcaaacataatagttcctgataagatagggaataaaacaataatgcttggtagagaaaggagaaaacaaacctcaacttcttcccatattggtgaaagctctagtgctgctgacgaacctagagaagcacaattggagtcggatgagttattggctcgccaactccaggagcagctctacaatgaatctgctcgttttgccccaacagaagagattgatgcaattgtagcaatgtcacttcaacatgaagaagatactcatcggacatctaggaccttaaggaggttccaaaaccatactagaggtgctcgggctactcgtttgagttcttatcgaaatgctcttagggctgaattagcaacagcaaacaatatgatttcccgtcagcggaatactgctccaataaatttgggattgagagctgctttagcaagatatcctggtgctttgcacattcaaccaaacattgacttaaatgactatgatgcactgcttgctctggatgaaaataaccaccagcacactggtgcttcagaaagccagatcaataatttgccacagtcagtagttcagtccaatagcattgaagatccatgttctgtctgccttgaaaatccttctgtgggagatactatccgccatttgccttgctttcacaagttccataaagagtgtattgacgagtggcttaggagaaagaaactgtgcccagtctgcaagtttgggattaactgaagtttgccgtaccagtctacagtggagttctacttggtagtggcagcgacgaggtgctgcaatttctcatacgggatgctttcctgcaaagatttttttttgtctaagataaaaaaacaatgtattgctgtgatctgcgcttttgggcatcattttgtatgcacgcacgttttgcttgctatttttgttgtcgtgatccaccaattcccatgaattggttaccagcatcttgtcaatcatttatgtcgccgcatatatgatccatcaattggcatcaatttatttttattttacgttcttg

SEQ ID NO: 17437 - DNA, 1993 bp, Zea Mays
gcggtgacataggttgggtgactggctgactgccgcgcgaaaagagagggagagagagctagcgtggactgaacggagggcgcagcaaggacgagccccgctcgcgcggggatggccacagcgagagccgttgccgcagcggcggcggcgctggcggccgtggtgctggtggcgctcctggcgccggccgtgcgtggggtcgaccgcagcgagttcccgccagggttcctcttcggcgccgcgacgtcggcgtaccaggtggaggggtgatggacggacgcacgggagacgtagccgacgaccactaccatcgctacgtgggagatctggagatcctgcagtcgctgggagtcaacgcctacagattctccatctcatgggcgagggttctaccaagaggccgggttggtggcgtcaatgcaggcggggtagctttctacaaccgcctgatcgatgcgctcctgcagaaaggaatacagccattcgtcactctgaaccatttcgacatgccgcgcgagctggaggtccggtacggtggctggctggacgctgggatccgggaggagtacgagcactacgcggacgtctgcttcggggcgttcggcgaccgggtgcggctctggacgaccttcaacgagcccaacctgctggtcaagttccagtacatgctgggcgcgtacccgcccagccgctgctccccgccgttcggcagctgcgggagcggcgactcgcgccgggagccgtacgccgcggcgcacaacatcatcatgtcccacgccgccgccgtccgcgcctacagggagaagtaccaggcgacgcagggcggctccgtcgggatcgtggccgccatgaaatggtacgagccgctgacgaactccacggacgacatcctggccgcgcggcgcgcgcaggctttcgagacggactggtttctggagccgatattcttgggcgattaccccggagcgatgcgggagatcctgggatcggacctgccgaccttcaccgcggaggagaaggcgctgctgctgcggtacaaggcggacttcatcgggctgaaccactacacggcgatctacgccagggactgcctgcgctccccgtgcaacctcgggtcgtacgaagggaacgccttcgtctcggcgaccggggaaagggacgacggggtcaagatcgggggagatactgcgctggcaggtttcttcgacgtcccagaggccatagagctggctatccagtacgtgaacgggaggtacaagggcacgcctgtgtatattactgagaacggttactcgcagtggagtgatgccagcagggaggagctgatcgacgatgtgaggaggaagaactacctgcagggctacatcacgtatctatccaaagcagtcaggaacggagcaaacgtgcggggctacttcgtgtggacgctgctggacaacttcgagtgggcgttcggttacaggttgaagtacgggctgtaccacgtcgacttcgacacccaggagaggacgccccggatgtctgcgaggtggtaccagggcttcctcacggcccgcaccagccagcgcgacgaagcagcgcaggcacggagagcagactcgtgatgaaccactcccatttccaccgatatatatcatcgaacgcattgctagacagccgagggtctcataactcgtgctcatttccgtcctcgccatatattggaataactgtggctgtggtgtcctaatgtctgtatatgcatatatatcatatatgttgacctcaaaagaggtttagatcacacactatagcacacctgaggtcgatacatagtattgaacacagcgagaaatctagagacctgtgatagaatagtttaaattgcatgcaacaaccagttcaattcaaaagtttaagctcatagaaagatatggacaatttacctatattatattccaacactactcctcacgtcgagcctcttttgagtctcagacgtggaataaaaacg

SEQ ID NO: 17438 - DNA, 2047 bp, Zea Mays
gcggtgacataggttgggtgactggctgactgccgcgcgaaaagagagggagagagagctagcgtggactgaacggagggcgcagcaaggacgagccccgctcgcgcggggatggccacagcgagagccgttgccgcagcggcggcggcgctggcggccgtggtgctggtggcgctcctggcgccggccgtgcgtggggtcgaccgcagcgagttcccgccagggttcctcttcggcgccgcgacgtcggcgtaccagattgaaggcgcgtacctggaggacggcaagggtctctgcaactgggatgtgttcacccacacacacagtggaggggtgatggacggacgcacgggagacgtagccgacgaccactaccatcgctacgtgggagatctggagatcctgcagtcgctgggagtcaacgcctacagattctccatctcatgggcgagggttctaccaagaggccgggttggtggcgtcaatgcaggcggggtagctttctacaaccgcctgatcgatgcgctcctgcagaaaggaatacagccattcgtcactctgaaccatttcgacatgccgcgcgagctggaggtccggtacggtggctggctggacgctgggatccgggaggagtacgagcactacgcggacgtctgcttcggggcgttcggcgaccgggtgcggctctggacgaccttcaacgagcccaacctgctggtcaagttccagtacatgctgggcgcgtacccgcccagccgctgctccccgccgttcggcagctgcgggagcggcgactcgcgccgggagccgtacgccgcggcgcacaacatcatcatgtcccacgccgccgccgtccgcgcctacagggagaagtaccaggcgacgcagggcggctccgtcgggatcgtggccgccatgaaatggtacgagccgctgacgaactccacggacgacatcctggccgcgcggcgcgcgcaggctttcgagacggactggtttctggagccgatattcttgggcgattaccccggagcgatgcgggagatcctgggatcggacctgccgaccttcaccgcggaggagaaggcgctgctgctgcggtacaaggcggacttcatcgggctgaaccactacacggcgatctacgccagggactgcctgcgctccccgtgcaacctcgggtcgtacgaagggaacgccttcgtctcggcgaccggggaaagggacgacggggtcaagatcgggggagatgtttcttcgacgtcccagaggccatagagctggctatccagtacgtgaacgggaggtacaagggcacgcctgtgtatattactgagaacggttactcgcagtggagtgatgccagcagggaggagctgatcgacgatgtgaggaggaagaactacctgcagggctacatcacgtatctatccaaagcagtcaggaacggagcaaacgtgcggggctacttcgtgtggacgctgctggacaacttcgagtgggcgttcggttacaggttgaagtacgggctgtaccacgtcgacttcgacacccaggagaggacgccccggatgtctgcgaggtggtaccagggcttcctcacggcccgcaccagccagcgcgacgaagcagcgcaggcacggagagcagactcgtgatgaaccactcccatttccaccgatatatatcatcgaacgcattgctagacagccgagggtctcataactcgtgctcatttccgtcctcgccatatattggaataactgtggctgtggtgtcctaatgtctgtatatgcatatatatcatatatgttgacctcaaaagaggtttagatcacacactatagcacacctgaggtcgatacatagtattgaacacagcgagaaatctagagacctgtgatagaatagtttaaattgcatgcaacaaccagttcaattcaaaagtttaagctcatagaaagatatggacaatttacctatattatattccaacactactcctcacgtcgagcctcttttgagtctcagacgtggaataaaaacg

SEQ ID NO: 17439 - DNA, 2119 bp, Zea Mays
gaaaaccagcgcggcgagcagatatcccacgagaaagccctcgaccccttcaattctccagcaaactagtcaccggcgtgtgcactggtgcagtgcacgcacgacgccggcagcatggcgggcagggccagggcacggcggttcgtgctcgccggcgctctgatgatcgcctggctcctctgtcttctcccacgggccacggcggcggccgtccgcaggagcgacttcccgccgtcgttcctcttcggcaccgccacctcctcgtaccagatcgaaggcgcgtacctcgagggcaacaagagcttgagcaactgggatgtcttcagccacgtaccaggaagaatcgaagacggaagcaccggagatgtcgcggatgatcactatcatcgttacgaggatgacattgagctcatgcactctctcggcaccaacgcctacagattttctatatcatgggccagaattcttccgagagggagattcggcgaggtcaacccagcaggcatcgcgttctacaacagactcatcgactcgctcctgctcaaagggatagagccgttcgtgacgctgtcccactacgacatcccgcaagagctggaggacaggtacggggcgtggctcggcggcgccgaggcgcggcgcgacttcggccacctggcggacgtgtgcttcgcggcgttcggggaccgcgtcaggcactgggccaccttcaacgagcccaacgtcgcggtcaccaggggctacatgctcggcacctacccgccgggccgatgctcgcgctcctgcgcccggggtaactccgacgccgagccctacgtcgccgcgcacaacgtcgtcctggcccacgccgccgccgtccagatctacaagaccaagtaccagagcaagcagaagggcttgatcggcatcgtgatgtccactgtctggttcgtgccgctgacggacgcgccggcggaccggctggcgactgagcgggcgctggccttcgacgttccatggtttcttgacccgataatctacggagactaccctccggagatgcgccggctcctgggctccaggctgccgaccttctcgccggaggagaggaggacgctgggctacgggctggacttcatcggcatcaaccactacacgacgctgtacgccagggactgcatgatctcgccaggttattgcccgtcggggcaggagttccaccaatcgctggcggcctacacgggagaaagagacgggattcccatcggacctccgacagcgatgccgacgttctacgtcgttcctgacgggatagagaagatggtcacctacatcatgaacagatacagcaatctccccatgttcataaccgaaaatggctacgcacaaggtggggatggttatactacccgtgccgaggactggcttgacgaccagggcaggatacagtacctcgagggctacctcgccaaactcgccaaagtcatcaggctacgcacaaggtggggatggttatactacccgtgccgaggactcgcttgacgaccagggcaggatacggtacctcgagggctacctcgcaaaactcgccaaagtcatcagtgacggcgccgatgtccgtggctacttcatctggtatctcattgacaatttcgagtggctatatgggtacaccctccgcttcggccttcactacgttgactaccaaacgcaggagagaaagcccaagtcgttggcgctgtggtacaaacggttcctccagagttcacttgaagctcaatagatgaatagagagaggatgccttgttcgaagtacaggcacacagcatgagcttgtgagtgtgacgactgaacatgctgcttcttcaattcagaaaatgaagggcgtgatctttgtatgaatttattgatccttaataaagggggccactacagttgccatctccgacgtccagcccacagtgaaacttggggtggagcgtttccttccccctaggcgaagtgtgacgtgcagctccagattttaaccattattatagagaccaaatagctcatttattatgcaaaacattgtccacacatgttataggctgaaatcggaactatttgtgataattttagactagcccatttattttgc

SEQ ID NO: 17440 - DNA, 2365 bp, Zea Mays
gaaaaccagcgcggcgagcagatatcccacgagaaagccctcgaccccttcaattctccagcaaactagtcaccggcgtgtgcactggtgcagtgcacgcacgacgccggcagcatggcgggcagggccagggcacggcggttcgtgctcgccggcgctctgatgatcgcctggctcctctgtcttctcccacgggccacggcggcggccgtccgcaggagcgacttcccgccgtcgttcctcttcggcaccgccacctcctcgtaccagatcgaaggcgcgtacctcgagggcaacaagagcttgagcaactgggatgtcttcagccacgtaccaggaagaatcgaagacggaagcaccggagatgtcgcggatgatcactatcatcgttacgaggatgacattgagctcatgcactctctcggcaccaacgcctacagattttctatatcatgggccagaattcttccgagagggagattcggcgaggtcaacccagcaggcatcgcgttctacaacagactcatcgactcgctcctgctcaaagggatagagccgttcgtgacgctgtcccactacgacatcccgcaagagctggaggacaggtacggggcgtggctcggcggcgccgaggcgcggcgcgacttcggccacctggcggacgtgtgcttcgcggcgttcggggaccgcgtcaggcactgggccaccttcaacgagcccaacgtcgcggtcaccaggggctacatgctcggcacctacccgccgggccgatgctcgcgctcctgcgcccggggtaactccgacgccgagccctacgtcgccgcgcacaacgtcgtcctggcccacgccgccgccgtccagatctacaagaccaagtaccagagcaagcagaagggcttgatcggcatcgtgatgtccactgtctggttcgtgccgctgacggacgcgccggcggaccggctggcgactgagcgggcgctggccttcgacgttccatggtttcttgacccgataatctacggagactaccctccggagatgcgccggctcctgggctccaggctgccgaccttctcgccggaggagaggaggacgctgggctacgggctggacttcatcggcatcaaccactacacgacgctgtacgccagggactgcatgatctcgccaggttattgcccgtcggggcaggagttccaccaatcgctggcggcctacacgggagaaagagacgggattcccatcggacctccgttctgggcggcagacagcgatgccgacgttctacgtcgttcctgacgggatagagaagatggtcacctacatcatgaacagatacagcaatctccccatgttcataaccgaaaatggctacgcacaaggtggggatggttatactacccgtgccgaggactggcttgacgaccagggcaggatacagtacctcgagggctacctcgccaaactcgccaaagtcatcagtgacggcgccgatgtccgtggctacttcatctggtctctcattgacaatttcgagtggctatatgggtacaccctccgcttcggccttcactacgttgactaccaaacgcaggagagaaagccgaagtcgtcggcgctgtggtacaaacggttcctccagagttcacttgaagctcaatagatgaatagagagaggatgccttgttcgaagtacaggcacacaacatgagcttgctacgcacaaggtggggatggttatactacccgtgccgaggactcgcttgacgaccagggcaggatacggtacctcgagggctacctcgcaaaactcgccaaagtcatcagtgacggcgccgatgtccgtggctacttcatctggtatctcattgacaatttcgagtggctatatgggtacaccctccgcttcggccttcactacgttgactaccaaacgcaggagagaaagcccaagtcgttggcgctgtggtacaaacggttcctccagagttcacttgaagctcaatagatgaatagagagaggatgccttgttcgaagtacaggcacacagcatgagcttgtgagtgtgacgactgaacatgctgcttcttcaattcagaaaatgaagggcgtgatctttgtatgaatttattgatccttaataaagggggccactacagttgccatctccgacgtccagcccacagtgaaacttggggtggagcgtttccttccccctaggcgaagtgtgacgtgcagctccagattttaaccattattatagagaccaaatagctcatttattatgcaaaacattgtccacacatgttataggctgaaatcggaactatttgtgataattttagactagcccatttattttgc

SEQ ID NO: 17441 - DNA, 441 bp, Zea Mays
atgaggcggggccatccttctaataaagggcaggaagatgagtggactgacaatacgcgtgccgagttactgaatctaagatcaatcgtgctgactgatgtcaggagcctgagaagcatatgcaggccaagagattttcccagccttgagaccatccgggtggaggattgcccgagtctgagaagcataccactgagcagcgcgtacaagtacagctgtgggaaactgaagcaggtgtgcggttcagttgaatggtgggagaaactggagtgggaggactgggaaaaggcatggagagcaggttcttcattccgatctgacagggaccctgtctccagaggatgctgcgtcattggcacaatgtgtatatgcgatgacttctttgtgcatgtaggcagtctgcatatattgctggagttcacaaatctgtacatgatttga

SEQ ID NO: 17442 - DNA, 1685 bp, Zea Mays
ttttaatgttgttttttttttcctgccgttctgagaccaattccatcctattcggtgttcgcggcagcgccagtttgcttcccggtgatcatggcagcggcggcggcgggggcaaaggccgtgcggggccgtccaagcgcgcgaccacgtaggtcgactccgccagaccgccactccggcagtccggcctctgtgtcaccggaaacttgtcccgataagtataccccctccatgtcttgtgatctgaactgctgtttgcctgtttctcccttacgataagttacatccgtccacagcatttcatgaattgaatggtgtaagtggtaatctatggtgtctccatcggtggaggcgtgggagatccgagatccgactgaaggctgcaaacacgaataccattgctctcatcaattataaatcacaaatcgctatatattccatttctgcaaactgcaacgctaacagtttttgttccattcgattcttcattttctgctgagtcttgtcttattggtgatcggacaaattaattacacgatgggaacagtggcctgtggaggacacatttgttaaattgtcatattcaatgcaaggtagagaatgcgggttccattgacataatcacggaatggcacatctcatagataacccattctgtcgagctgctacctgtatatcgtatcttcaaaacatgacatgaaatttgcacttgatatatttgttgtttccgaacaataagatagaacctgatctttcatgttttctttcgaaacattaaggaaaattagtgtgcactgggcagtgggcagatatgcagttggttctcctgtccatgaacaattaccatctcaagggaattaagaagctttcaggccttgccaaggaagactgggggattccaagatgaagaaaaatgttatgatgcacaaggttatagaaaattctagtgaagagaaataatatcataccttcctcttaagaaatacatcagcacataaccaagagattccagatcatctcttctgctttgctctgtaaggaaatgaagaaaggttaacccaaattcatctattaaggcatccagatttgtggatgaatatagtctgcagctaattgactacaagttcacaaatagtgttacaagttttgaagagttttaatttgtttcaaaacatttgtcttccctgttccgtttgccctagaatctgatcatttaatgctcagatactgatgatacagtagcacatatccatatttacaagacataaactcacctactccaagatgggtatttacactggcatatcgtgctgttcctgtgagatttttgttttccctgtggcacaacaaagaaaatatattggctttttaaatgataacacacataaagtaagactggctagaagcttagaacaaaaaaaatgaacctccagaaaaaaaatgtaacaggaattttcatttcaaaaaatgaaaagttaatgctgatctgtacagcagcgttttgaaaatgtttaacatttgatattacctatttttattattaactttctacacacattgttctgagtgtcgtgggctgcccctggcctgcttatgcaaaccaacctgaccacttcggttaaaaccggtgcaaaacagcttcatattattgtcaggttcagaaccaagaacacagtcatgtaagc

SEQ ID NO: 17443 - DNA, 3754 bp, Zea Mays
atgttctgcctccgcaccctccgatcgcccgccgcgtccgattcccctgaccccgcctcgcccgcaatctccgccgccgcgcccgcgacatccatcacccccacccgcgacatcccgcctcgcacgccatcaactcgcagcggcccttctccgaacgtggtttgttttttcgtttgctcgagcagccagccgactcgtctccagcaatgcggccggggtcggctcgctggaggtgggcgtcgccgccgacacctccaacgcctccaggcagggattaggtgagccgtcggctaatcactcgtcattgggaggatctcctcctcccgttcagatttgggcaagaaaggcccgggcgcgatgtccatggccgaggaggggagtgaggccgaggaggggagtgaggccgaggcgctcgagaaagacggcagcaaggcttcttcaccttcggggccagccagtcgactcgtctccagcaatgcggccggggtcggctcgctggaggtgggcgccgccaccgacacctccaacgcctccaggcagggattagatttgggcaagaaaggcccgggcgcgatgtccatggccgaggaggggagtgaggccgaggaggggagtgaggccgaggcgctcgagaaagacggcagcaaggcttcttcaccttcggggccagccagccgactcgtctccagcaatgcggccggggtcggctcgctggaggtgggcgccgccgccgacacctccaacgcctccaggcagggattagatttgggcaagaaaggcccgggcgcgatgtccatggccgaggaggggagtgaggccgaggaggggagtgaggctgaggcgctcgagaaagacggcagcaaggcttcttcaccttcggggccaagtaaacaccacgggcaagggcgcaaagcatcgcgtgttgttgtttcgagatgcgtgggcatggccgtgctttcccttccgttggggtcaagctgaccggcctcgtgtgccccgtactcccaccgccgtcctgcacgcaaatcccaaaaatcagataaaaagactggtttttctccccgttctccttttccccccactaatcgatttaggttcttagttaggcgttcctgccgctcttcttcctcccgtgtcgtcagaggaagccgcgaaaagcatgcaggaatcaggcggtcttgaggacgaggagctacaggtgcaggatgcagttgccagtggttccaagaggagcaaagactccgccgccgccgccacacgcagcgccaatgtcagctcgccctctgtggttcactctcaccctgccatcctccctgctcccgcgcagcagattccagaggttaagcaagcagataccacacatatgcattctatgcctgccgcgcgctttacgtagctaacaagttgaattcatcatcaacatatccattgctcgagcttttcttcaagaaccagctaccatagggcaaagtgaagaaacggaagagttgagcaagatcacattagagaataaggatattcagcttgatatcaatataagagaagaatctcggagttcttcacaacaagggaactttgacacagaaggtaccagctccagtgaggctttcttgcttggaacggttgcttcagaaaagatgcttgagaaactgaaacataaatctggaagatgtgagcctgctttagaaaaggctattgtggaactggagcatggtataaacggtttgaagtactttgtttgccttgatccacggttgcaggaggataaaggagacactaccttggtacatgcctgttgccacaatggacaaaagaagattagtgttgtataattttatgtctgggctgaaggtcgtgtttgatcgagagaggaaggtcttgggctggaaaaactttgattgttacagcgtgggcaactcaagaagcaaccttccagtgaacccaaatccttctggtgttccccctgcccctggcttgggaccgaacagctacactcactcctgaagctaccaagggtgcctcaccgaatggcacccaagtcaatgtcttgcaaccttctgcaagtttttcgccgaagctgcattgcaacagaaacgtcctcgtcatcgctgctctgctgttcctcgtaatcctttgatcacctcaactccccatgacaatcttttcaaaaaccaaatcaacagatatgattgattttagttaaaacttggtttaccatgtattgagttacgtatagtgcgatagtatcacattcttttggcttgtgtctacagttccagtaggagttaggatagaacacaggatgagtccatagccctttttttgcacgttcataatgtactcataatgtacctggtgggtgtactgtgtacatattagatatgacttcaggatgtattgattttataagataattgaataatgatgctcgcatacacagatatatatacttcacatatgctcacgtgtaccaccatcgtcatctgtcatgtttttaatacagtcaagaggcatgatccgcccccacactcctccgtcgcaggcaacaccgcctcccctctgctccgcgattacggggaccaaggccgccatcaacgccctccatcgcaggcaacatcgccagtcatggaaggttgccgaggatccccaccctcctccccctctgctacgcgattacgggcctctgctacgcgattacggggatccaaggctcaacgcgaagcgccgcaggcggcaagaggagcgtctacctcgtagaccgcggtctgtatggggttgtgcgtccacgagcaaccctattgacgagatggaggacgcctccaccgtggccctgcgattcgccgacgtgccggtgcgcctgcatgccagccgccatgaccttgccagtctggacctcgacgtcgacgcactccgcctgtcgacacacatttttggcatcttctacggacacgacggtgtcgagtggccaactactgccgggagaggttccagaggctggatgatgaggtgtcaaggcaagcaagcaggcttgtccgtggcgtccatgagccatggccggtggccgccaagaacgtgggctcaaatgcggttgtcaccagtttgctcatcccatgctgtggttgccaactgcggggattcacatgtcgttctccgccgtggaaaggagacaatagagtcatcgattgatcgcacgtctgacattaaggatgagcaggcgaggattgaggcgttgggactgggatgcaaggtcatccaatggaatggctatcgagtctccggtatacttgctgtggtggactggtgtactagaagtacttcggaaaaggaacttgtaaggaagcaggtctttgtccttggccgaatgggaaatgctaaggaagctctttcgacaattataaacaaactggaagtcatgcagatgcaggaggttgttgaaattgttacggagcagcacgatgacgaactgtgggaggaactgattagacaatgccacaagaagcctgaaatgttaaggaagattaactttggatctgatcaatgttattctgattgctatgatcctatctaccaatgtggacatggttgttcaaaatccacaattcttattcatcgattatttccttccagtaacaatttcttctacttattcatggatcattttggttttagctggttgagcactttttctcaatctccagtgaacacatctaggatgactcttcacatccgtcagttgtggggctgtgctacttaa

SEQ ID NO: 17444 - DNA, 5107 bp, Zea Mays
atgttctgcctccgcaccctccgatcgcccgccgcgtccgattcccctgaccccgcctcgcccgcaatctccgccgccgcgcccgcgacatccatcacccccacccgcgacatcccgcctcgcacgccatcaactcgcagcggcccttctccgaacgtggtttgttttttcgtttgctcgagcagccagccgactcgtctccagcaatgcggccggggtcggctcgctggaggtgggcgtcgccgccgacacctccaacgcctccaggcagggattaggtgagccgtcggctaatcactcgtcattgggaggatctcctcctcccgttcagatttgggcaagaaaggcccgggcgcgatgtccatggccgaggaggggagtgaggccgaggaggggagtgaggccgaggcgctcgagaaagacggcagcaaggcttcttcaccttcggggccagccagtcgactcgtctccagcaatgcggccggggtcggctcgctggaggtgggcgccgccaccgacacctccaacgcctccaggcagggattagatttgggcaagaaaggcccgggcgcgatgtccatggccgaggaggggagtgaggccgaggaggggagtgaggccgaggcgctcgagaaagacggcagcaaggcttcttcaccttcggggccagccagccgactcgtctccagcaatgcggccggggtcggctcgctggaggtgggcgccgccgccgacacctccaacgcctccaggcagggattagatttgggcaagaaaggcccgggcgcgatgtccatggccgaggaggggagtgaggccgaggaggggagtgaggctgaggcgctcgagaaagacggcagcaaggcttcttcaccttcggggccaagtaaacaccacgggcaagggcgcaaagcatcgcgtgttgttgtttcgagatgcgtgggcatggccgtgctttcccttccgttggggtcaagctgaccggcctcgtgtgccccgtactcccaccgccgtcctgcacgcaaatcccaaaaatcagataaaaagactggtttttctccccgttctccttttccccccactaatcgatttaggttcttagttaggcgttcctgccgctcttcttcctcccgtgtcgtcagaggaagccgcgaaaagcatgcaggaatcaggcggtcttgaggacgaggagctacaggtgcaggatgcagttgccagtggttccaagaggagcaaagactccgccgccgccgccacacgcagcgccaatgtcagctcgccctctgtggttcactctcaccctgccatcctccctgctcccgcgcagcagattccagaggttaagcaagcagataccacacatatgcattctatgcctgccgcgcgctttacgtagctaacaagttgaattcatcatcaacatatccattgctcgagcttttcttcaagaaccaggtccaccacattccgtattacaatggttaaagtttttatatttgcttgattctctttttttatatgctaattgacttttttctcttctatattatccacttgtgtgggttggttatagcttgtgatttcacatttcatttgttagcggccaagatgtatttctgttagtttatgactaccactcaggaacttatgtgtccatcatttgagtagaataaaataggtgaacttactggtattatttcattgtgttctccctgcttccatttgaaaactataaattacctgatgattgtaattcactaggattttcctcttgagaaggcagtgttaggtataaatattgtagccttataagctacttaattgaatgtgcttgtttattccttaatcatgaattttttctcattcacattggagtagctttttgtgctcaataaaatgggctgacatctaattgtttgctgactgtataactattggttggtatgatgccaatttgccgaactcccttgctttgttagtaaatggttcatgaaatatgtacaaatacaaacagatgcaaagtcttgatagaaaatccgtttctcaaacaaaggagcattattttagaggaggtcaatgtggagtggactggatccgtgctggagagcgaagcaaattgagggaggacaagtggtggacaaataaggcttagtaatgataattaagtaataatttgaaaaatacaattgaagaatatcaaattctctaaaataaaataacagtagagcttgaatggatataaattatcactcagttggccatttacagtatgtataccatacggatttcatagattaaagagtttggagtattcaaagcttgtatctcagtgcctaaacactgaatggacagctaccatagggcaaagtgaagaaacggaagagttgagcaagatcacattagagaataaggatattcagcttgatatcaatataagagaagaatctcggagttcttcacaacaagggaactttgacacagaaggtaccagctccagtgaggctttcttgcttggaacggttgcttcagaaaagatgcttgagaaactgaaacataaatctggaagatgtgagcctgctttagaaaaggctattgtggaactggagcatggtataaacggtttgaagtactttgtttgccttgatccacggttgcaggtttgttccgccactgataccaggtgaagcttcacccttcagatccctgtcgtgacgaatggttcgtgggtgctggggagggattggatccgttggattcatgagatgtgtggattgttcctgccggatatcgtgacatgtttttagatctagcagacaaaaccatgaactgtctagggctcctccgttgcctagatctactagagtgagtgagcctacagagttgacctcatccaggctccagttccaccccacggtcatcgtcctctgttgctctacgtttcatgcttctcacctcctctcctcaatctcatcactagaggcggaaagcagatcagatgagatttttggtcttgcgtggttcttttaatctgctcacatgatacttcttattcattgccgtccagtgaaattaattgccctcggttgaattggttcctttgccattttacttaggaggataaaggagacactaccttggtacatgcctgttgccacaatggacaaaagaagattagtgttgtataattttatgtctgggctgaaggtcgtgtttgatcgagagaggaaggtcttgggctggaaaaactttgattgttacagcgtgggcaactcaagaagcaaccttccagtgaacccaaatccttctggtgttccccctgcccctggcttgggaccgaacagctacactcactcctgaagctaccaagggtgcctcaccgaatggcacccaagtcaatgtcttgcaaccttctgcaagtttttcgccgaagctgcattgcaacagaaacgtcctcgtcatcgctgctctgctgttcctcgtaatcctttgatcacctcaactccccatgacaatcttttcaaaaaccaaatcaacagatatgattgattttagttaaaacttggtttaccatgtattgagttacgtatagtgcgatagtatcacattcttttggcttgtgtctacagttccagtaggagttaggatagaacacaggatgagtccatagccctttttttgcacgttcataatgtactcataatgtacctggtgggtgtactgtgtacatattagatatgacttcaggatgtattgattttataagataattgaataatgatgctcgcatacacagatatatatacttcacatatgctcacgtgtaccaccatcgtcatctgtcatgtttttaatacagtcaagaggcatgatccgcccccacactcctccgtcgcaggcaacaccgcctcccctctgctccgcgattacggggaccaaggccgccatcaacgccctccatcgcaggcaacatcgccagtcatggaaggttgccgaggatccccaccctcctccccctctgctacgcgattacgggcctctgctacgcgattacggggatccaaggctcaacgcgaagcgccgcaggcggcaagaggagcgtctacctcgtagaccgcggtctgtatggggttgtgcgtccacgagcaaccctattgacgagatggaggacgcctccaccgtggccctgcgattcgccgacgtgccggtgcgcctgcatgccagccgccatgaccttgccagtctggacctcgacgtcgacgcactccgcctgtcgacacacatttttggcatcttctacggacacgacggtgtcgagtggccaactactgccgggagaggttccagaggctggatgatgaggtgtcaaggcaagcaagcaggcttgtccgtggcgtccatgagccatggccggtggccgccaagaacgtgggctcaaatgcggttgtcaccagtttgctcatcccatgctgtggttgccaactgcggggattcacatgtcgttctccgccgtggaaaggagacaatagagtcatcgattgatcgcacgtctgacattaaggatgagcaggcgaggattgaggcgttgggactgggatgcaaggtcatccaatggaatggctatcgagtctccggtatacttgctgtggtggactggtgtactagaagtacttcggaaaaggaacttgtaaggaagcaggtctttgtccttggccgaatgggaaatgctaaggaagctctttcgacaattataaacaaactggaagtcatgcagatgcaggaggttgttgaaattgttacggagcagcacgatgacgaactgtgggaggaactgattagacaatgccacaagaagcctgaaatgttaaggaagattaactttggatctgatcaatgttattctgattgctatgatcctatctaccaatgtggacatggttgttcaaaatccacaattcttattcatcgattatttccttccagtaacaatttcttctacttattcatggatcattttggttttagctggttgagcactttttctcaatctccagtgaacacatctaggatgactcttcacatccgtcagttgtggggctgtgctacttaa

SEQ ID NO: 17445 - DNA, 3307 bp, Zea Mays
atgttctgcctccgcaccctccgatcgcccgccgcgtccgattcccctgaccccgcctcgcccgcaatctccgccgccgcgcccgcgacatccatcacccccacccgcgacatcccgcctcgcacgccatcaactcgcagcggcccttctccgaacgtggtttgttttttcgtttgctcgagcagccagccgactcgtctccagcaatgcggccggggtcggctcgctggaggtgggcgtcgccgccgacacctccaacgcctccaggcagggattaggtgagccgtcggctaatcactcgtcattgggaggatctcctcctcccgttcagatttgggcaagaaaggcccgggcgcgatgtccatggccgaggaggggagtgaggccgaggaggggagtgaggccgaggcgctcgagaaagacggcagcaaggcttcttcaccttcggggccagatttgggcaagaaaggcccgggcgcgatgtccatggccgaggaggggagtgaggccgaggaggggagtgaggccgaggcgctcgagaaagacggcagcaaggcttcttcaccttcggggccagccagccgactcgtctccagcaatgcggccggggtcggctcgctggaggtgggcgccgccgccgacacctccaacgcctccaggcagggattagatttgggcaagaaaggcccgggcgcgatgtccatggccgaggaggggagtgaggccgaggaggggagtgaggctgaggcgctcgagaaagacggcagcaaggcttcttcaccttcggggccaagcggtcttgaggacgaggagctacaggtgcaggatgcagttgccagtggttccaagaggagcaaagactccgccgccgccgccacacgcagcgccaatgtcagctcgccctctgtggttcactctcaccctgccatcctccctgctcccgcgcagcagattccagaggttaagcaagcagataccacacatatgcattctatgcctgccgcgcgctttacgtagctaacaagttgaattcatcatcaacatatccattgctcgagcttttcttcaagaaccagctaccatagggcaaagtgaagaaacggaagagttgagcaagatcacattagagaataaggatattcagcttgatatcaatataagagaagaatctcggagttcttcacaacaagggaactttgacacagaaggtaccagctccagtgaggctttcttgcttggaacggttgcttcagaaaagatgcttgagaaactgaaacataaatctggaagatgtgagcctgctttagaaaaggctattgtggaactggagcatggtataaacggtttgaagtactttgtttgccttgatccacggttgcagataattttatgtctgggctgaaggtcgtgtttgatcgagagaggaaggtcttgggctggaaaaactttgattgttacagcgtgggcaactcaagaagcaaccttccagtgaacccaaatccttctggtgttccccctgcccctggcttgggaccgaacagctacactcactcctgaagctaccaagggtgcctcaccgaatggcacccaagtcaatgtcttgcaaccttctgcaagtttttcgccgaagctgcattgcaacagaaacgtcctcgtcatcgctgctctgctgttcctcgtaatcctttgatcacctcaactccccatgacaatcttttcaaaaaccaaatcaacagatatgattgattttagttaaaacttggtttaccatgtattgagttacgtatagtgcgatagtatcacattcttttggcttgtgtctacagttccagtaggagttaggatagaacacaggatgagtccatagccctttttttgcacgttcataatgtactcataatgtacctggtgggtgtactgtgtacatattagatatgacttcaggatgtattgattttataagataattgaataatgatgctcgcatacacagatatatatacttcacatatgctcacgtgtaccaccatcgtcatctgtcatgtttttaatacagtcaagaggcatgatccgcccccacactcctccgtcgcaggcaacaccgcctcccctctgctccgcgattacggggaccaaggccgccatcaacgccctccatcgcaggcaacatcgccagtcatggaaggttgccgaggatccccaccctcctccccctctgctacgcgattacgggcctctgctacgcgattacggggatccaaggctcaacgcgaagcgccgcaggcggcaagaggagcgtctacctcgtagaccgcggtctgtatggggttgtgcgtccacgagcaaccctattgacgagatggaggacgcctccaccgtggccctgcgattcgccgacgtgccggtgcgcctgcatgccagccgccatgaccttgccagtctggacctcgacgtcgacgcactccgcctgtcgacacacatttttggcatcttctacggacacgacggtgtcgagtggccaactactgccgggagaggttccagaggctggatgatgaggtgtcaaggcaagcaagcaggcttgtccgtggcgtccatgagccatggccggtggccgccaagaacgtgggctcaaatgcggttgtcaccagtttgctcatcccatgctgtggttgccaactgcggggattcacatgtcgttctccgccgtggaaaggagacaatagagtcatcgattgatcgcacgtctgacattaaggatgagcaggcgaggattgaggcgttgggactgggatgcaaggtcatccaatggaatggctatcgagtctccggtatacttgctgtggtggactggtgtactagaagtacttcggaaaaggaacttgtaaggaagcaggtctttgtccttggccgaatgggaaatgctaaggaagctctttcgacaattataaacaaactggaagtcatgcagatgcaggaggttgttgaaattgttacggagcagcacgatgacgaactgtgggaggaactgattagacaatgccacaagaagcctgaaatgttaaggaagattaactttggatctgatcaatgttattctgattgctatgatcctatctaccaatgtggacatggttgttcaaaatccacaattcttattcatcgattatttccttccagtaacaatttcttctacttattcatggatcattttggttttagctggttgagcactttttctcaatctccagtgaacacatctaggatgactcttcacatccgtcagttgtggggctgtgctacttaa

SEQ ID NO: 17446 - DNA, 5118 bp, Zea Mays
atgttctgcctccgcaccctccgatcgcccgccgcgtccgattcccctgaccccgcctcgcccgcaatctccgccgccgcgcccgcgacatccatcacccccacccgcgacatcccgcctcgcacgccatcaactcgcagcggcccttctccgaacgtggtttgttttttcgtttgctcgagcagccagccgactcgtctccagcaatgcggccggggtcggctcgctggaggtgggcgtcgccgccgacacctccaacgcctccaggcagggattaggtgagccgtcggctaatcactcgtcattgggaggatctcctcctcccgttcagatttgggcaagaaaggcccgggcgcgatgtccatggccgaggaggggagtgaggccgaggaggggagtgaggccgaggcgctcgagaaagacggcagcaaggcttcttcaccttcggggccagccagtcgactcgtctccagcaatgcggccggggtcggctcgctggaggtgggcgccgccaccgacacctccaacgcctccaggcagggattagttaggcgttcctgccgctcttcttcctcccgtgtcgtcagaggaagccgcgaaaagcatgcaggaatcaggcggtcttgaggacgaggagctacaggtgcaggatgcagttgccagtggttccaagaggagcaaagactccgccgccgccgccacacgcagcgccaatgtcagctcgccctctgtggttcactctcaccctgccatcctccctgctcccgcgcagcagattccagaggttaagcaagcagataccacacatatgcattctatgcctgccgcgcgctttacgtagctaacaagttgaattcatcatcaacatatccattgctcgagcttttcttcaagaaccaggtccaccacattccgtattacaatggttaaagtttttatatttgcttgattctctttttttatatgctaattgacttttttctcttctatattatccacttgtgtgggttggttatagcttgtgatttcacatttcatttgttagcggccaagatgtatttctgttagtttatgactaccactcaggaacttatgtgtccatcatttgagtagaataaaataggtgaacttactggtattatttcattgtgttctccctgcttccatttgaaaactataaattacctgatgattgtaattcactaggattttcctcttgagaaggcagtgttaggtataaatattgtagccttataagctacttaattgaatgtgcttgtttattccttaatcatgaattttttctcattcacattggagtagctttttgtgctcaataaaatgggctgacatctaattgtttgctgactgtataactattggttggtatgatgccaatttgccgaactcccttgctttgttagtaaatggttcatgaaatatgtacaaatacaaacagatgcaaagtcttgatagaaaatccgtttctcaaacaaaggagcattattttagaggaggtcaatgtggagtggactggatccgtgctggagagcgaagcaaattgagggaggacaagtggtggacaaataaggcttagtaatgataattaagtaataatttgaaaaatacaattgaagaatatcaaattctctaaaataaaataacagtagagcttgaatggatataaattatcactcagttggccatttacagtatgtataccatacggatttcatagattaaagagtttggagtattcaaagcttgtatctcagtgcctaaacactgaatggacagctaccatagggcaaagtgaagaaacggaagagttgagcaagatcacattagagaataaggatattcagcttgatatcaatataagagaagaatctcggagttcttcacaacaagggaactttgacacagaaggtaccagctccagtgaggctttcttgcttggaacggtaaggaatgaacatatttatttcattcttctcagccactaaccaaatcagctccagtgaggttagtttacagcaatgttcttgtatggttctcaggttgagttttccattttatttatgtagccaaagtagatgtattatgcatgtcgtcgtttggaaacttgacaaaccgattatacttgtttaggttgcttcagaaaagatgcttgagaaactgaaacataaatctggaagatgtgagcctgctttagaaaaggctattgtggaactggagcatggtataaacggtttgaagtactttgtttgccttgatccacggttgcaggtttgttccgccactgataccaggtgaagcttcacccttcagatccctgtcgtgacgaatggttcgtgggtgctggggagggattggatccgttggattcatgagatgtgtggattgttcctgccggatatcgtgacatgtttttagatctagcagacaaaaccatgaactgtctagggctcctccgttgcctagatctactagagtgagtgagcctacagagttgacctcatccaggctccagttccaccccacggtcatcgtcctctgttgctctacgtttcatgcttctcacctcctctcctcaatctcatcactagaggcggaaagcagatcagatgagatttttggtcttgcgtggttcttttaatctgctcacatgatacttcttattcattgccgtccagtgaaattaattgccctcggttgaattggttcctttgccattttacttaggaggataaaggagacactaccttggtacatgcctgttgccacaatggacaaaagaagattagtgttgtgtgagattttttcattcctttgatctattgcatgctatttgtaccctaatcgacaaaatagatgagactcaattcaggagcaaatcactagtcctgttcacaatccaattcactatggttaaaatatcaaacttatgctccttgaggtttgttttttcctgatcttcctttaatatctgatgactgatggactggtgagttcatgatctgcttcatgcttttccttttatatatggtcactacctcactggttagttcatggtctctgtgtgtgtgcgtgcgtgtgtgtgtgcgcacgcttctgcattcaaactcttcaaccttgtgtttcaactaaactcttgaacattcttaccttggctggtcattttatatgcagataattttatgtctgggctgaaggtcgtgtttgatcgagagaggaaggtcttgggctggaaaaactttgattgttacagcgtgggcaactcaagaagcaaccttccagtgaacccaaatccttctggtgttccccctgcccctggcttgggaccgaacagctacactcactcctgaagctaccaagggtgcctcaccgaatggcacccaagtcaatgtcttgcaaccttctgcaagtttttcgccgaagctgcattgcaacagaaacgtcctcgtcatcgctgctctgctgttcctcgtaatcctttgatcacctcaactccccatgacaatcttttcaaaaaccaaatcaacagatatgattgattttagttaaaacttggtttaccatgtattgagttacgtatagtgcgatagtatcacattcttttggcttgtgtctacagttccagtaggagttaggatagaacacaggatgagtccatagccctttttttgcacgttcataatgtactcataatgtacctggtgggtgtactgtgtacatattagatatgacttcaggatgtattgattttataagataattgaataatgatgctcgcatacacagatatatatacttcacatatgctcacgtgtaccaccatcgtcatctgtcatgtttttaatacagtcaagaggcatgatccgcccccacactcctccgtcgcaggcaacaccgcctcccctctgctccgcgattacggggaccaaggccgccatcaacgccctccatcgcaggcaacatcgccagtcatggaaggttgccgaggatccccaccctcctccccctctgctacgcgattacgggcctctgctacgcgattacggggatccaaggctcaacgcgaagcgccgcaggcggcaagaggagcgtctacctcgtagaccgcggtctgtatggggttgtgcgtccacgagcaaccctattgacgagatggaggacgcctccaccgtggccctgcgattcgccgacgtgccggtgcgcctgcatgccagccgccatgaccttgccagtctggacctcgacgtcgacgcactccgcctgtcgacacacatttttggcatcttctacggacacgacggtgtcgagtggccaactactgccgggagaggttccagaggctggatgatgaggtgtcaaggcaagcaagcaggcttgtccgtggcgtccatgagccatggccggtggccgccaagaacgtgggctcaaatgcggttgtcaccagtttgctcatcccatgctgtggttgccaactgcggggattcacatgtcgttctccgccgtggaaaggagacaatagagtcatcgattgatcgcacgtctgacattaaggatgagcaggcgaggattgaggcgttgggactgggatgcaaggtcatccaatggaatggctatcgagtctccggtatacttgctgtggtggactggtgtactagaagtacttcggaaaaggaacttgtaaggaagcaggtctttgtccttggccgaatgggaaatgctaaggaagctctttcgacaattataaacaaactggaagtcatgcagatgcaggaggttgttgaaattgttacggagcagcacgatgacgaactgtgggaggaactgattagacaatgccacaagaagcctgaaatgttaaggaagattaactttggatctgatcaatgttattctgattgctatgatcctatctaccaatgtggacatggttgttcaaaatccacaattcttattcatcgattatttccttccagtaacaatttcttctacttattcatggatcattttggttttagctggttgagcactttttctcaatctccagtgaacacatctaggatgactcttcacatccgtcagttgtggggctgtgctacttaa

SEQ ID NO: 17447 - DNA, 2112 bp, Zea Mays
ccggcctcgtgtgccccgtactcccaccgccgtcctgcacgcaaatcccaaaaatcagataaaaagactggtttttctccccgttctccttttccccccactaatcgatttaggttcttagttaggcgttcctgccgctcttcttcctcccgtgtcgtcagaggaagccgcgaaaagcatgcaggaatcaggcggtcttgaggacgaggagctacaggtgcaggatgcagttgccagtggttccaagaggagcaaagactccgccgccgccgccacacgcagcgccaatgtcagctcgccctctgtggttcactctcaccctgccatcctccctgctcccgcgcagcagattccagaggttaagcaagcagataccacacatatgcattctatgcctgccgcgcgctttacgtagctaacaagttgaattcatcatcaacatatccattgctcgagcttttcttcaagaaccagctaccatagggcaaagtgaagaaacggaagagttgagcaagatcacattagagaataaggatattcagcttgatatcaatataagagaagaatctcggagttcttcacaacaagggaactttgacacagaaggtaccagctccagtgaggctttcttgcttggaacggtaaggaatgaacatatttatttcattcttctcagccactaaccaaatcagctccagtgaggttagtttacagcaatgttcttgtatggttctcaggttgagttttccattttatttatgtagccaaagtagatgtattatgcatgtcgtcgtttggaaacttgacaaaccgattatacttgtttaggttgcttcagaaaagatgcttgagaaactgaaacataaatctggaagatgtgagcctgctttagaaaaggctattgtggaactggagcatggtataaacggtttgaagtactttgtttgccttgatccacggttgcaggtttgttccgccactgataccaggtgaagcttcacccttcagatccctgtcgtgacgaatggttcgtgggtgctggggagggattggatccgttggattcatgagatgtgtggattgttcctgccggatatcgtgacatgtttttagatctagcagacaaaaccatgaactgtctagggctcctccgttgcctagatctactagagtgagtgagcctacagagttgacctcatccaggctccagttccaccccacggtcatcgtcctctgttgctctacgtttcatgcttctcacctcctctcctcaatctcatcactagaggcggaaagcagatcagatgagatttttggtcttgcgtggttcttttaatctgctcacatgatacttcttattcattgccgtccagtgaaattaattgccctcggttgaattggttcctttgccattttacttaggaggataaaggagacactaccttggtacatgcctgttgccacaatggacaaaagaagattagtgttgtataattttatgtctgggctgaaggtcgtgtttgatcgagagaggaaggtcttgggctggaaaaactttgattcgtgggcaactcaagaagcaaccttccagtgaacccaaatccttctggtgttccccctgcccctggcttgggaccgaacagctacactcactcctgaagctaccaagggtgcctcaccgaatggcacccaagtcaatgtcttgcaaccttctgcaagtttttcgccgaagctgcattgcaacagaaacgtcctcgtcatcgctgctctgctgttcctcgaccttcggcgaaaatttccagatacccgtactcttttcatatggcataacacactagcattaagtcttatgagagaccttgctaaagaattagtgcttggaggggaagaatgacctagaactgaagatggatgagctgatgtgaaaaatgaggggaagaatgacctagaactgaagatggaggagctcaggtgaaaaatgaacttgttcattgtgtgttttctgaccttttttggaattgtattaaaatatactgtaatgaattggtgtaagaatgtgttggaagtagcaaagaacctgatgccttttgcaatgagaatgtctttctggca

SEQ ID NO: 17448 - DNA, 2378 bp, Zea Mays
gttaggcgttcctgccgctcttcttcctcccgtgtcgtcagaggaagccgcgaaaagcatgcaggaatcaggcggtcttgaggacgaggagctacaggtgcaggatgcagttgccagtggttccaagaggagcaaagactccgccgccgccgccacacgcagcgccaatgtcagctcgccctctgtggttcactctcaccctgccatcctccctgctcccgcgcagcagattccagaggttaagcaagcagataccacacatatgcattctatgcctgccgcgcgctttacgtagctaacaagttgaattcatcatcaacatatccattgctcgagcttttcttcaagaaccagctaccatagggcaaagtgaagaaacggaagagttgagcaagatcacattagagaataaggatattcagcttgatatcaatataagagaagaatctcggagttcttcacaacaagggaactttgacacagaaggtaccagctccagtgaggctttcttgcttggaacggtaaggaatgaacatatttatttcattcttctcagccactaaccaaatcagctccagtgaggttagtttacagcaatgttcttgtatggttctcaggttgagttttccattttatttatgtagccaaagtagatgtattatgcatgtcgtcgtttggaaacttgacaaaccgattatacttgtttaggttgcttcagaaaagatgcttgagaaactgaaacataaatctggaagatgtgagcctgctttagaaaaggctattgtggaactggagcatggtataaacggtttgaagtactttgtttgccttgatccacggttgcaggtttgttccgccactgataccaggtgaagcttcacccttcagatccctgtcgtgacgaatggttcgtgggtgctggggagggattggatccgttggattcatgagatgtgtggattgttcctgccggatatcgtgacatgtttttagatctagcagacaaaaccatgaactgtctagggctcctccgttgcctagatctactagagtgagtgagcctacagagttgacctcatccaggctccagttccaccccacggtcatcgtcctctgttgctctacgtttcatgcttctcacctcctctcctcaatctcatcactagaggcggaaagcagatcagatgagatttttggtcttgcgtggttcttttaatctgctcacatgatacttcttattcattgccgtccagtgaaattaattgccctcggttgaattggttcctttgccattttacttaggaggataaaggagacactaccttggtacatgcctgttgccacaatggacaaaagaagattagtgttgtgtgagattttttcattcctttgatctattgcatgctatttgtaccctaatcgacaaaatagatgagactcaattcaggagcaaatcactagtcctgttcacaatccaattcactatggttaaaatatcaaacttatgctccttgaggtttgttttttcctgatcttcctttaatatctgatgactgatggactggtgagttcatgatctgcttcatgcttttccttttatatatggtcactacctcactggttagttcatggtctctgtgtgtgtgcgtgcgtgtgtgtgtgcgcacgcttctgcattcaaactcttcaaccttgtgtttcaactaaactcttgaacattcttaccttggctggtcattttatatgcagataattttatgtctgggctgaaggtcgtgtttgatcgagagaggaaggtcttgggctggaaaaactttgattgttacagcgtgggcaactcaagaagcaaccttccagtgaacccaaatccttctggtgttccccctgcccctggcttgggaccgaacagctacactcactcctgaagctaccaagggtgcctcaccgaatggcacccaagtcaatgtcttgcaaccttctgcaagtttttcgccgaagctgcattgcaacagaaacgtcctcgtcatcgctgctctgctgttcctcgaccttcggcgaaaatttccagatacccgtactcttttcatatggcataacacactagcattaagtcttatgagagaccttgctaaagaattagtgcttggaggggaagaatgacctagaactgaagatggatgagctgatgtgaaaaatgaggggaagaatgacctagaactgaagatggaggagctcaggtgaaaaatgaacttgttcattgtgtgttttctgaccttttttggaattgtattaaaatatactgtaatgaattggtgtaagaatgtgttggaagtagcaaagaacctgatgccttttgcaatgagaatgtctttctggca

SEQ ID NO: 17449 - DNA, 1357 bp, Zea Mays
ctcccgtgtcgtcagaggaagccgcgaaaagcacgcaggaatcagttaggcgttcctgccgctcttcttcctcccgtgtcgtcagaggaagccgcgaaaagcatgcaggaatcaggcggtcttgaggacgaggagctacaggtgcaggatgcagttgccagtggttccaagaggagcaaagactccgccgccgccgccacacgcagcgccaatgtcagctcgccctctgtggttcactctcaccctgccatcctccctgctcccgcgcagcagattccagaggttaagcaagcagataccacacatatgcattctatgcctgccgcgcgctttacgtagctaacaagttgaattcatcatcaacatatccattgctcgagcttttcttcaagaaccagctaccatagggcaaagtgaagaaacggaagagttgagcaagatcacattagagaataaggatattcagcttgatatcaatataagagaagaatctcggagttcttcacaacaagggaactttgacacagaaggtaccagctccagtgaggctttcttgcttggaacggttgcttcagaaaagatgcttgagaaactgaaacataaatctggaagatgtgagcctgctttagaaaaggctattgtggaactggagcatggtataaacggtttgaagtactttgtttgccttgatccacggttgcaggtttgttccgccactgataccaggtataattttatgtctgggctgaaggtcgtgtttgatcgagagaggaaggtcttgggctggaaaaactttgattgttacagcgtgggcaactcaagaagcaaccttccagtgaacccaaatccttctggtgttccccctgcccctggcttgggaccgaacagctacactcactcctgaagctaccaagggtgcctcaccgaatggcacccaagtcaatgtcttgcaaccttctgcaagtttttcgccgaagctgcattgcaacagaaacgtcctcgtcatcgctgctctgctgttcctcgaccttcggcgaaaatttccagatacccgtactcttttcatatggcataacacactagcattaagtcttatgagagaccttgctaaagaattagtgcttggaggggaagaatgacctagaactgaagatggatgagctgatgtgaaaaatgaggggaagaatgacctagaactgaagatggaggagctcaggtgaaaaatgaacttgttcattgtgtgttttctgaccttttttggaattgtattaaaatatactgtaatgaattggtgtaagaatgtgttggaagtagcaaagaacctgatgccttttgcaatgagaatgtctttctggca

SEQ ID NO: 17450 - DNA, 2319 bp, Zea Mays
atgttctgcctccgcaccctccgatcgcccgccgcgtccgattcccctgaccccgcctcgcccgcaatctccgccgccgcgcccgcgacatccatcacccccacccgcgacatcccgcctcgcacgccatcaactcgcagcggcccttctccgaacgtggtttgttttttcgtttgctcgagcagccagccgactcgtctccagcaatgcggccggggtcggctcgctggaggtgggcgtcgccgccgacacctccaacgcctccaggcagggattaggtgagccgtcggctaatcactcgtcattgggaggatctcctcctcccgttcagatttgggcaagaaaggcccgggcgcgatgtccatggccgaggaggggagtgaggccgaggaggggagtgaggccgaggcgctcgagaaagacggcagcaaggcttcttcaccttcggggccagccagtcgactcgtctccagcaatgcggccggggtcggctcgctggaggtgggcgccgccaccgacacctccaacgcctccaggcagggattagatttgggcaagaaaggcccgggcgcgatgtccatggccgaggaggggagtgaggccgaggaggggagtgaggccgaggcgctcgagaaagacggcagcaaggcttcttcaccttcggggccagccagccgactcgtctccagcaatgcggccggggtcggctcgctggaggtgggcgccgccgccgacacctccaacgcctccaggcagggattagatttgggcaagaaaggcccgggcgcgatgtccatggccgaggaggggagtgaggccgaggaggggagtgaggctgaggcgctcgagaaagacggcagcaaggcttcttcaccttcggggccaagtaaacaccacgggcaagggcgcaaagcatcgcgtgttgttgtttcgagatgcgtgggcatggccgtgctttcccttccgttggggtcaagctgaccggcctcgtgtgccccgtactcccaccgccgtcctgcacgcaaatcccaaaaatcagataaaaagactggtttttctccccgttctccttttccccccactaatcgatttaggttcttagttaggcgttcctgccgctcttcttcctcccgtgtcgtcagaggaagccgcgaaaagcatgcaggaatcaggcggtcttgaggacgaggagctacaggtgcaggatgcagttgccagtggttccaagaggagcaaagactccgccgccgccgccacacgcagcgccaatgtcagctcgccctctgtggttcactctcaccctgccatcctccctgctcccgcgcagcagattccagaggttaagcaagcagataccacacatatgcattctatgcctgccgcgcgctttacgtagctaacaagttgaattcatcatcaacatatccattgctcgagcttttcttcaagaaccagctaccatagggcaaagtgaagaaacggaagagttgagcaagatcacattagagaataaggatattcagcttgatatcaatataagagaagaatctcggagttcttcacaacaagggaactttgacacagaaggtaccagctccagtgaggctttcttgcttggaacggaggataaaggagacactaccttggtacatgcctgttgccacaatggacaaaagaagattagtgttgtataattttatgtctgggctgaaggtcgtgtttgatcgagagaggaaggtcttgggctggaaaaactttgattgttacagcgtgggcaactcaagaagcaaccttccagtgaacccaaatccttctggtgttccccctgcccctggcttgggaccgaacagctacactcactcctgaagctaccaagggtgcctcaccgaatggcacccaagtcaatgtcttgcaaccttctgcaagtttttcgccgaagctgcattgcaacagaaacgtcctcgtcatcgctgctctgctgttcctcgaccttcggcgaaaatttccagatacccgtactcttttcatatggcataacacactagcattaagtcttatgagagaccttgctaaagaattagtgcttggaggggaagaatgacctagaactgaagatggatgagctgatgtgaaaaatgaggggaagaatgacctagaactgaagatggaggagctcaggtgaaaaatgaacttgttcattgtgtgttttctgaccttttttggaattgtattaaaatatactgtaatgaattggtgtaagaatgtgttggaagtagcaaagaacctgatgccttttgcaatgagaatgtctttctggca

SEQ ID NO: 17451 - DNA, 2904 bp, Zea Mays
atgttctgcctccgcaccctccgatcgcccgccgcgtccgattcccctgaccccgcctcgcccgcaatctccgccgccgcgcccgcgacatccatcacccccacccgcgacatcccgcctcgcacgccatcaactcgcagcggcccttctccgaacgtggtttgttttttcgtttgctcgagcagccagccgactcgtctccagcaatgcggccggggtcggctcgctggaggtgggcgtcgccgccgacacctccaacgcctccaggcagggattaggtgagccgtcggctaatcactcgtcattgggaggatctcctcctcccgttcagatttgggcaagaaaggcccgggcgcgatgtccatggccgaggaggggagtgaggccgaggaggggagtgaggccgaggcgctcgagaaagacggcagcaaggcttcttcaccttcggggccagccagtcgactcgtctccagcaatgcggccggggtcggctcgctggaggtgggcgccgccaccgacacctccaacgcctccaggcagggattagatttgggcaagaaaggcccgggcgcgatgtccatggccgaggaggggagtgaggccgaggaggggagtgaggccgaggcgctcgagaaagacggcagcaaggcttcttcaccttcggggccagccagccgactcgtctccagcaatgcggccggggtcggctcgctggaggtgggcgccgccgccgacacctccaacgcctccaggcagggattagatttgggcaagaaaggcccgggcgcgatgtccatggccgaggaggggagtgaggccgaggaggggagtgaggctgaggcgctcgagaaagacggcagcaaggcttcttcaccttcggggccaagtaaacaccacgggcaagggcgcaaagcatcgcgtgttgttgtttcgagatgcgtgggcatggccgtgctttcccttccgttggggtcaagctgaccggcctcgtgtgccccgtactcccaccgccgtcctgcacgcaaatcccaaaaatcagataaaaagactggtttttctccccgttctccttttccccccactaatcgatttaggttcttagttaggcgttcctgccgctcttcttcctcccgtgtcgtcagaggaagccgcgaaaagcatgcaggaatcaggcggtcttgaggacgaggagctacaggtgcaggatgcagttgccagtggttccaagaggagcaaagactccgccgccgccgccacacgcagcgccaatgtcagctcgccctctgtggttcactctcaccctgccatcctccctgctcccgcgcagcagattccagaggttaagcaagcagataccacacatatgcattctatgcctgccgcgcgctttacgtagctaacaagttgaattcatcatcaacatatccattgctcgagcttttcttcaagaaccagggcaaagtgaagaaacggaagagttgagcaagatcacattagagaataaggatattcagcttgatatcaatataagagaagaatctcggagttcttcacaacaagggaactttgacacagaaggtaccagctccagtgaggctttcttgcttggaacggttgcttcagaaaagatgcttgagaaactgaaacataaatctggaagatgtgagcctgctttagaaaaggctattgtggaactggagcatggtataaacggtttgaagtactttgtttgccttgatccacggttgcaggtttgttccgccactgataccaggtgaagcttcacccttcagatccctgtcgtgacgaatggttcgtgggtgctggggagggattggatccgttggattcatgagatgtgtggattgttcctgccggatatcgtgacatgtttttagatctagcagacaaaaccatgaactgtctagggctcctccgttgcctagatctactagagtgagtgagcctacagagttgacctcatccaggctccagttccaccccacggtcatcgtcctctgttgctctacgtttcatgcttctcacctcctctcctcaatctcatcactagaggcggaaagcagatcagatgagatttttggtcttgcgtggttcttttaatctgctcacatgatacttcttattcattgccgtccagtgaaattaattgccctcggttgaattggttcctttgccattttacttaggaggataaaggagacactaccttggtacatgcctgttgccacaatggacaaaagaagattagtgttgtataattttatgtctgggctgaaggtcgtgtttgatcgagagaggaaggtcttgggctggaaaaactttgattgttacagcgtgggcaactcaagaagcaaccttccagtgaacccaaatccttctggtgttccccctgcccctggcttgggaccgaacagctacactcactcctgaagctaccaagggtgcctcaccgaatggcacccaagtcaatgtcttgcaaccttctgcaagtttttcgccgaagctgcattgcaacagaaacgtcctcgtcatcgctgctctgctgttcctcgaccttcggcgaaaatttccagatacccgtactcttttcatatggcataacacactagcattaagtcttatgagagaccttgctaaagaattagtgcttggaggggaagaatgacctagaactgaagatggatgagctgatgtgaaaaatgaggggaagaatgacctagaactgaagatggaggagctcaggtgaaaaatgaacttgttcattgtgtgttttctgaccttttttggaattgtattaaaatatactgtaatgaattggtgtaagaatgtgttggaagtagcaaagaacctgatgccttttgcaatgagaatgtctttctggca

SEQ ID NO: 17452 - DNA, 3377 bp, Zea Mays
atgttctgcctccgcaccctccgatcgcccgccgcgtccgattcccctgaccccgcctcgcccgcaatctccgccgccgcgcccgcgacatccatcacccccacccgcgacatcccgcctcgcacgccatcaactcgcagcggcccttctccgaacgtggtttgttttttcgtttgctcgagcagccagccgactcgtctccagcaatgcggccggggtcggctcgctggaggtgggcgtcgccgccgacacctccaacgcctccaggcagggattaggtgagccgtcggctaatcactcgtcattgggaggatctcctcctcccgttcagatttgggcaagaaaggcccgggcgcgatgtccatggccgaggaggggagtgaggccgaggaggggagtgaggccgaggcgctcgagaaagacggcagcaaggcttcttcaccttcggggccagccagtcgactcgtctccagcaatgcggccggggtcggctcgctggaggtgggcgccgccaccgacacctccaacgcctccaggcagggattagatttgggcaagaaaggcccgggcgcgatgtccatggccgaggaggggagtgaggccgaggaggggagtgaggccgaggcgctcgagaaagacggcagcaaggcttcttcaccttcggggccagccagccgactcgtctccagcaatgcggccggggtcggctcgctggaggtgggcgccgccgccgacacctccaacgcctccaggcagggattagatttgggcaagaaaggcccgggcgcgatgtccatggccgaggaggggagtgaggccgaggaggggagtgaggctgaggcgctcgagaaagacggcagcaaggcttcttcaccttcggggccaagtaaacaccacgggcaagggcgcaaagcatcgcgtgttgttgtttcgagatgcgtgggcatggccgtgctttcccttccgttggggtcaagctgaccggcctcgtgtgccccgtactcccaccgccgtcctgcacgcaaatcccaaaaatcagataaaaagactggtttttctccccgttctccttttccccccactaatcgatttaggttcttagttaggcgttcctgccgctcttcttcctcccgtgtcgtcagaggaagccgcgaaaagcatgcaggaatcaggcggtcttgaggacgaggagctacaggtgcaggatgcagttgccagtggttccaagaggagcaaagactccgccgccgccgccacacgcagcgccaatgtcagctcgccctctgtggttcactctcaccctgccatcctccctgctcccgcgcagcagattccagaggttaagcaagcagataccacacatatgcattctatgcctgccgcgcgctttacgtagctaacaagttgaattcatcatcaacatatccattgctcgagcttttcttcaagaaccaggtccaccacattccgtattacaatggttaaagtttttatatttgcttgattctctttttttatatgctaattgacttttttctcttctatattatccacttgtgtgggttggttatagcttgtgatttcacatttcatttgttagcggccaagatgtatttctgttagtttatgactaccactcaggaacttatgtgtccatcatttgagtagaataaaataggtgaacttactggtattatttcattgtgttctccctgcttccatttgaaaactataaattacctgatgattgtaattcactaggattttcctcttgagaaggcagtgttaggtataaatattgtagccttataagctacttaattgaatgtgcttgtttattccttaatcatgaattttttctcattcacattggagtagctttttgtgctcaataaaatgggctgacatctaattgtttgctgactgtataactattggttggtatgatgccaatttgccgaactcccttgctttgttagtaaatggttcatgaaatatgtacaaatacaaacagatgcaaagtcttgatagaaaatccgtttctcaaacaaaggagcattattttagaggaggtcaatgtggagtggactggatccgtgctggagagcgaagcaaattgagggaggacaagtggtggacaaataaggcttagtaatgataattaagtaataatttgaaaaatacaattgaagaatatcaaattctctaaaataaaataacagtagagcttgaatggatataaattatcactcagttggccatttacagtatgtataccatacggatttcatagattaaagagtttggagtattcaaagcttgtatctcagtgcctaaacactgaatggacagctaccatagggcaaagtgaagaaacggaagagttgagcaagatcacattagagaataaggatattcagcttgatatcaatataagagaagaatctcggagttcttcacaacaagggaactttgacacagaaggtaccagctccagtgaggctttcttgcttggaacggttgcttcagaaaagatgcttgagaaactgaaacataaatctggaagatgtgagcctgctttagaaaaggctattgtggaactggagcatggtataaacggtttgaagtactttgtttgccttgatccacggttgcaggtttgttccgccactgataccaggaggataaaggagacactaccttggtacatgcctgttgccacaatggacaaaagaagattagtgttgtataattttatgtctgggctgaaggtcgtgtttgatcgagagaggaaggtcttgggctggaaaaactttgattgttacagcgtgggcaactcaagaagcaaccttccagtgaacccaaatccttctggtgttccccctgcccctggcttgggaccgaacagctacactcactcctgaagctaccaagggtgcctcaccgaatggcacccaagtcaatgtcttgcaaccttctgcaagtttttcgccgaagctgcattgcaacagaaacgtcctcgtcatcgctgctctgctgttcctcgaccttcggcgaaaatttccagatacccgtactcttttcatatggcataacacactagcattaagtcttatgagagaccttgctaaagaattagtgcttggaggggaagaatgacctagaactgaagatggatgagctgatgtgaaaaatgaggggaagaatgacctagaactgaagatggaggagctcaggtgaaaaatgaacttgttcattgtgtgttttctgaccttttttggaattgtattaaaatatactgtaatgaattggtgtaagaatgtgttggaagtagcaaagaacctgatgccttttgcaatgagaatgtctttctggca

SEQ ID NO: 17453 - DNA, 2567 bp, Zea Mays
atgttctgcctccgcaccctccgatcgcccgccgcgtccgattcccctgaccccgcctcgcccgcaatctccgccgccgcgcccgcgacatccatcacccccacccgcgacatcccgcctcgcacgccatcaactcgcagcggcccttctccgaacgtggtttgttttttcgtttgctcgagcagccagccgactcgtctccagcaatgcggccggggtcggctcgctggaggtgggcgtcgccgccgacacctccaacgcctccaggcagggattaggtgagccgtcggctaatcactcgtcattgggaggatctcctcctcccgttcagatttgggcaagaaaggcccgggcgcgatgtccatggccgaggaggggagtgaggccgaggaggggagtgaggccgaggcgctcgagaaagacggcagcaaggcttcttcaccttcggggccagccagtcgactcgtctccagcaatgcggccggggtcggctcgctggaggtgggcgccgccaccgacacctccaacgcctccaggcagggattagatttgggcaagaaaggcccgggcgcgatgtccatggccgaggaggggagtgaggccgaggaggggagtgaggccgaggcgctcgagaaagacggcagcaaggcttcttcaccttcggggccagccagccgactcgtctccagcaatgcggccggggtcggctcgctggaggtgggcgccgccgccgacacctccaacgcctccaggcagggattagatttgggcaagaaaggcccgggcgcgatgtccatggccgaggaggggagtgaggccgaggaggggagtgaggctgaggcgctcgagaaagacggcagcaaggcttcttcaccttcggggccaagtaaacaccacgggcaagggcgcaaagcatcgcgtgttgttgtttcgagatgcgtgggcatggccgtgctttcccttccgttggggtcaagctgaccggcctcgtgtgccccgtactcccaccgccgtcctgcacgcaaatcccaaaaatcagataaaaagactggtttttctccccgttctccttttccccccactaatcgatttaggttcttagttaggcgttcctgccgctcttcttcctcccgtgtcgtcagaggaagccgcgaaaagcatgcaggaatcaggcggtcttgaggacgaggagctacaggtgcaggatgcagttgccagtggttccaagaggagcaaagactccgccgccgccgccacacgcagcgccaatgtcagctcgccctctgtggttcactctcaccctgccatcctccctgctcccgcgcagcagattccagaggttaagcaagcagataccacacatatgcattctatgcctgccgcgcgctttacgtagctaacaagttgaattcatcatcaacatatccattgctcgagcttttcttcaagaaccagggcaaagtgaagaaacggaagagttgagcaagatcacattagagaataaggatattcagcttgatatcaatataagagaagaatctcggagttcttcacaacaagggaactttgacacagaaggtaccagctccagtgaggctttcttgcttggaacggtaaggaatgaacatatttatttcattcttctcagccactaaccaaatcagctccagtgaggttagtttacagcaatgttcttgtatggttctcaggttgagttttccattttatttatgtagccaaagtagatgtattatgcatgtcgtcgtttggaaacttgacaaaccgattatacttgtttaggttgcttcagaaaagatgcttgagaaactgaaacataaatctggaagatgtgagcctgctttagaaaaggctattgtggaactggagcatggtataaacggtttgaagtactttgtttgccttgatccacggttgcagataattttatgtctgggctgaaggtcgtgtttgatcgagagaggaaggtcttgggctggaaaaactttgattgttacagcgtgggcaactcaagaagcaaccttccagtgaacccaaatccttctggtgttccccctgcccctggcttgggaccgaacagctacactcactcctgaagctaccaagggtgcctcaccgaatggcacccaagtcaatgtcttgcaaccttctgcaagtttttcgccgaagctgcattgcaacagaaacgtcctcgtcatcgctgctctgctgttcctcgaccttcggcgaaaatttccagatacccgtactcttttcatatggcataacacactagcattaagtcttatgagagaccttgctaaagaattagtgcttggaggggaagaatgacctagaactgaagatggatgagctgatgtgaaaaatgaggggaagaatgacctagaactgaagatggaggagctcaggtgaaaaatgaacttgttcattgtgtgttttctgaccttttttggaattgtattaaaatatactgtaatgaattggtgtaagaatgtgttggaagtagcaaagaacctgatgccttttgcaatgagaatgtctttctggca

SEQ ID NO: 17454 - DNA, 2520 bp, Zea Mays
atgttctgcctccgcaccctccgatcgcccgccgcgtccgattcccctgaccccgcctcgcccgcaatctccgccgccgcgcccgcgacatccatcacccccacccgcgacatcccgcctcgcacgccatcaactcgcagcggcccttctccgaacgtggtttgttttttcgtttgctcgagcagccagccgactcgtctccagcaatgcggccggggtcggctcgctggaggtgggcgtcgccgccgacacctccaacgcctccaggcagggattaggcgttcctgccgctcttcttcctcccgtgtcgtcagaggaagccgcgaaaagcatgcaggaatcaggcggtcttgaggacgaggagctacaggtgcaggatgcagttgccagtggttccaagaggagcaaagactccgccgccgccgccacacgcagcgccaatgtcagctcgccctctgtggttcactctcaccctgccatcctccctgctcccgcgcagcagattccagaggttaagcaagcagtatgtataccatacggatttcatagattaaagagtttggagtattcaaagcttgtatctcagtgcctaaacactgaatggacagctaccatagggcaaagtgaagaaacggaagagttgagcaagatcacattagagaataaggatattcagcttgatatcaatataagagaagaatctcggagttcttcacaacaagggaactttgacacagaaggtaccagctccagtgaggctttcttgcttggaacggttgcttcagaaaagatgcttgagaaactgaaacataaatctggaagatgtgagcctgctttagaaaaggctattgtggaactggagcatggtataaacggtttgaagtactttgtttgccttgatccacggttgcaggtttgttccgccactgataccaggtgaagcttcacccttcagatccctgtcgtgacgaatggttcgtgggtgctggggagggattggatccgttggattcatgagatgtgtggattgttcctgccggatatcgtgacatgtttttagatctagcagacaaaaccatgaactgtctagggctcctccgttgcctagatctactagagtgagtgagcctacagagttgacctcatccaggctccagttccaccccacggtcatcgtcctctgttgctctacgtttcatgcttctcacctcctctcctcaatctcatcactagaggcggaaagcagatcagatgagatttttggtcttgcgtggttcttttaatctgctcacatgatacttcttattcattgccgtccagtgaaattaattgccctcggttgaattggttcctttgccattttacttaggaggataaaggagacactaccttggtacatgcctgttgccacaatggacaaaagaagattagtgttgtgtgagattttttcattcctttgatctattgcatgctatttgtaccctaatcgacaaaatagatgagactcaattcaggagcaaatcactagtcctgttcacaatccaattcactatggttaaaatatcaaacttatgctccttgaggtttgttttttcctgatcttcctttaatatctgatgactgatggactggtgagttcatgatctgcttcatgcttttccttttatatatggtcactacctcactggttagttcatggtctctgtgtgtgtgcgtgcgtgtgtgtgtgcgcacgcttctgcattcaaactcttcaaccttgtgtttcaactaaactcttgaacattcttaccttggctggtcattttatatgcagataattttatgtctgggctgaaggtcgtgtttgatcgagagaggaaggtcttgggctggaaaaactttgattgttacagcgtgggcaactcaagaagcaaccttccagtgaacccaaatccttctggtgttccccctgcccctggcttgggaccgaacagctacactcactcctgaagctaccaagggtgcctcaccgaatggcacccaagtcaatgtcttgcaaccttctgcaagtttttcgccgaagctgcattgcaacagaaacgtcctcgtcatcgctgctctgctgttcctcatatatatacttcacatatgctcacgtgtaccaccatcgtcatctgtcatgtttttaatacagtcaagaggcatggaccttcggcgaaaatttccagatacccgtactcttttcatatggcataacacactagcattaagtcttatgagagaccttgctaaagaattagtgcttggaggggaagaatgacctagaactgaagatggatgagctgatgtgaaaaatgaggggaagaatgacctagaactgaagatggaggagctcaggtgaaaaatgaacttgttcattgtgtgttttctgaccttttttggaattgtattaaaatatactgtaatgaattggtgtaagaatgtgttggaagtagcaaagaacctgatgccttttgcaatgagaatgtctttctggca

SEQ ID NO: 17455 - DNA, 4264 bp, Zea Mays
atgttctgcctccgcaccctccgatcgcccgccgcgtccgattcccctgaccccgcctcgcccgcaatctccgccgccgcgcccgcgacatccatcacccccacccgcgacatcccgcctcgcacgccatcaactcgcagcggcccttctccgaacgtggtttgttttttcgtttgctcgagcagccagccgactcgtctccagcaatgcggccggggtcggctcgctggaggtgggcgtcgccgccgacacctccaacgcctccaggcagggattaggtgagccgtcggctaatcactcgtcattgggaggatctcctcctcccgttcagatttgggcaagaaaggcccgggcgcgatgtccatggccgaggaggggagtgaggccgaggaggggagtgaggccgaggcgctcgagaaagacggcagcaaggcttcttcaccttcggggccagccagtcgactcgtctccagcaatgcggccggggtcggctcgctggaggtgggcgccgccaccgacacctccaacgcctccaggcagggattagatttgggcaagaaaggcccgggcgcgatgtccatggccgaggaggggagtgaggccgaggaggggagtgaggccgaggcgctcgagaaagacggcagcaaggcttcttcaccttcggggccagccagccgactcgtctccagcaatgcggccggggtcggctcgctggaggtgggcgccgccgccgacacctccaacgcctccaggcagggattagatttgggcaagaaaggcccgggcgcgatgtccatggccgaggaggggagtgaggccgaggaggggagtgaggctgaggcgctcgagaaagacggcagcaaggcttcttcaccttcggggccaagtaaacaccacgggcaagggcgcaaagcatcgcgtgttgttgtttcgagatgcgtgggcatggccgtgctttcccttccgttggggtcaagctgaccggcctcgtgtgccccgtactcccaccgccgtcctgcacgcaaatcccaaaaatcagataaaaagactggtttttctccccgttctccttttccccccactaatcgatttaggttcttagttaggcgttcctgccgctcttcttcctcccgtgtcgtcagaggaagccgcgaaaagcatgcaggaatcaggcggtcttgaggacgaggagctacaggtgcaggatgcagttgccagtggttccaagaggagcaaagactccgccgccgccgccacacgcagcgccaatgtcagctcgccctctgtggttcactctcaccctgccatcctccctgctcccgcgcagcagattccagaggttaagcaagcagataccacacatatgcattctatgcctgccgcgcgctttacgtagctaacaagttgaattcatcatcaacatatccattgctcgagcttttcttcaagaaccaggtccaccacattccgtattacaatggttaaagtttttatatttgcttgattctctttttttatatgctaattgacttttttctcttctatattatccacttgtgtgggttggttatagcttgtgatttcacatttcatttgttagcggccaagatgtatttctgttagtttatgactaccactcaggaacttatgtgtccatcatttgagtagaataaaataggtgaacttactggtattatttcattgtgttctccctgcttccatttgaaaactataaattacctgatgattgtaattcactaggattttcctcttgagaaggcagtgttaggtataaatattgtagccttataagctacttaattgaatgtgcttgtttattccttaatcatgaattttttctcattcacattggagtagctttttgtgctcaataaaatgggctgacatctaattgtttgctgactgtataactattggttggtatgatgccaatttgccgaactcccttgctttgttagtaaatggttcatgaaatatgtacaaatacaaacagatgcaaagtcttgatagaaaatccgtttctcaaacaaaggagcattattttagaggaggtcaatgtggagtggactggatccgtgctggagagcgaagcaaattgagggaggacaagtggtggacaaataaggcttagtaatgataattaagtaataatttgaaaaatacaattgaagaatatcaaattctctaaaataaaataacagtagagcttgaatggatataaattatcactcagttggccatttacagtatgtataccatacggatttcatagattaaagagtttggagtattcaaagcttgtatctcagtgcctaaacactgaatggacagctaccatagggcaaagtgaagaaacggaagagttgagcaagatcacattagagaataaggatattcagcttgatatcaatataagagaagaatctcggagttcttcacaacaagggaactttgacacagaaggtaccagctccagtgaggctttcttgcttggaacggttgcttcagaaaagatgcttgagaaactgaaacataaatctggaagatgtgagcctgctttagaaaaggctattgtggaactggagcatggtataaacggtttgaagtactttgtttgccttgatccacggttgcaggtttgttccgccactgataccaggtgaagcttcacccttcagatccctgtcgtgacgaatggttcgtgggtgctggggagggattggatccgttggattcatgagatgtgtggattgttcctgccggatatcgtgacatgtttttagatctagcagacaaaaccatgaactgtctagggctcctccgttgcctagatctactagagtgagtgagcctacagagttgacctcatccaggctccagttccaccccacggtcatcgtcctctgttgctctacgtttcatgcttctcacctcctctcctcaatctcatcactagaggcggaaagcagatcagatgagatttttggtcttgcgtggttcttttaatctgctcacatgatacttcttattcattgccgtccagtgaaattaattgccctcggttgaattggttcctttgccattttacttaggaggataaaggagacactaccttggtacatgcctgttgccacaatggacaaaagaagattagtgttgtgtgagattttttcattcctttgatctattgcatgctatttgtaccctaatcgacaaaatagatgagactcaattcaggagcaaatcactagtcctgttcacaatccaattcactatggttaaaatatcaaacttatgctccttgaggtttgttttttcctgatcttcctttaatatctgatgactgatggactggtgagttcatgatctgcttcatgcttttccttttatatatggtcactacctcactggttagttcatggtctctgtgtgtgtgcgtgcgtgtgtgtgtgcgcacgcttctgcattcaaactcttcaaccttgtgtttcaactaaactcttgaacattcttaccttggctggtcattttatatgcagataattttatgtctgggctgaaggtcgtgtttgatcgagagaggaaggtcttgggctggaaaaactttgattgttacagcgtgggcaactcaagaagcaaccttccagtgaacccaaatccttctggtgttccccctgcccctggcttgggaccgaacagctacactcactcctgaagctaccaagggtgcctcaccgaatggcacccaagtcaatgtcttgcaaccttctgcaagtttttcgccgaagctgcattgcaacagaaacgtcctcgtcatcgctgctctgctgttcctcatatatatacttcacatatgctcacgtgtaccaccatcgtcatctgtcatgtttttaatacagtcaagaggcatggaccttcggcgaaaatttccagatacccgtactcttttcatatggcataacacactagcattaagtcttatgagagaccttgctaaagaattagtgcttggaggggaagaatgacctagaactgaagatggatgagctgatgtgaaaaatgaggggaagaatgacctagaactgaagatggaggagctcaggtgaaaaatgaacttgttcattgtgtgttttctgaccttttttggaattgtattaaaatatactgtaatgaattggtgtaagaatgtgttggaagtagcaaagaacctgatgccttttgcaatgagaatgtctttctggca

SEQ ID NO: 17456 - DNA, 2831 bp, Zea Mays
atgttctgcctccgcaccctccgatcgcccgccgcgtccgattcccctgaccccgcctcgcccgcaatctccgccgccgcgcccgcgacatccatcacccccacccgcgacatcccgcctcgcacgccatcaactcgcagcggcccttctccgaacgtggtttgttttttcgtttgctcgagcagccagccgactcgtctccagcaatgcggccggggtcggctcgctggaggtgggcgtcgccgccgacacctccaacgcctccaggcagggattaggtgagccgtcggctaatcactcgtcattgggaggatctcctcctcccgttcagatttgggcaagaaaggcccgggcgcgatgtccatggccgaggaggggagtgaggccgaggaggggagtgaggccgaggcgctcgagaaagacggcagcaaggcttcttcaccttcggggccagttaggcgttcctgccgctcttcttcctcccgtgtcgtcagaggaagccgcgaaaagcatgcaggaatcaggcggtcttgaggacgaggagctacaggtgcaggatgcagttgccagtggttccaagaggagcaaagactccgccgccgccgccacacgcagcgccaatgtcagctcgccctctgtggttcactctcaccctgccatcctccctgctcccgcgcagcagattccagaggttaagcaagcagataccacacatatgcattctatgcctgccgcgcgctttacgtagctaacaagttgaattcatcatcaacatatccattgctcgagcttttcttcaagaaccagctaccatagggcaaagtgaagaaacggaagagttgagcaagatcacattagagaataaggatattcagcttgatatcaatataagagaagaatctcggagttcttcacaacaagggaactttgacacagaaggtaccagctccagtgaggctttcttgcttggaacggtaaggaatgaacatatttatttcattcttctcagccactaaccaaatcagctccagtgaggttagtttacagcaatgttcttgtatggttctcaggttgagttttccattttatttatgtagccaaagtagatgtattatgcatgtcgtcgtttggaaacttgacaaaccgattatacttgtttaggttgcttcagaaaagatgcttgagaaactgaaacataaatctggaagatgtgagcctgctttagaaaaggctattgtggaactggagcatggtataaacggtttgaagtactttgtttgccttgatccacggttgcaggtttgttccgccactgataccaggtgaagcttcacccttcagatccctgtcgtgacgaatggttcgtgggtgctggggagggattggatccgttggattcatgagatgtgtggattgttcctgccggatatcgtgacatgtttttagatctagcagacaaaaccatgaactgtctagggctcctccgttgcctagatctactagagtgagtgagcctacagagttgacctcatccaggctccagttccaccccacggtcatcgtcctctgttgctctacgtttcatgcttctcacctcctctcctcaatctcatcactagaggcggaaagcagatcagatgagatttttggtcttgcgtggttcttttaatctgctcacatgatacttcttattcattgccgtccagtgaaattaattgccctcggttgaattggttcctttgccattttacttaggaggataaaggagacactaccttggtacatgcctgttgccacaatggacaaaagaagattagtgttgtgtgagattttttcattcctttgatctattgcatgctatttgtaccctaatcgacaaaatagatgagactcaattcaggagcaaatcactagtcctgttcacaatccaattcactatggttaaaatatcaaacttatgctccttgaggtttgttttttcctgatcttcctttaatatctgatgactgatggactggtgagttcatgatctgcttcatgcttttccttttatatatggtcactacctcactggttagttcatggtctctgtgtgtgtgcgtgcgtgtgtgtgtgcgcacgcttctgcattcaaactcttcaaccttgtgtttcaactaaactcttgaacattcttaccttggctggtcattttatatgcagataattttatgtctgggctgaaggtcgtgtttgatcgagagaggaaggtcttgggctggaaaaactttgattgttacagcgtgggcaactcaagaagcaaccttccagtgaacccaaatccttctggtgttccccctgcccctggcttgggaccgaacagctacactcactcctgaagctaccaagggtgcctcaccgaatggcacccaagtcaatgtcttgcaaccttctgcaagtttttcgccgaagctgcattgcaacagaaacgtcctcgtcatcgctgctctgctgttcctcgaccttcggcgaaaatttccagatacccgtactcttttcatatggcataacacactagcattaagtcttatgagagaccttgctaaagaattagtgcttggaggggaagaatgacctagaactgaagatggatgagctgatgtgaaaaatgaggggaagaatgacctagaactgaagatggaggagctcaggtgaaaaatgaacttgttcattgtgtgttttctgaccttttttggaattgtattaaaatatactgtaatgaattggtgtaagaatgtgttggaagtagcaaagaacctgatgccttttgcaatgagaatgtctttctggca

SEQ ID NO: 17457 - DNA, 2082 bp, Zea Mays
atgttctgcctccgcaccctccgatcgcccgccgcgtccgattcccctgaccccgcctcgcccgcaatctccgccgccgcgcccgcgacatccatcacccccacccgcgacatcccgcctcgcacgccatcaactcgcagcggcccttctccgaacgtggtttgttttttcgtttgctcgagcagccagccgactcgtctccagcaatgcggccggggtcggctcgctggaggtgggcgtcgccgccgacacctccaacgcctccaggcagggattaggtgagccgtcggctaatcactcgtcattgggaggatctcctcctcccgttcagatttgggcaagaaaggcccgggcgcgatgtccatggccgaggaggggagtgaggccgaggaggggagtgaggccgaggcgctcgagaaagacggcagcaaggcttcttcaccttcggggccagataaaaagactggtttttctccccgttctccttttccccccactaatcgatttaggttcttagttaggcgttcctgccgctcttcttcctcccgtgtcgtcagaggaagccgcgaaaagcatgcaggaatcaggcggtcttgaggacgaggagctacaggtgcaggatgcagttgccagtggttccaagaggagcaaagactccgccgccgccgccacacgcagcgccaatgtcagctcgccctctgtggttcactctcaccctgccatcctccctgctcccgcgcagcagattccagaggttaagcaagcagataccacacatatgcattctatgcctgccgcgcgctttacgtagctaacaagttgaattcatcatcaacatatccattgctcgagcttttcttcaagaaccagctaccatagggcaaagtgaagaaacggaagagttgagcaagatcacattagagaataaggatattcagcttgatatcaatataagagaagaatctcggagttcttcacaacaagggaactttgacacagaaggtaccagctccagtgaggctttcttgcttggaacggtaaggaatgaacatatttatttcattcttctcagccactaaccaaatcagctccagtgaggttagtttacagcaatgttcttgtatggttctcaggttgagttttccattttatttatgtagccaaagtagatgtattatgcatgtcgtcgtttggaaacttgacaaaccgattatacttgtttaggttgcttcagaaaagatgcttgagaaactgaaacataaatctggaagatgtgagcctgctttagaaaaggctattgtggaactggagcatggtataaacggtttgaagtactttgtttgccttgatccacggttgcaggtttgttccgccactgataccaggaggataaaggagacactaccttggtacatgcctgttgccacaatggacaaaagaagattagtgttgtataattttatgtctgggctgaaggtcgtgtttgatcgagagaggaaggtcttgggctggaaaaactttgattgttacagcgtgggcaactcaagaagcaaccttccagtgaacccaaatccttctggtgttccccctgcccctggcttgggaccgaacagctacactcactcctgaagctaccaagggtgcctcaccgaatggcacccaagtcaatgtcttgcaaccttctgcaagtttttcgccgaagctgcattgcaacagaaacgtcctcgtcatcgctgctctgctgttcctcgaccttcggcgaaaatttccagatacccgtactcttttcatatggcataacacactagcattaagtcttatgagagaccttgctaaagaattagtgcttggaggggaagaatgacctagaactgaagatggatgagctgatgtgaaaaatgaggggaagaatgacctagaactgaagatggaggagctcaggtgaaaaatgaacttgttcattgtgtgttttctgaccttttttggaattgtattaaaatatactgtaatgaattggtgtaagaatgtgttggaagtagcaaagaacctgatgccttttgcaatgagaatgtctttctggca

SEQ ID NO: 17458 - DNA, 2398 bp, Zea Mays
atgttctgcctccgcaccctccgatcgcccgccgcgtccgattcccctgaccccgcctcgcccgcaatctccgccgccgcgcccgcgacatccatcacccccacccgcgacatcccgcctcgcacgccatcaactcgcagcggcccttctccgaacgtggtttgttttttcgtttgctcgagcagccagccgactcgtctccagcaatgcggccggggtcggctcgctggaggtgggcgtcgccgccgacacctccaacgcctccaggcagggattaggcggtcttgaggacgaggagctacaggtgcaggatgcagttgccagtggttccaagaggagcaaagactccgccgccgccgccacacgcagcgccaatgtcagctcgccctctgtggttcactctcaccctgccatcctccctgctcccgcgcagcagattccagaggttaagcaagcagataccacacatatgcattctatgcctgccgcgcgctttacgtagctaacaagttgaattcatcatcaacatatccattgctcgagcttttcttcaagaaccagctaccatagggcaaagtgaagaaacggaagagttgagcaagatcacattagagaataaggatattcagcttgatatcaatataagagaagaatctcggagttcttcacaacaagggaactttgacacagaaggtaccagctccagtgaggctttcttgcttggaacggttgcttcagaaaagatgcttgagaaactgaaacataaatctggaagatgtgagcctgctttagaaaaggctattgtggaactggagcatggtataaacggtttgaagtactttgtttgccttgatccacggttgcaggtttgttccgccactgataccaggtgaagcttcacccttcagatccctgtcgtgacgaatggttcgtgggtgctggggagggattggatccgttggattcatgagatgtgtggattgttcctgccggatatcgtgacatgtttttagatctagcagacaaaaccatgaactgtctagggctcctccgttgcctagatctactagagtgagtgagcctacagagttgacctcatccaggctccagttccaccccacggtcatcgtcctctgttgctctacgtttcatgcttctcacctcctctcctcaatctcatcactagaggcggaaagcagatcagatgagatttttggtcttgcgtggttcttttaatctgctcacatgatacttcttattcattgccgtccagtgaaattaattgccctcggttgaattggttcctttgccattttacttaggaggataaaggagacactaccttggtacatgcctgttgccacaatggacaaaagaagattagtgttgtgtgagattttttcattcctttgatctattgcatgctatttgtaccctaatcgacaaaatagatgagactcaattcaggagcaaatcactagtcctgttcacaatccaattcactatggttaaaatatcaaacttatgctccttgaggtttgttttttcctgatcttcctttaatatctgatgactgatggactggtgagttcatgatctgcttcatgcttttccttttatatatggtcactacctcactggttagttcatggtctctgtgtgtgtgcgtgcgtgtgtgtgtgcgcacgcttctgcattcaaactcttcaaccttgtgtttcaactaaactcttgaacattcttaccttggctggtcattttatatgcagataattttatgtctgggctgaaggtcgtgtttgatcgagagaggaaggtcttgggctggaaaaactttgattgttacagcgtgggcaactcaagaagcaaccttccagtgaacccaaatccttctggtgttccccctgcccctggcttgggaccgaacagctacactcactcctgaagctaccaagggtgcctcaccgaatggcacccaagtcaatgtcttgcaaccttctgcaagtttttcgccgaagctgcattgcaacagaaacgtcctcgtcatcgctgctctgctgttcctcgaccttcggcgaaaatttccagatacccgtactcttttcatatggcataacacactagcattaagtcttatgagagaccttgctaaagaattagtgcttggaggggaagaatgacctagaactgaagatggatgagctgatgtgaaaaatgaggggaagaatgacctagaactgaagatggaggagctcaggtgaaaaatgaacttgttcattgtgtgttttctgaccttttttggaattgtattaaaatatactgtaatgaattggtgtaagaatgtgttggaagtagcaaagaacctgatgccttttgcaatgagaatgtctttctggca

SEQ ID NO: 17459 - DNA, 3478 bp, Zea Mays
atgttctgcctccgcaccctccgatcgcccgccgcgtccgattcccctgaccccgcctcgcccgcaatctccgccgccgcgcccgcgacatccatcacccccacccgcgacatcccgcctcgcacgccatcaactcgcagcggcccttctccgaacgtggtttgttttttcgtttgctcgagcagccagccgactcgtctccagcaatgcggccggggtcggctcgctggaggtgggcgtcgccgccgacacctccaacgcctccaggcagggattaggtgagccgtcggctaatcactcgtcattgggaggatctcctcctcccgttcagatttgggcaagaaaggcccgggcgcgatgtccatggccgaggaggggagtgaggccgaggaggggagtgaggccgaggcgctcgagaaagacggcagcaaggcttcttcaccttcggggccagataccacacatatgcattctatgcctgccgcgcgctttacgtagctaacaagttgaattcatcatcaacatatccattgctcgagcttttcttcaagaaccaggtccaccacattccgtattacaatggttaaagtttttatatttgcttgattctctttttttatatgctaattgacttttttctcttctatattatccacttgtgtgggttggttatagcttgtgatttcacatttcatttgttagcggccaagatgtatttctgttagtttatgactaccactcaggaacttatgtgtccatcatttgagtagaataaaataggtgaacttactggtattatttcattgtgttctccctgcttccatttgaaaactataaattacctgatgattgtaattcactaggattttcctcttgagaaggcagtgttaggtataaatattgtagccttataagctacttaattgaatgtgcttgtttattccttaatcatgaattttttctcattcacattggagtagctttttgtgctcaataaaatgggctgacatctaattgtttgctgactgtataactattggttggtatgatgccaatttgccgaactcccttgctttgttagtaaatggttcatgaaatatgtacaaatacaaacagatgcaaagtcttgatagaaaatccgtttctcaaacaaaggagcattattttagaggaggtcaatgtggagtggactggatccgtgctggagagcgaagcaaattgagggaggacaagtggtggacaaataaggcttagtaatgataattaagtaataatttgaaaaatacaattgaagaatatcaaattctctaaaataaaataacagtagagcttgaatggatataaattatcactcagttggccatttacagtatgtataccatacggatttcatagattaaagagtttggagtattcaaagcttgtatctcagtgcctaaacactgaatggacagctaccatagggcaaagtgaagaaacggaagagttgagcaagatcacattagagaataaggatattcagcttgatatcaatataagagaagaatctcggagttcttcacaacaagggaactttgacacagaaggtaccagctccagtgaggctttcttgcttggaacggtaaggaatgaacatatttatttcattcttctcagccactaaccaaatcagctccagtgaggttagtttacagcaatgttcttgtatggttctcaggttgagttttccattttatttatgtagccaaagtagatgtattatgcatgtcgtcgtttggaaacttgacaaaccgattatacttgtttaggttgcttcagaaaagatgcttgagaaactgaaacataaatctggaagatgtgagcctgctttagaaaaggctattgtggaactggagcatggtataaacggtttgaagtactttgtttgccttgatccacggttgcaggtttgttccgccactgataccaggtgaagcttcacccttcagatccctgtcgtgacgaatggttcgtgggtgctggggagggattggatccgttggattcatgagatgtgtggattgttcctgccggatatcgtgacatgtttttagatctagcagacaaaaccatgaactgtctagggctcctccgttgcctagatctactagagtgagtgagcctacagagttgacctcatccaggctccagttccaccccacggtcatcgtcctctgttgctctacgtttcatgcttctcacctcctctcctcaatctcatcactagaggcggaaagcagatcagatgagatttttggtcttgcgtggttcttttaatctgctcacatgatacttcttattcattgccgtccagtgaaattaattgccctcggttgaattggttcctttgccattttacttaggaggataaaggagacactaccttggtacatgcctgttgccacaatggacaaaagaagattagtgttgtgtgagattttttcattcctttgatctattgcatgctatttgtaccctaatcgacaaaatagatgagactcaattcaggagcaaatcactagtcctgttcacaatccaattcactatggttaaaatatcaaacttatgctccttgaggtttgttttttcctgatcttcctttaatatctgatgactgatggactggtgagttcatgatctgcttcatgcttttccttttatatatggtcactacctcactggttagttcatggtctctgtgtgtgtgcgtgcgtgtgtgtgtgcgcacgcttctgcattcaaactcttcaaccttgtgtttcaactaaactcttgaacattcttaccttggctggtcattttatatgcagataattttatgtctgggctgaaggtcgtgtttgatcgagagaggaaggtcttgggctggaaaaactttgattgttacagcgtgggcaactcaagaagcaaccttccagtgaacccaaatccttctggtgttccccctgcccctggcttgggaccgaacagctacactcactcctgaagctaccaagggtgcctcaccgaatggcacccaagtcaatgtcttgcaaccttctgcaagtttttcgccgaagctgcattgcaacagaaacgtcctcgtcatcgctgctctgctgttcctcgaccttcggcgaaaatttccagatacccgtactcttttcatatggcataacacactagcattaagtcttatgagagaccttgctaaagaattagtgcttggaggggaagaatgacctagaactgaagatggatgagctgatgtgaaaaatgaggggaagaatgacctagaactgaagatggaggagctcaggtgaaaaatgaacttgttcattgtgtgttttctgaccttttttggaattgtattaaaatatactgtaatgaattggtgtaagaatgtgttggaagtagcaaagaacctgatgccttttgcaatgagaatgtctttctggca

SEQ ID NO: 17460 - DNA, 2466 bp, Zea Mays
atgttctgcctccgcaccctccgatcgcccgccgcgtccgattcccctgaccccgcctcgcccgcaatctccgccgccgcgcccgcgacatccatcacccccacccgcgacatcccgcctcgcacgccatcaactcgcagcggcccttctccgaacgtggtttgttttttcgtttgctcgagcagccagccgactcgtctccagcaatgcggccggggtcggctcgctggaggtgggcgtcgccgccgacacctccaacgcctccaggcagggattaggtgagccgtcggctaatcactcgtcattgggaggatctcctcctcccgttcagatttgggcaagaaaggcccgggcgcgatgtccatggccgaggaggggagtgaggccgaggaggggagtgaggccgaggcgctcgagaaagacggcagcaaggcttcttcaccttcggggccagccagtcgactcgtctccagcaatgcggccggggtcggctcgctggaggtgggcgccgccaccgacacctccaacgcctccaggcagggattagatttgggcaagaaaggcccgggcgcgatgtccatggccgaggaggggagtgaggccgaggaggggagtgaggccgaggcgctcgagaaagacggcagcaaggcttcttcaccttcggggccagataccacacatatgcattctatgcctgccgcgcgctttacgtagctaacaagttgaattcatcatcaacatatccattgctcgagcttttcttcaagaaccaggtccaccacattccgtattacaatggttaaagtttttatatttgcttgattctctttttttatatgctaattgacttttttctcttctatattatccacttgtgtgggttggttatagcttgtgatttcacatttcatttgttagcggccaagatgtatttctgttagtttatgactaccactcaggaacttatgtgtccatcatttgagtagaataaaataggtgaacttactggtattatttcattgtgttctccctgcttccatttgaaaactataaattacctgatgattgtaattcactaggattttcctcttgagaaggcagtgttaggtataaatattgtagccttataagctacttaattgaatgtgcttgtttattccttaatcatgaattttttctcattcacattggagtagctttttgtgctcaataaaatgggctgacatctaattgtttgctgactgtataactattggttggtatgatgccaatttgccgaactcccttgctttgttagtaaatggttcatgaaatatgtacaaatacaaacagatgcaaagtcttgatagaaaatccgtttctcaaacaaaggagcattattttagaggaggtcaatgtggagtggactggatccgtgctggagagcgaagcaaattgagggaggacaagtggtggacaaataaggcttagtaatgataattaagtaataatttgaaaaatacaattgaagaatatcaaattctctaaaataaaataacagtagagcttgaatggatataaattatcactcagttggccatttacagtatgtataccatacggatttcatagattaaagagtttggagtattcaaagcttgtatctcagtgcctaaacactgaatggacagctaccatagggcaaagtgaagaaacggaagagttgagcaagatcacattagagaataaggatattcagcttgatatcaatataagagaagaatctcggagttcttcacaacaagggaactttgacacagaaggtaccagctccagtgaggctttcttgcttggaacgataattttatgtctgggctgaaggtcgtgtttgatcgagagaggaaggtcttgggctggaaaaactttgattgttacagcgtgggcaactcaagaagcaaccttccagtgaacccaaatccttctggtgttccccctgcccctggcttgggaccgaacagctacactcactcctgaagctaccaagggtgcctcaccgaatggcacccaagtcaatgtcttgcaaccttctgcaagtttttcgccgaagctgcattgcaacagaaacgtcctcgtcatcgctgctctgctgttcctcgaccttcggcgaaaatttccagatacccgtactcttttcatatggcataacacactagcattaagtcttatgagagaccttgctaaagaattagtgcttggaggggaagaatgacctagaactgaagatggatgagctgatgtgaaaaatgaggggaagaatgacctagaactgaagatggaggagctcaggtgaaaaatgaacttgttcattgtgtgttttctgaccttttttggaattgtattaaaatatactgtaatgaattggtgtaagaatgtgttggaagtagcaaagaacctgatgccttttgcaatgagaatgtctttctggca

SEQ ID NO: 17461 - DNA, 4189 bp, Zea Mays
atgttctgcctccgcaccctccgatcgcccgccgcgtccgattcccctgaccccgcctcgcccgcaatctccgccgccgcgcccgcgacatccatcacccccacccgcgacatcccgcctcgcacgccatcaactcgcagcggcccttctccgaacgtggtttgttttttcgtttgctcgagcagccagccgactcgtctccagcaatgcggccggggtcggctcgctggaggtgggcgtcgccgccgacacctccaacgcctccaggcagggattaggtgagccgtcggctaatcactcgtcattgggaggatctcctcctcccgttcagatttgggcaagaaaggcccgggcgcgatgtccatggccgaggaggggagtgaggccgaggaggggagtgaggccgaggcgctcgagaaagacggcagcaaggcttcttcaccttcggggccagccagtcgactcgtctccagcaatgcggccggggtcggctcgctggaggtgggcgccgccaccgacacctccaacgcctccaggcagggattagatttgggcaagaaaggcccgggcgcgatgtccatggccgaggaggggagtgaggccgaggaggggagtgaggccgaggcgctcgagaaagacggcagcaaggcttcttcaccttcggggccagccagccgactcgtctccagcaatgcggccggggtcggctcgctggaggtgggcgccgccgccgacacctccaacgcctccaggcagggattagatttgggcaagaaaggcccgggcgcgatgtccatggccgaggaggggagtgaggccgaggaggggagtgaggctgaggcgctcgagaaagacggcagcaaggcttcttcaccttcggggccaagtaaacaccacgggcaagggcgcaaagcatcgcgtgttgttgtttcgagatgcgtgggcatggccgtgctttcccttccgttggggtcaagctgaccggcctcgtgtgccccgtactcccaccgccgtcctgcacgcaaatcccaaaaatcagataaaaagactggtttttctccccgttctccttttccccccactaatcgatttaggttcttagttaggcgttcctgccgctcttcttcctcccgtgtcgtcagaggaagccgcgaaaagcatgcaggaatcaggcggtcttgaggacgaggagctacaggtgcaggatgcagttgccagtggttccaagaggagcaaagactccgccgccgccgccacacgcagcgccaatgtcagctcgccctctgtggttcactctcaccctgccatcctccctgctcccgcgcagcagattccagaggttaagcaagcagataccacacatatgcattctatgcctgccgcgcgctttacgtagctaacaagttgaattcatcatcaacatatccattgctcgagcttttcttcaagaaccaggtccaccacattccgtattacaatggttaaagtttttatatttgcttgattctctttttttatatgctaattgacttttttctcttctatattatccacttgtgtgggttggttatagcttgtgatttcacatttcatttgttagcggccaagatgtatttctgttagtttatgactaccactcaggaacttatgtgtccatcatttgagtagaataaaataggtgaacttactggtattatttcattgtgttctccctgcttccatttgaaaactataaattacctgatgattgtaattcactaggattttcctcttgagaaggcagtgttaggtataaatattgtagccttataagctacttaattgaatgtgcttgtttattccttaatcatgaattttttctcattcacattggagtagctttttgtgctcaataaaatgggctgacatctaattgtttgctgactgtataactattggttggtatgatgccaatttgccgaactcccttgctttgttagtaaatggttcatgaaatatgtacaaatacaaacagatgcaaagtcttgatagaaaatccgtttctcaaacaaaggagcattattttagaggaggtcaatgtggagtggactggatccgtgctggagagcgaagcaaattgagggaggacaagtggtggacaaataaggcttagtaatgataattaagtaataatttgaaaaatacaattgaagaatatcaaattctctaaaataaaataacagtagagcttgaatggatataaattatcactcagttggccatttacagtatgtataccatacggatttcatagattaaagagtttggagtattcaaagcttgtatctcagtgcctaaacactgaatggacagctaccatagggcaaagtgaagaaacggaagagttgagcaagatcacattagagaataaggatattcagcttgatatcaatataagagaagaatctcggagttcttcacaacaagggaactttgacacagaaggtaccagctccagtgaggctttcttgcttggaacggttgcttcagaaaagatgcttgagaaactgaaacataaatctggaagatgtgagcctgctttagaaaaggctattgtggaactggagcatggtataaacggtttgaagtactttgtttgccttgatccacggttgcaggtttgttccgccactgataccaggtgaagcttcacccttcagatccctgtcgtgacgaatggttcgtgggtgctggggagggattggatccgttggattcatgagatgtgtggattgttcctgccggatatcgtgacatgtttttagatctagcagacaaaaccatgaactgtctagggctcctccgttgcctagatctactagagtgagtgagcctacagagttgacctcatccaggctccagttccaccccacggtcatcgtcctctgttgctctacgtttcatgcttctcacctcctctcctcaatctcatcactagaggcggaaagcagatcagatgagatttttggtcttgcgtggttcttttaatctgctcacatgatacttcttattcattgccgtccagtgaaattaattgccctcggttgaattggttcctttgccattttacttaggaggataaaggagacactaccttggtacatgcctgttgccacaatggacaaaagaagattagtgttgtgtgagattttttcattcctttgatctattgcatgctatttgtaccctaatcgacaaaatagatgagactcaattcaggagcaaatcactagtcctgttcacaatccaattcactatggttaaaatatcaaacttatgctccttgaggtttgttttttcctgatcttcctttaatatctgatgactgatggactggtgagttcatgatctgcttcatgcttttccttttatatatggtcactacctcactggttagttcatggtctctgtgtgtgtgcgtgcgtgtgtgtgtgcgcacgcttctgcattcaaactcttcaaccttgtgtttcaactaaactcttgaacattcttaccttggctggtcattttatatgcagataattttatgtctgggctgaaggtcgtgtttgatcgagagaggaaggtcttgggctggaaaaactttgattgttacagcgtgggcaactcaagaagcaaccttccagtgaacccaaatccttctggtgttccccctgcccctggcttgggaccgaacagctacactcactcctgaagctaccaagggtgcctcaccgaatggcacccaagtcaatgtcttgcaaccttctgcaagtttttcgccgaagctgcattgcaacagaaacgtcctcgtcatcgctgctctgctgttcctcgaccttcggcgaaaatttccagatacccgtactcttttcatatggcataacacactagcattaagtcttatgagagaccttgctaaagaattagtgcttggaggggaagaatgacctagaactgaagatggatgagctgatgtgaaaaatgaggggaagaatgacctagaactgaagatggaggagctcaggtgaaaaatgaacttgttcattgtgtgttttctgaccttttttggaattgtattaaaatatactgtaatgaattggtgtaagaatgtgttggaagtagcaaagaacctgatgccttttgcaatgagaatgtctttctggca

SEQ ID NO: 17462 - DNA, 2251 bp, Zea Mays
atgttctgcctccgcaccctccgatcgcccgccgcgtccgattcccctgaccccgcctcgcccgcaatctccgccgccgcgcccgcgacatccatcacccccacccgcgacatcccgcctcgcacgccatcaactcgcagcggcccttctccgaacgtggtttgttttttcgtttgctcgagcagccagccgactcgtctccagcaatgcggccggggtcggctcgctggaggtgggcgtcgccgccgacacctccaacgcctccaggcagggattaggtgagccgtcggctaatcactcgtcattgggaggatctcctcctcccgttcagatttgggcaagaaaggcccgggcgcgatgtccatggccgaggaggggagtgaggccgaggaggggagtgaggccgaggcgctcgagaaagacggcagcaaggcttcttcaccttcggggccagccagtcgactcgtctccagcaatgcggccggggtcggctcgctggaggtgggcgccgccaccgacacctccaacgcctccaggcagggattagatttgggcaagaaaggcccgggcgcgatgtccatggccgaggaggggagtgaggccgaggaggggagtgaggccgaggcgctcgagaaagacggcagcaaggcttcttcaccttcggggccagccagccgactcgtctccagcaatgcggccggggtcggctcgctggaggtgggcgccgccgccgacacctccaacgcctccaggcagggattagatttgggcaagaaaggcccgggcgcgatgtccatggccgaggaggggagtgaggccgaggaggggagtgaggctgaggcgctcgagaaagacggcagcaaggcttcttcaccttcggggccaagtaaacaccacgggcaagggcgcaaagcatcgcgtgttgttgtttcgagatgcgtgggcatggccgtgctttcccttccgttggggtcaagctgaccggcctcgtgtgccccgtactcccaccgccgtcctgcacgcaaatcccaaaaatcagataaaaagactggtttttctccccgttctccttttccccccactaatcgatttaggttcttagttaggcgttcctgccgctcttcttcctcccgtgtcgtcagaggaagccgcgaaaagcatgcaggaatcaggcggtcttgaggacgaggagctacaggtgcaggatgcagttgccagtggttccaagaggagcaaagactccgccgccgccgccacacgcagcgccaatgtcagctcgccctctgtggttcactctcaccctgccatcctccctgctcccgcgcagcagattccagaggttaagcaagcagataccacacatatgcattctatgcctgccgcgcgctttacgtagctaacaagttgaattcatcatcaacatatccattgctcgagcttttcttcaagaaccagctaccatagggcaaagtgaagaaacggaagagttgagcaagatcacattagagaataaggatattcagcttgatatcaatataagagaagaatctcggagttcttcacaacaagggaactttgacacagaaggtaccagctccagtgaggctttcttgcttggaacgataattttatgtctgggctgaaggtcgtgtttgatcgagagaggaaggtcttgggctggaaaaactttgattgttacagcgtgggcaactcaagaagcaaccttccagtgaacccaaatccttctggtgttccccctgcccctggcttgggaccgaacagctacactcactcctgaagctaccaagggtgcctcaccgaatggcacccaagtcaatgtcttgcaaccttctgcaagtttttcgccgaagctgcattgcaacagaaacgtcctcgtcatcgctgctctgctgttcctcgaccttcggcgaaaatttccagatacccgtactcttttcatatggcataacacactagcattaagtcttatgagagaccttgctaaagaattagtgcttggaggggaagaatgacctagaactgaagatggatgagctgatgtgaaaaatgaggggaagaatgacctagaactgaagatggaggagctcaggtgaaaaatgaacttgttcattgtgtgttttctgaccttttttggaattgtattaaaatatactgtaatgaattggtgtaagaatgtgttggaagtagcaaagaacctgatgccttttgcaatgagaatgtctttctggca

SEQ ID NO: 17463 - DNA, 2269 bp, Zea Mays
ctatgttctgcctccgcaccctccgatcgcccgccgcgtccgattcccctgaccccgcctcgcccgcaatctccgccgccgcgcccgcgacatccatcacccccacccgcgacatcccgcctcgcacgccatcaactcgcagcggcccttctccgaacgtggtttgttttttcgtttgctcgagcagccagccgactcgtctccagcaatgcggccggggtcggctcgctggaggtgggcgtcgccgccgacacctccaacgcctccaggcagggattagttaggcgttcctgccgctcttcttcctcccgtgtcgtcagaggaagccgcgaaaagcatgcaggaatcaggcggtcttgaggacgaggagctacaggtgcaggatgcagttgccagtggttccaagaggagcaaagactccgccgccgccgccacacgcagcgccaatgtcagctcgccctctgtggttcactctcaccctgccatcctccctgctcccgcgcagcagattccagaggttaagcaagcagataccacacatatgcattctatgcctgccgcgcgctttacgtagctaacaagttgaattcatcatcaacatatccattgctcgagcttttcttcaagaaccagggcaaagtgaagaaacggaagagttgagcaagatcacattagagaataaggatattcagcttgatatcaatataagagaagaatctcggagttcttcacaacaagggaactttgacacagaaggtaccagctccagtgaggctttcttgcttggaacggtaaggaatgaacatatttatttcattcttctcagccactaaccaaatcagctccagtgaggttagtttacagcaatgttcttgtatggttctcaggttgagttttccattttatttatgtagccaaagtagatgtattatgcatgtcgtcgtttggaaacttgacaaaccgattatacttgtttaggttgcttcagaaaagatgcttgagaaactgaaacataaatctggaagatgtgagcctgctttagaaaaggctattgtggaactggagcatggtataaacggtttgaagtactttgtttgccttgatccacggttgcaggtttgttccgccactgataccaggtgaagcttcacccttcagatccctgtcgtgacgaatggttcgtgggtgctggggagggattggatccgttggattcatgagatgtgtggattgttcctgccggatatcgtgacatgtttttagatctagcagacaaaaccatgaactgtctagggctcctccgttgcctagatctactagagtgagtgagcctacagagttgacctcatccaggctccagttccaccccacggtcatcgtcctctgttgctctacgtttcatgcttctcacctcctctcctcaatctcatcactagaggcggaaagcagatcagatgagatttttggtcttgcgtggttcttttaatctgctcacatgatacttcttattcattgccgtccagtgaaattaattgccctcggttgaattggttcctttgccattttacttaggaggataaaggagacactaccttggtacatgcctgttgccacaatggacaaaagaagattagtgttgtataattttatgtctgggctgaaggtcgtgtttgatcgagagaggaaggtcttgggctggaaaaactttgattgttacagcgtgggcaactcaagaagcaaccttccagtgaacccaaatccttctggtgttccccctgcccctggcttgggaccgaacagctacactcactcctgaagctaccaagggtgcctcaccgaatggcacccaagtcaatgtcttgcaaccttctgcaagtttttcgccgaagctgcattgcaacagaaacgtcctcgtcatcgctgctctgctgttcctcgaccttcggcgaaaatttccagatacccgtactcttttcatatggcataacacactagcattaagtcttatgagagaccttgctaaagaattagtgcttggaggggaagaatgacctagaactgaagatggatgagctgatgtgaaaaatgaggggaagaatgacctagaactgaagatggaggagctcaggtgaaaaatgaacttgttcattgtgtgttttctgaccttttttggaattgtattaaaatatactgtaatgaattggtgtaagaatgtgttggaagtagcaaagaacctgatgccttttgcaatgagaatgtctttctggca

SEQ ID NO: 17464 - DNA, 2662 bp, Zea Mays
tactctataagcctgtagtgtaggcgtccacaactatgttctgcctccgcaccctccgatcgcccgccgcgtccgattcccctgaccccgcctcgcccgcaatctccgccgccgcgcccgcgacatccatcacccccacccgcgacatcccgcctcgcacgccatcaactcgcagcggcccttctccgaacgtggtttgttttttcgtttgctcgagcagccagccgactcgtctccagcaatgcggccggggtcggctcgctggaggtgggcgtcgccgccgacacctccaacgcctccaggcagggattaggtgagccgtcggctaatcactcgtcattgggaggatctcctcctcccgttcagatttgggcaagaaaggcccgggcgcgatgtccatggccgaggaggggagtgaggccgaggaggggagtgaggccgaggcgctcgagaaagacggcagcaaggcttcttcaccttcggggccagccagtcgactcgtctccagcaatgcggccggggtcggctcgctggaggtgggcgccgccaccgacacctccaacgcctccaggcagggattagatttgggcaagaaaggcccgggcgcgatgtccatggccgaggaggggagtgaggccgaggaggggagtgaggccgaggcgctcgagaaagacggcagcaaggcttcttcaccttcggggccagccagccgactcgtctccagcaatgcggccggggtcggctcgctggaggtgggcgccgccgccgacacctccaacgcctccaggcagggattagatttgggcaagaaaggcccgggcgcgatgtccatggccgaggaggggagtgaggccgaggaggggagtgaggctgaggcgctcgagaaagacggcagcaaggcttcttcaccttcggggccaagcggtcttgaggacgaggagctacaggtgcaggatgcagttgccagtggttccaagaggagcaaagactccgccgccgccgccacacgcagcgccaatgtcagctcgccctctgtggttcactctcaccctgccatcctccctgctcccgcgcagcagattccagaggttaagcaagcagataccacacatatgcattctatgcctgccgcgcgctttacgtagctaacaagttgaattcatcatcaacatatccattgctcgagcttttcttcaagaaccagctaccatagggcaaagtgaagaaacggaagagttgagcaagatcacattagagaataaggatattcagcttgatatcaatataagagaagaatctcggagttcttcacaacaagggaactttgacacagaaggtaccagctccagtgaggctttcttgcttggaacggttgcttcagaaaagatgcttgagaaactgaaacataaatctggaagatgtgagcctgctttagaaaaggctattgtggaactggagcatggtataaacggtttgaagtactttgtttgccttgatccacggttgcaggtttgttccgccactgataccaggtgaagcttcacccttcagatccctgtcgtgacgaatggttcgtgggtgctggggagggattggatccgttggattcatgagatgtgtggattgttcctgccggatatcgtgacatgtttttagatctagcagacaaaaccatgaactgtctagggctcctccgttgcctagatctactagagtgagtgagcctacagagttgacctcatccaggctccagttccaccccacggtcatcgtcctctgttgctctacgtttcatgcttctcacctcctctcctcaatctcatcactagaggcggaaagcagatcagatgagatttttggtcttgcgtggttcttttaatctgctcacatgatacttcttattcattgccgtccagtgaaattaattgccctcggttgaattggttcctttgccattttacttaggaggataaaggagacactaccttggtacatgcctgttgccacaatggacaaaagaagattagtgttgtataattttatgtctgggctgaaggtcgtgtttgatcgagagaggaaggtcttgggctggaaaaactttgattgttacagcgtgggcaactcaagaagcaaccttccagtgaacccaaatccttctggtgttccccctgcccctggcttgggaccgaacagctacactcactcctgaagctaccaagggtgcctcaccgaatggcacccaagtcaatgtcttgcaaccttctgcaagtttttcgccgaagctgcattgcaacagaaacgtcctcgtcatcgctgctctgctgttcctcgaccttcggcgaaaatttccagatacccgtactcttttcatatggcataacacactagcattaagtcttatgagagaccttgctaaagaattagtgcttggaggggaagaatgacctagaactgaagatggatgagctgatgtgaaaaatgaggggaagaatgacctagaactgaagatggaggagctcaggtgaaaaatgaacttgttcattgtgtgttttctgaccttttttggaattgtattaaaatatactgtaatgaattggtgtaagaatgtgttggaagtagcaaagaacctgatgccttttgcaatgagaatgtctttctggca

SEQ ID NO: 17465 - DNA, 2737 bp, Zea Mays
tactctataagcctgtagtgtaggcgtccacaactatgttctgcctccgcaccctccgatcgcccgccgcgtccgattcccctgaccccgcctcgcccgcaatctccgccgccgcgcccgcgacatccatcacccccacccgcgacatcccgcctcgcacgccatcaactcgcagcggcccttctccgaacgtggtttgttttttcgtttgctcgagcagccagccgactcgtctccagcaatgcggccggggtcggctcgctggaggtgggcgtcgccgccgacacctccaacgcctccaggcagggattaggtgagccgtcggctaatcactcgtcattgggaggatctcctcctcccgttcagatttgggcaagaaaggcccgggcgcgatgtccatggccgaggaggggagtgaggccgaggaggggagtgaggccgaggcgctcgagaaagacggcagcaaggcttcttcaccttcggggccagccagtcgactcgtctccagcaatgcggccggggtcggctcgctggaggtgggcgccgccaccgacacctccaacgcctccaggcagggattagatttgggcaagaaaggcccgggcgcgatgtccatggccgaggaggggagtgaggccgaggaggggagtgaggccgaggcgctcgagaaagacggcagcaaggcttcttcaccttcggggccagccagccgactcgtctccagcaatgcggccggggtcggctcgctggaggtgggcgccgccgccgacacctccaacgcctccaggcagggattagatttgggcaagaaaggcccgggcgcgatgtccatggccgaggaggggagtgaggccgaggaggggagtgaggctgaggcgctcgagaaagacggcagcaaggcttcttcaccttcggggccaagcggtcttgaggacgaggagctacaggtgcaggatgcagttgccagtggttccaagaggagcaaagactccgccgccgccgccacacgcagcgccaatgtcagctcgccctctgtggttcactctcaccctgccatcctccctgctcccgcgcagcagattccagaggttaagcaagcagataccacacatatgcattctatgcctgccgcgcgctttacgtagctaacaagttgaattcatcatcaacatatccattgctcgagcttttcttcaagaaccagctaccatagggcaaagtgaagaaacggaagagttgagcaagatcacattagagaataaggatattcagcttgatatcaatataagagaagaatctcggagttcttcacaacaagggaactttgacacagaaggtaccagctccagtgaggctttcttgcttggaacggttgcttcagaaaagatgcttgagaaactgaaacataaatctggaagatgtgagcctgctttagaaaaggctattgtggaactggagcatggtataaacggtttgaagtactttgtttgccttgatccacggttgcaggtttgttccgccactgataccaggtgaagcttcacccttcagatccctgtcgtgacgaatggttcgtgggtgctggggagggattggatccgttggattcatgagatgtgtggattgttcctgccggatatcgtgacatgtttttagatctagcagacaaaaccatgaactgtctagggctcctccgttgcctagatctactagagtgagtgagcctacagagttgacctcatccaggctccagttccaccccacggtcatcgtcctctgttgctctacgtttcatgcttctcacctcctctcctcaatctcatcactagaggcggaaagcagatcagatgagatttttggtcttgcgtggttcttttaatctgctcacatgatacttcttattcattgccgtccagtgaaattaattgccctcggttgaattggttcctttgccattttacttaggaggataaaggagacactaccttggtacatgcctgttgccacaatggacaaaagaagattagtgttgtataattttatgtctgggctgaaggtcgtgtttgatcgagagaggaaggtcttgggctggaaaaactttgattgttacagcgtgggcaactcaagaagcaaccttccagtgaacccaaatccttctggtgttccccctgcccctggcttgggaccgaacagctacactcactcctgaagctaccaagggtgcctcaccgaatggcacccaagtcaatgtcttgcaaccttctgcaagtttttcgccgaagctgcattgcaacagaaacgtcctcgtcatcgctgctctgctgttcctcatatatatacttcacatatgctcacgtgtaccaccatcgtcatctgtcatgtttttaatacagtcaagaggcatggaccttcggcgaaaatttccagatacccgtactcttttcatatggcataacacactagcattaagtcttatgagagaccttgctaaagaattagtgcttggaggggaagaatgacctagaactgaagatggatgagctgatgtgaaaaatgaggggaagaatgacctagaactgaagatggaggagctcaggtgaaaaatgaacttgttcattgtgtgttttctgaccttttttggaattgtattaaaatatactgtaatgaattggtgtaagaatgtgttggaagtagcaaagaacctgatgccttttgcaatgagaatgtctttctggca

SEQ ID NO: 17466 - DNA, 999 bp, Zea Mays
cctgtctccattgtcgttatggagcattggccgatattttcctgagaagcacggagctaatgaaggatgctcgagggattgcatcactgagtggtatcgttcctcctctggttccattcgctcagacgttcgcggcagtcatcactgcagccctcacaggaaccctctactacgtcgccacaactccgaaaggctccagctaggtagtgttaatcttgaaatctattaaaaccctatatatgtgaggtgacaatgcgctgttcactcaaaattttcagaccctacgtatgtggtgacaccagcgatgcgttcgcgcacagggcgtgagaacctcaagaaactatttgcagcttggtacgagaggaggcaaatgaggaagatatactcgccgcttctggaaggaatcttggctttctaccttggcttcgaatggatccagaccgacaatatcctggcacctatgatcacccacggcatatactccaccgttgttcttggccatgggctctggaagatccacgaccaccggagaaggctacggcagcggattcagaaggtcaggagtgaagggagtagctctgcagacgacacattgtaactgcagcatatgtagatcggcgtggtctactgctggatagctagctgctgattgcacgcacgtactgggtgatcgatcgatctaccgatcagtcagaagaccagaggcgtacgtctcacaagttttgatctacttaattaatatcaacaaggtaggtataagattgggcaaaaatatatatataatgcatgtagtcatgtaatgtagatacaatgtgtacatatatggataaatatatgcaggctgtaatcaatataggaagtatatagtgtacgattgcgacatccaagtatgttataatcctagtatcacgtatgcatgcaaggaatataccagccacatcctttctttctcgtccctctcccacacttgcaatgttacatctattcggaacatccatg

SEQ ID NO: 17467 - DNA, 1081 bp, Zea Mays
cgttaaacaagtgcgtgtgattccgcgaggggaatcaaaccacgcagccgagatagattaggagtagacagcagcgtggaacatgcatgctagctaagctacctcgcagagatagagaggtggtccgccatcgccgccaggctgcccgggcggacggacaacgagatcaagaacgtctggcacacgcacctcaagaagcggctggagcccaccaccaagcagctggagcaggagcagcacggggcgcatgcaggtggtggcgccgccaggaagcgcagcaggcccaagcgcgcgggtgccaggaagacgacgacggccgccgtcgccccggccaccaccgcgccggcgtcgcctgaacggtcggcggcctcgtcgtcggtgaccgagtcgacggagcaggagcagggaaacacggggacgagctcgcccgggttccccaaggaggagagcttcacctcgtcctcggaggccgccgaggagttccagttcgacgacacgttctggtcggagacgctgtccatgccgctggacagcttcgacgacgtccccatggagccctgctccggcgcgttcggcgacgtggccgcctcctcctcctcgtcgtccgttggcgccgacgccgacttggactactggctcggagtgttcatgaagtccggcgacgcgcaccaacaactgccgcaggtttagagcgcgcacgcgcgcccgagaattttcagttccctggctaattgattcatcgttctttctctctccctgcacgtcttgcaatcggaattcggaggggacagtcacaatagcagctaattaatagaggggtgtgtgtgttgaggaccacgacgagattaggaagaaacaacgcgacatgccattgcatctatctcttgtttgccttcttgtatataaagatcgatcgatcgacaagatatcggtgatcgaaacctatatatgctacccattttgagaggaattcttctgcacgcggatgcggatttccatgtaacagtagtgatgagcaccagaaacgcactcggcgtctcggcctcttccaattcgttgattaaatccatctttgtgtgct

SEQ ID NO: 17468 - DNA, 2589 bp, Zea Mays
cccatccaaacacctgttctgaggttctgttcccgccgcggcgtccatcaccgccaggcgccagcagctccgactgctaacggccgccggccgccggccgccgcagatgcagaatccaagcggcaccatccttcagttctaccactcgggacggctttccgccgcgctccgggcctttgagtcgctccccttctcccccgcatccgcccccgaccctctctccgccgctgcctatgccgcgctcgtcgcggcctgctcccgcctccgctccttcccgcaggggcgcctcgtccatcgtcacctccttgcctcctctgctggcgccgcatacctcgctcgcaacaccattctcagcaaccacctcatcaccatgtacggccgctgcgccgccccagattccgcacgcatggtgttcgacgggatgctcgacaggaaccccgtctcctgggccgccgttatcgcggcgcatgcgcagaacagccgttgtgccgatgccatgggtctcttctcctccatgttgcggttggggaccgcgccggacgagtttgcgctcggcagcgccgtgcgcgcctgcgcggagcttggggacttgggcctagggaggcaggtgcatgcgcaggccataaaatcggataacggaggtcatctgatcgtgcagaacgcactcgtcaccatgtactccaagagcggttcagttggggatggatttgcgctctttgagaggattagggacaaagatttattttcatgggggtcaattatcgccgggcttgcacagcaaggtcgtgaaatggacgcacttcacattttcagggagatgattgctgagggcatgcaccaccccaatgagttccattttgggagtgtctttagggcctgctcagttgttattaacagtttggagtacggggagcagattcacggtttatgtgtcaagtataagctggaccgcaattcatacgcaggttgctcgctgggtgacatgtatgcccgttgcaataagcttgactcagcaatgaaggtgttttacagaattgagtcacctgatttggtttcttggaattccttaataaatgctttctctgctgatgggctccttagtgaggctatggttctgttctctgagatgagatattctagtctgaagcctgatggtatcacggttatggctttgttatgtgcgtgtgttggctgtgatgctttgcgtcaaggtagatccatccactcgtacttggtcaaattaggtttaggcggggatgttatggtatgcaattctttaatcagcatgtatacaaggtgtttggatttcccctctgcaatggatgtctttcacgagacaaatgatcgtgatgttgtcacctggaacagcattctcactgcttgtgtgcagcaccggcatatggaagatgtatttaagttattcagactcttgcacagttcaatgccaagtctggataggatcagtctaaacaatgttttgagtgcttctgctgagctgggttactttgaaatggcgaaacaggttcatgcatatgccttcaaggttggactggtgagtgatgcaattctgagtaatgctctgattgacacttatgctaaatgtggaagtttagatgatgccaacaagctctttgaaataatgggcaccggccgcgatgtgttctcttggagcagcttgattgttggctatgcccaatttggttatgcaaaggaagcacttgatttatttgccaggatgagaaaccttggagtcaagccaaatcatgtaacctttgtcggtgtcctcatagcatgcagtcgtgtaggacttgttgatgaaggctgctattactacagtattatggaacctgaatatggcattgtcccaacgaaagagcattgctcatgtgtcattgatttgttggcacgtgctgggagactaagtgaggcagcaaaatttgttgaccaaatgccatttgaacctgatattataatgtggaatactctgctagccgctagcagaacacataatgatgttgagatggggaagagggcagcagaaggtgttttaaatattgatccttctcattcagcagcctatgtccttttgtgcaacatatatgcctcatctggcaattggaatgagtttgcaagattgaagaaggatatgagaagcagcggagtccagaaatcacctgggaagagttggattaaactcaagggcgagctgaaagtctttattgtagaggacagatcgcacccagagtctgatgaaatgtacacaatgctggatctgattggatttgaaatggtaaaagcgggttatattccagaactttcatgttactcacgtaaatatattagttctgaccacacatattatgatttgctgagtgaagaaatgttggctgaatatggagtcagttctcaatagtcattgctgacttcctatcttttaccatgtcacaagattttttgccaattgtcaaaggaaatcaaggttcactatctcgataaggtggtggcaatggcgaggccagaaaggatggacccaagcagatttagcttgagatcagtaactgaagcaattcctactccaagaagtaagac

SEQ ID NO: 17469 - DNA, 2610 bp, Zea Mays
cccatccaaacacctgttctgaggttctgttcccgccgcggcgtccatcaccgccaggcgccagcagctccgactgctaacggccgccggccgccggccgccgcagatgcagaatccaagcggcaccatccttcagttctaccactcgggacggctttccgccgcgctccgggcctttgagtcgctccccttctcccccgcatccgcccccgaccctctctccgccgctgcctatgccgcgctcgtcgcggcctgctcccgcctccgctccttcccgcaggggcgcctcgtccatcgtcacctccttgcctcctctgctggcgccgcatacctcgctcgcaacaccattctcagcaaccacctcatcaccatgtacggccgctgcgccgccccagattccgcacgcatggtgttcgacgggatgctcgacaggaaccccgtctcctgggccgccgttatcgcggcgcatgcgcagaacagccgttgtgccgatgccatgggtctcttctcctccatgttgcggttggggaccgcgccggacgagtttgcgctcggcagcgccgtgcgcgcctgcgcggagcttggggacttgggcctagggaggcaggtgcatgcgcaggccataaaatcggataacggaggtcatctgatcgtgcagaacgcactcgtcaccatgtactccaagagcggttcagttggggatggatttgcgctctttgagaggattagggacaaagatttattttcatgggggtcaattatcgccgggcttgcacagcaaggtcgtgaaatggacgcacttcacattttcagggagatgattgctgagggcatgcaccaccccaatgagttccattttgggagtgtctttagggcctgctcagttgttattaacagtttggagtacggggagcagattcacggtttatgtgtcaagtataagctggaccgcaattcatacgcaggttgctcgctgggtgacatgtatgcccgttgcaataagcttgactcagcaatgaaggtgttttacagaattgagtcacctgatttggtttcttggaattccttaataaatgctttctctgctgatgggctccttagtgaggctatggttctgttctctgagatgagatattctagtctgaagcctgatggtatcacggttatggctttgttatgtgcgtgtgttggctgtgatgctttgcgtcaaggtagatccatccactcgtacttggtcaaattaggtttaggcggggatgttatggtatgcaattctttaatcagcatgtatacaaggtgtttggatttcccctctgcaatggatgtctttcacgagacaaatgatcgtgatgttgtcacctggaacagcattctcactgcttgtgtgcagcaccggcatatggaagatgtatttaagttattcagactcttgcacagttcaatgccaagtctggataggatcagtctaaacaatgttttgagtgcttctgctgagctgggttactttgaaatggcgaaacaggttcatgcatatgccttcaaggttggactggtgagtgatgcaattctgagtaatgctctgattgacacttatgctaaatgtggaagtttagatgatgccaacaagctctttgaaataatgggcaccggccgcgatgtgttctcttggagcagcttgattgttggctatgcccaatttggttatgcaaaggaagcacttgatttatttgccaggatgagaaaccttggagtcaagccaaatcatgtaacctttgtcggtgtcctcatagcatgcagtcgtgtaggacttgttgatgaaggctgctattactacagtattatggaacctgaatatggcattgtcccaacgaaagagcattgctcatgtgtcattgatttgttggcacgtgctgggagactaagtgaggcagcaaaatttgttgaccaaatgccatttgaacctgatattataatgtggaatactctgctagccgctagcagaacacataatgatgttgagatggggaagagggcagcagaaggtgttttaaatattgatccttctcattcagcagcctatgtccttttgtgcaacatatatgcctcatctggcaattggaatgagtttgcaagattgaagaaggatatgagaagcagcggagtccagaaatcacctgggaagagttggattaaactcaagggcgagctgaaagtctttattgtagaggacagatcgcacccagagtctgatgaaatgtacacaatgctggatctgattggatttgaaatggtaaaagcgggttatattccagaactttcatgttactcacgtaaatatattagttctgaccacacatattatgatttgctgagtgaagaaatgttggctgaatatggagtcagttctcaatagtcattgctgacttcctatcttttaccatgtcacaagattttttgccaattgtcaaaggaaatcaaggttcactatctcgataaggatacaatttggccaacacaggtggtggcaatggcgaggccagaaaggatggacccaagcagatttagcttgagatcagtaactgaagcaattcctactccaagaagtaagac

SEQ ID NO: 17470 - DNA, 3281 bp, Zea Mays
cccatccaaacacctgttctgaggttctgttcccgccgcggcgtccatcaccgccaggcgccagcagctccgactgctaacggccgccggccgccggccgccgcagatgcagaatccaagcggcaccatccttcagttctaccactcgggacggctttccgccgcgctccgggcctttgagtcgctccccttctcccccgcatccgcccccgaccctctctccgccgctgcctatgccgcgctcgtcgcggcctgctcccgcctccgctccttcccgcaggggcgcctcgtccatcgtcacctccttgcctcctctgctggcgccgcatacctcgctcgcaacaccattctcagcaaccacctcatcaccatgtacggccgctgcgccgccccagattccgcacgcatggtgttcgacgggatgctcgacaggaaccccgtctcctgggccgccgttatcgcggcgcatgcgcagaacagccgttgtgccgatgccatgggtctcttctcctccatgttgcggttggggaccgcgccggacgagtttgcgctcggcagcgccgtgcgcgcctgcgcggagcttggggacttgggcctagggaggcaggtgcatgcgcaggccataaaatcggataacggaggtcatctgatcgtgcagaacgcactcgtcaccatgtactccaagagcggttcagttggggatggatttgcgctctttgagaggattagggacaaagatttattttcatgggggtcaattatcgccgggcttgcacagcaaggtcgtgaaatggacgcacttcacattttcagggagatgattgctgagggcatgcaccaccccaatgagttccattttgggagtgtctttagggcctgctcagttgttattaacagtttggagtacggggagcagattcacggtttatgtgtcaagtataagctggaccgcaattcatacgcaggttgctcgctgggtgacatgtatgcccgttgcaataagcttgactcagcaatgaaggtgttttacagaattgagtcacctgatttggtttcttggaattccttaataaatgctttctctgctgatgggctccttagtgaggctatggttctgttctctgagatgagatattctagtctgaagcctgatggtatcacggttatggctttgttatgtgcgtgtgttggctgtgatgctttgcgtcaaggtagatccatccactcgtacttggtcaaattaggtttaggcggggatgttatggtatgcaattctttaatcagcatgtatacaaggtgtttggatttcccctctgcaatggatgtctttcacgagacaaatgatcgtgatgttgtcacctggaacagcattctcactgcttgtgtgcagcaccggcatatggaagatgtatttaagttattcagactcttgcacagttcaatgccaagtctggataggatcagtctaaacaatgttttgagtgcttctgctgagctgggttactttgaaatggcgaaacaggttcatgcatatgccttcaaggttggactggtgagtgatgcaattctgagtaatgctctgattgacacttatgctaaatgtggaagtttagatgatgccaacaagctctttgaaataatgggcaccggccgcgatgtgttctcttggagcagcttgattgttggctatgcccaatttggttatgcaaaggaagcacttgatttatttgccaggatgagaaaccttggagtcaagccaaatcatgtaacctttgtcggtgtcctcatagcatgcagtcgtgtaggacttgttgatgaaggctgctattactacagtattatggaacctgaatatggcattgtcccaacgaaagagcattgctcatgtgtcattgatttgttggcacgtgctgggagactaagtgaggcagcaaaatttgttgaccaaatgccatttgaacctgatattataatgtggaatactctgctagccgctagcagaacacataatgatgttgagatggggaagagggcagcagaaggtgttttaaatattgatccttctcattcagcagcctatgtccttttgtgcaacatatatgcctcatctggcaattggaatgagtttgcaagattgaagaaggatatgagaagcagcggagtccagaaatcacctgggaagagttggattaaactcaagggcgagctgaaagtctttattgtagaggacagatcgcacccagagtctgatgaaatgtacacaatgctggatctgattggatttgaaatggtaaaagcgggttatattccagaactttcatgttactcacgtaaatatattagttctgaccacacatattatgatttgctgagtgaagaaatgttggctgaatatggagtcagttctcaatagtcattgctgacttcctatcttttaccatgtcacaagattttttgccaattgtcaaaggaaatcaaggttcactatctcgataagagaaataggagtatagtgccatcccaaatatggcaattagaatgcccaatatgttccttagagtgaaaggatcatgtaatagagtgtagccaaatgatagaaccagacatgtcttaaggtgaccaagcacctggtacgtcactggggatgttgttccaatcacaagaaatgtactgaagttcacagacaccgcaatcaagcaagagaggacaatgaaaccctacatacaattcatatagagaggatcatttttcatttcattgtagaatttgaggtatacatgagattcttttccaataggcaagaatatgacgagagtaatactgttttgaaaatactgttatactgtagcaataactgctgaagccattgtatgcttgatttcatttttatttctgtaggtatcactgaactactccctccatttttttatttgacgttttgcagttcatttttacactatttgacgtcaaataaaaaaggatggaggtagtattttacagtacataaaacatgtttacacttaaagcgctttcacatgattaaagatctacatatacagcaactaccaattagtttgttagcaatcttgcaggtctctgaatcttaatattctgcaaattatggaattggctggttgtgtgtcttaaatcaattgagttccctaaataattgtaagaacattatttcatgtatttaggtaaattaagaccataccagaactgtagcagagtatttgtgtgcaaagacactccggttagtaaggagttgatctacaaaaggc

SEQ ID NO: 17471 - DNA, 2652 bp, Zea Mays
atgcgggtggagacgatcgaggcacggtctaccttgcgctgttttcatcaaagacgacgactcggggcaatagatttatatgtcattagggtgagtggggatgcacatgccacgtgctatccagccgctgtcatttggcgcggtctccggatccgtgtctggttatactctaaagcagcagcagcttggatgttcgtcgacgtccttgcgcagctatggagcgattgggggctccggttctctgtaatttccagcttggtgacaatcgtcgtcctcagcctcttgtcctggacacgccggcgctcgacgtccggccgctggcggtcgatcctgctgtggttcgtgacgcgcgttgtctggttggcataccagggcgccgagatagccgcgacgggcgccctcggaagcctgtccctctccggctccgatgggtcagcggaggagcagcaggtgatagcgttctgggcgccgttcctgctgctgcacctgggcggcccggacaccatggccgcctacgcgctggaggacagcgccttgtccgtgcgcaagttcctcgagatggtcttccaggtcgggggcgccttctacgctcagtacaagtacatatatcgcgcgcgcacctggacgccgctggcgacggcgtcggccatcatgttgcccataggcattgtcaggtatgtggagaagtggtacgcgctatggaaatccaaaagcatgatggaggaggaggagggggaggaggaagaggaggagaagaagaaggtcgcgggcgcgggaccgggaccgggacgattcacatccgcaacaagcagcaacgacgcgctgtgccttgctcaggatctgttccatgtctgccgtcgtgccttgtccgattcttcggtgctcccgggcacggagaagcagcgtgccagcgaggagatcttcctgctgggatgggagcgcatgtgcaaggtggtggagatggagctctcgctcatgtacgaggccctgtacaccaaggccatcgtgctgcacacctgcccggttgcaggctacctcaaccgtctagtgtcgcccctcgccaccgctgccgcagtgttgctcttcaaccagtatatcggcagccgcagccgccgggccatcatcatcaggagatctttcgtcgacatcacctacctcttgctggttgttgccttcgccatggacctgatgtggctgctcagagcccttggttctacctggacgtacgccgccctcagagaggcgcggccatgggcatggtggcttcgccaccacttgctgtgcagcgggagatggcgccggatccaccgcgccgtcgacgccctgcatccgttgtcgtggttattcggcagcgatccagttagctactacaggacgtggtcgggcaccatcgggaggtacaacctgctgcaggcgtgcagcgttgctgctgctcaccgtggtgcccgccgtccatggtggacgcggttcgggagctggctggaaaaaaaattggagctggaggagacagagtatctgcgtgagcttcctcaggacgtcaaggaatcgctgatccagcgagtgcagcgaatactggtgtcgaccaaaaataataatgctgataagaagacggatgagaatggaattggatgccgctacaccctggtagacatcaggacactctggggtcagcaggccctggaggacgccaagacgaacctgttcggtcgcggccgtaaaaatggtaggaaaacaagtaacaagaaaccgaaattgcccagcttcggccgtgaattcgaggaggacgtcctcatgtggcatatggccacctgcattctcttctcgtcatcaagcggcaaggagagcatagtcagcataccagggggatcctcggccgacgccgccgatgcccatgtgacggcgatcaaggtgatgtcagaatacctcatgttcttcgtcgctgtacgtcgacacatgctgcctggccttgtgctccacagcctgctcgagaaaatccgccaaactttgcacgagatatgggacgacggcaagaagaaaactactggtggttcgtcgtcgtcgtcgtctacagcagccaaagatactccgcctcctcaagacaagcttgccgaaatgctgctagagagactgaaagcagtgtgcagaagcgacagcaagtgccgcagctgctggagttcatcttcaacgtgtgggtggacaagctgctctatgcggccgccagatgcagcgtggagagccatgccaagcagctcagccgcggcggcgacctcaccaccatactgtggcttattgtccaacatgctgccctatttcgcatcggagaattaaaaccgaaggaagagcctcaggaggaggaggagaagaagaaggaggaggaggaggagaagaagaagaaggaggaggaggaattgaagcctttctggccacagtatccaatgccagcgccaccgtcgaagccagcatatgcatatccagttcattacattgcagatgaagaagaatctgacgatgccgaagaatctgacgatgccgaagaagatgatgacatgacgaggcatgctatactgtactagtttatattcgtgcgttgtaacgagaccaaatatagtctcattaaattaagtttacatgtctctactgtatcattaaaac

SEQ ID NO: 17472 - DNA, 600 bp, Zea Mays
cgccgccggaaccaccgccgacgtgttgccgtcccacctgaaacattgcagcgagcgcgcgcaccaagcgaagatcagcactgggcaggccaggatgacggcacagtagcagctccgacgagtcataaagccatgaaggaagctccctggtcccagtacagtgtatgcagcatcgctataatgatgataatgccattgacggtgatgcttaaatgtgatccctacaacgccttcttaaaatggcaaagaggagccaggttctaaggctagccgcagtgaatgactagaaccggtacgctacgcggatagagttaacgcgagtgctgcagccgtgtactgggactggtacgctaaggcaagcaagcaaatcggaaactttaaatgtagagttgcagcaacgtctactgcatacgtctgctccgtgcaccaggagagaggcggggccggagacagcaaaggttgtgggacccgaggcggggcaccaggagagagaaataatagaatatatggtatagagtaaacatgagtgcagaggattgtgatatagagtaaagaattttgctgaccatgacagaatattctttttagggtagaaattta

SEQ ID NO: 17473 - DNA, 887 bp, Zea Mays
cttcttaagagcatggactaaaagcccaaatcaatccatgtctggacgtctgcaattccccatccattttcgtacgccgtacttccccatacacactcagccagtggttttgctagggttctcatccttccaccaccgcccctgcctgccacagcgatggccgccgccgccggcggagaggacgacgcggcgtgggagcgcgccatctccgccgccaccaagtccacctcggcgcccaagaacctcaccctcgacggcgccgtcaagtcctccacgggcggcctcccctccgccgtgctcctcgagcgcttcgctgcctccctggaggagctctccgtcgcgggggcgcgcctctcctcgctaacgagcctgccacacctcccggcgctccggcgcctctccctccccgacaaccacctctacctagggaacaaccggttcgcggaggtctaggagctcgcgccgctcgccggggtccgggtcgagtcgctcgacctgttccagtgccccgtcaccaaggtcaaggggtacagggaggaggtcttcgcgctgattcctagcctcaagtaccttgatggcgctgacgctgagggcaacgagcgtttggagacggatgacgacgaggacgaggaggaggacgacgacgagggagaagaaggggcggagggagaggaggagggcgatgaggatgatggagaggaagaacatgacgaggaggaggtggaggcgaatttctctttggatgttttgtcatgaaaattccatcaggccagagaatctgtacgcagagaaaatacagactaaattatggggggtgatcctgcacaaaaaatccattgataacagattgaggatgtatgctgctagctggaggtattatatttgcg

SEQ ID NO: 17474 - DNA, 3006 bp, Zea Mays
ctatgatcgaacatgtgagcttcttctcctgatggttcacgtcgtgacatcttagatatctctcgtccatctctcactcaagacgatcgtctatctagaaatcttaatgaagttccatgggcctcaaatcaaaaccgtcgatcacatcagcctttctcttcttcttaagagcatggactaaaagcccaaatcaatccatgtctggacgtctgcaattccccatccattttcgtacgccgtacttccccatacacactcagccagtggttttgctagggttctcatccttccaccaccgcccctgcctgccacagcgatggccgccgccgccggcggagaggacgacgcggcgtgggagcgcgccatctccgccgccaccaagtccacctcggcgcccaagaacctcaccctcgacggcgccgtcaagtcctccacgggcggcctcccctccgccgtgctcctcgagcgcttcgctgcctccctggaggagctctccgtcgcgggggcgcgcctctcctcgctaacgagcctgccacacctcccggcgctccggcgcctctccctccccgacaaccacctctacctagggaacaaccggttcgcggaggtctaggagctcgcgccgctcgccggggtccgggtcgagtcgctcgacctgttccagtgccccgtcaccaaggtcaaggggtacagggaggaggtcttcgcgctgattcctagcctcaagtaccttgatggcgctgacgctgagggcaacgagcgtttggagacggatgacgacgaggacgaggaggaggacgacgacgagggagaagaaggggcggagggagaggaggagggcgatgaggatgatggagaggaagaacatgacgaggaggaggtggaggcgaatttctctttggatgttttgtcatgaaaattccatcaggccagagaatctgtacgcagagaaaatacagactaaattatggggggtgatcctgcacaaaaaatccattgataacaggtatgagactgcctaactgcacacataatatttatccctttatagactgttggttgtctgaacctccctccctctccctctcttttctaaatatacaatctgagacttacttgttcaatgcgcttaacagcaaaagcaattatcctcccttacctaagtaattggattttgtcaacaagccagtcatcaaacgtgtctcccattcccaattgcagtatttgctttgctacccaaaatgcttgacgcctacaaaaaacagaaattcattgttaaatctagactgtccaaactatcgggcctgatggaattcattcaatgcttttatatttttcccatttgatctttcatctaaactgactgcaagataataggaattcagcattaaacaatgcaaaaacgaagaactagccattcgggccaacaaacctgacaatgtttggataactgagagagtgtctgtgaaaatatatgtctgcaaagagacattccccaatttattaaacgccagttttgaaaatattgagatgataaagagttaagtaaggaaactaacctgtgaatccacactcagaaaatcccagacttctatgcagcttgaaacttctatcccagacttctgtagaattaataggtcgatagagttatgatgatgtaagtttttttctaaacgaaactgctaacatctgtatcacagatcatgaagcgcaacaaaatgatctaacagaaaatgcatacttcaaggttagcctaccatactgcaacacaaaaatagaaagaaaatctcactgatgtttactgaatacatagtatttgatccactgaagatcaagatgctaattacgtgaatgttacaaaataaagtaatacacaccaatccctgaatacataaataacgactcgtgtctttcttgagcaattggaaggagcacagcacccattatagtcctaagctaaaacaaagaaaatggctgtttcttgcaagattgctctgcagcctgcaccttgttagcccctgatgaagctgttctaaactgactaaaaatgaagcaggcccaagaaacaaattgttgtttagaaatatcagtgcttaaaacttaaatcttagtgaaatgtgattatgtgaagaggattagaccttaactaaagttccttcaactagtagagtgaacgaagagatgatcgagacattgttcgtctcaaattcgacacggaggtcgtcgaagagtggaaccaaggggccgaattccagtctgtgcagccaggagaacaaggtcctcgacccaaagaaatcacaggtccaaaactatttgtgtatttttttaagcagagatgggtcagcgacgaattctttcagaactggaccctcaaagcagagcagattaaggtgcggcatcggcctgagctccggcgagctggtgctggagacggtggtcgtcgagccccgcccacgctggtcgccaccatcgtagaccatggggttggcctgtgcaagcgaggagggctttgtgtatactgtaggttactccgatctgcgaagacagagaaggaaatgctcggtcccgtccagagaagaagaggaagggaaacagacggcgtggagttactgtaagggcataatagggacaagccttcgcgggcccacttgccaggtgccccaaatgtgtctgtgacctcttctggcgagcgagcagacttgagcgacccatttttacgaatacagatagacgcggtgtgttttgcagagcggcaagttagagtgacccattttgccaaattcctctgagtaactgacaagtggcagtgcaattcaacacttaagctgacaactcccaactagaaaaaacaatgggctgtaaaatcatgtgttgatgaatttgtaagttccgattgatgaagatagttacatggatattatttcagataattgatctactgttactaataatgtaacattgctagattgaggatgtatgctgctagctggaggtattatatttgcg

SEQ ID NO: 17475 - DNA, 2392 bp, Zea Mays
caattaccgagccacgaacaaattgacaatcaccatggcgactggcaccgccgccgccagcgcttccggcgtgggagccgactccttggagtcaggtgctatgctgctgcggcgacgccacgccggcggcctcgcgggcgcgggcgacgacgacggggtcggcaatgccgaagaggtggcggcctcagtggagcaggcgttcgcggacgagcccgtgccgtcgtggagggagcagctcacggtgcgcgccttcgtggtggggttcatcctcgccgtcttgttcagcgtcatcgtcatgaagctgaatctcaccaccggcgtcatcccctcgctcaacgtctccgccagccttctcggctacttcctcgtccgcctctggacgaaggcgatcgagagcgtgggcttgctgaagcaccccttcacgcgacaggagaacaccgtcatccagacctgcgtcgtctccgcctatggcctcgcctttagtggtgggtttggcagttacctgtttggtatgagtcgaaccattgctatacaagcaacagaggccaatgatgcccagaatatcaaggatccgcaactcggatggatgatagggtttatgttcctcgtcagttttgttggacttttcgttctggttcctctgagaaaggttatgattgtcgactacaaactgacctaccctagtggaactgcaaccgcttatctcatcaatggattccacacaccccagggtgccgaacgtgcaaagaagcaagttcgaactttgggcaagtacttctcactcagtttcctttgggccttcttccagtggttctacacagctggtgacgactgtggatttgcctccttcccaacactcggccttgaagcttacaaaaacaagttctattttgatttctcagctacttatgttggtgttggaatgatatgcccatatatcgtaaatgtctctcttcttcttggaggcatcatttcgtggggattaatgtggccacttatcagcacaaagaaaggaagttggtaccccgaatctcttcctgatagcagtctacatggactaaatggttacaaggtgtttataaccatagccgtaattcttggggacggcctgtacaacttcttgaaagtattcggtcacacaataggcgcattaatatcaatgtattggaagaaacatgcaaacagacttcctgtgtctgacaatatgacccctcctgccacagttgaaaccgagtcatttgacgacaagcgtcgcattgagctgttcgttaaggatcagattcccaagacagttgcattgggtggctatgtcgttctggcagctacatcgatcggctgcctccctctcatcatccctcagatcaagtggtaccagatttttgtggcatacatcttcgcacctatactagccttctgcaatgcctatgggtctggcctaacagattggtccctcgccagcacctatggcaagcttgcaatctttgtcatcggtgcatgggcaggggcttcacatggcggagtgcttgttgggttagctgcatgcggtgtcatgatgagcattgtgggaacagcttctgatctgatgcaagacttcaagaccgggtacctgactctagcctcgccaaggtccatgttcatcagccaggtgataggcactgccattggatgtgttactgcaccatgtgtcttctggttgttttacaagtccttcgacattggtgcgagtggtggcgcttatccagcaccttacgccatcatgtaccgtaatatgtcaatcctgggcgtggatggcctgtccttgcttccaaagaactgcctcacgctatgctacatcttctttgctgtttccttcaccatcaatttgatcaaggatcttgtgccaaagaaggttgccaagttcatccccatccccatggcagcagcaattcctttctaccttggaccatactttgctattgatatgttcttgggcagtgtgatactcttcttttgggaatggaagaacaaagctgaagcagactcgttcggaccagctgttgcgtcaggcttgatgtgtggcgatgggctctgggcactgccccaggctgttctttctctagccaatgtgaaacctcctatttgcatgaagtttttgtcgaggtctttgaatgccaaagtggacaccttccttgggaactagacgagtgatagtttgatcggagtataattctcctttgtatgctaagatgaaagtggttaaataattctagtcttgtaaatttatattggtctattgtgtagtggtctatttagtttaggctggtgccaatggggcgacagcgttgaatgtactttctttcgatggttgctcctccattaaatcataatatactttggagactaaatcttccta

SEQ ID NO: 17476 - DNA, 2556 bp, Zea Mays
gcaccagtcagtccacacagcctacggcctgctctggctctgcctgtagagggctagagctacaagctacaactctgaaagtctgaacagtgcgccgcccaaccagagatggcgccgcataccaccgcagccgccggcggcggcggcggcgaggaggcgctggaggaggccagcactctccggcaccgccacagcgctgccaaggacggcggcgaggagggccaggccaacaacggggtcgccgccgccgccgacgacgacggggaggggaacgcgctgtcggtggagcgcgcgttcgcggaccaggcggttccgtcgtggcgggagcagctgacggtgcgcgccttcgtggtcagcttcttcctggccatcatgttcagcgtcatcgtgatgaagctcaacctcaccacggggatcatcccctcgctcaacgtctccgcggggctcctcggcttcttcttcgtacgcctctggaccgccgccatcgagagggttggcctcctcaggcagcccttcacgcgccaggagaacaccgtcatccagacctgcgtcgtcgcagcctacgacatcgccttcagcggtgggtttggtacatacttgtttggcatgagcgaaaccatcgccaagcaagcaacagaggctgacaatcctcagaatgtcaaaaaccctcacatcggatggatgatagggtttctcttccttgtcagtttcattggcctatttgctcttgtgcctctgagaaagctgacatcgctggtctaggttatgatcgtcgactacaaacttacgtatcctagtggcacggcgactgcttatctcatcaacggtttccacacgccagagggtgccaagcttgcaaagaaacaagtgaagactctggggaaattcttcttgatgagcttcctctggggcttcttccagtggttctacactggtggagataattgtggattccagaacttccctacattaggccttcaagcttataagaacaagttttacttcgatttctctcctacctatgttggagttgggatgatctgcccccacattgtgaacgtttctgttctactgggaggcatactttcctggggaataatgtggcctctaattggcaaccagaaggggaattggtacgacgccagtctcccagaaagcagtctccatggactgcagggttacagggtttttatatccatcgcaataattcttggagacggcctgtacaacttcgtgaaggtgctcattcgcaccaccgcggggttcatatcgatgatgaagaaaaacagcacgcttccggtttcaaacaatggcagccccatcactgaaggtgtttccttcgatgacgaacgccgcagggacctgttcctgaaagaccagatccccagatcagttgcctacggagggtacgtggctgtcgctgccatctcaatcggcacccttcctcaggtcttcccgcagctcaagtggtactacatcctggtggcgtacatcttcgcgcctgtgctggccttctgcaacgcgtacgggactggccttaccgactggtccctcgcgtccacctacggcaagctcgccatcttcatcttcggcgcgtgggccggcgcgtcgaacggcggcgtcctcgtcgggctagctgcctgcggcgtgatgatgagcatcgtgtcgacggccgccgacctgatgcaggacttgaagaccgggtacctgacgctggcatcgcccaggtccatgttcatcagccaggtgatcggcacggcgatgggctgcgtcatcgcgccctgtgtcttctggctcttctacaaggccttcgccgacatcggcctcagcggcagcgagtacccggcgccctacgccatcgtgtaccggaacatggccatcctcggcgtggacggcttctcgtcgctccccaagaactgcctcaccctctgctacatcttcttcgcggcggccatcgtcgtcaacctggtcagggacctggtgccgaagaaggtcgccaggttcatcccgctcccgatggccatggcgatcccgttctacctcgggtcattcttcgccatcgacatgttcatcggcaccgtgatcctcttcgcgtgggagacgatcaacaaggccaaagccaacgccttcgcgccagcggttgcgtcggggctgatctgcggcgacggcatctggaccctgccgcagtccattcttgcgcttgccaaggtgaagccgcccatctgcatgaagttcttgtccaggtcggtgaatgcccaggtggacggcttcctcggaagttgaaaactgttgaaatcgtgacgtgcatgtatattgtgttgatgcaccatgcgtgctgtaaaacgtaccgggtaatgttgtgtcgacacgttctggttttgatgtacatgagtaagtacactagtcgtagggattgctaaattaatgtttggcgtatacgcgtcagcattagtaatgtacatgagtaagtaccaacatctgtatgttacctgggttcaaatttcataactactttcccgtaaaatcttcgatatatctgcaagggtaagccaaaac

SEQ ID NO: 17477 - DNA, 1842 bp, Zea Mays
acgcctcacgccatgcgactcgtcacggcctcggcgtgccgcctgcgtgcccggtgcccgtgcggccgtgacgaacgacactgacgagcaaagcaaagccaacggagccgagcgagacgacgagaccgcgattgctagctagctagttcgggcagcgagcggggtgagacggctatggcgtgctgctccgccgtcctgcaccatccgctgggcttctcactcaccccgtgctccgcctcccgagccccaccgcgcatccagcgcgtgggcgtggcaactccctcggccgcctccgcccgccctctttctcgcgccaggatctcaccgcgctgcacctactccggtggcgccagcgctgcccctggtcctggggagctacccgcggcggcgctccgacgggtccttgagatgccgggtgcgcaccaggcgcccgcctgctacgacgcgctgagcgcacgcctcgtcgagcgcgccgagttcagggcctgcttcacgagcggtttctcaatctctgccgcacggcttggattaccagatgttggtctcatctcgtacggggaaatgatcgatcaggggcgtctgatgactgaagcagtttcaatccctgtgatcggtgatgcggataatggttacggaaactgtatgaatgttaagaggacagtgaaaggatttattaatgctggttttgctggaattattcttgaagatcaggcatgtggacacacacaaggaaggaaggttgtctcaagggaggaagcaattatgcacataaaagctgctgttgatgccaggaatgagagtggctctgatattgttattgtggcaaggacagattctcgtcaagctgtgtctcttaatgaagcattatggagagtacgggcctttgctgatgctggagcagatgttctattcattgatgccctcgcctcaagggaagaaatgaaggcattttgcgctatcgcgcctggagttccaaaaatggccaacatgttagaaggtggtggtaaaactcctatactgagccctgttgaactggaagaaataggttataaaatcatagcctatccattatctctaattggtgtatcgatgcgtgcaatggaggatgctcttattgctataaggggtggtcgcatacctcctccaagcagcttgccaacatttgaggagatcaagaatactcttggcttcaaccactattacgaagaagacaaacgatatgcggtgacaccagcccaaccattgtacgggactggctatgataattatacaagtgaaccgaacagtccgggagattccaggtccagggctaaaaaaacacaagaacctgttattgacatattgcctcagctctatgatattggttccagtgacagcagaggaccttcaactggaatgtggtctcgaactcttcgactaaagattacaggaagagatgggatccagaaaatcgatgccaggatacctgctgggttcttagaagggatgacaagaattattccaggcttggctggagctaatattatggaaaggcttcggaatgctcctgttgatacagacaacccccagaatggtcaaatactgcttgattttgaggacgccatgggagataggatccaggtgtttattgcatgagctgacggtgtctttgctagaatgctcgtgcacagcaaactctggaagcatggtcgtttcaagtagcatcagggtacatgcatcttgctattggcgcaaccctatctagtagttgaattagataatttggacatcgattatatcttggcgaactagtatttacaaataacagacttgttcctattcatcgaggctgggtgtaaaaga

SEQ ID NO: 17478 - DNA, 823 bp, Zea Mays
gcattgaccttggggccgaagctgtcggagacggtgaaggggaagctgagcctgggcgcgcggatcctgcaggccggcggggtggagcgcgtgttccgccaggccttctccgccgccgacaagggcgagcggctgctcaaggcgctgcagtgctacatctacaccacgggcgggcccatcgccggcatgctcttcgtctccaccaggaaggtcgccttccgcagcgaccgccccatcaccgtcacctcccccggcggcggcggcgacacggcgcgggtcacctacaaggtggccatcccgctgcggaggatccgcagggtgcggcccagcgagaacgtccacaggcccgaggagaagtacatccacgtctccaccgtcgacggcttcgagttctggttcatgggcttcgtcagctaccagaggtcgtgcaagtacatgcagcaggccgtctcggagatgcgatgaccggtgtctgtatcgctgccccctgtcggaacgatgtgaagtgactaggatgttatgggtctcgcttcgccatcttttgtcgccaagcagccgtagctaaaaagattgccctgtctttaattttggatcggtgcaattgtgttccttccgcgtacgaatttggaccagcatctctgttgttcccaaagtggttgctctcgatctactagtacacatggaccgaaaaaattaaccatttgtgcatctttgttgaatgcaacagttctatgtgtttctgattagtttatttctctctaccagtagtaggtaagcgtcaaaacataaataatgcaaaatacaatttgacttgtgctgtgtt

SEQ ID NO: 17479 - DNA, 2058 bp, Zea Mays
gtaaagtggaggaaaccacacttcggggcttcccatgtacacatacctgcggcaagcgcctcaagggaggacggaggcggggcagaagacggcggcgacggctccacgacgggtggagaaggctcctccgacggacgggtagcctggctctcgacctggcccatgaagagaggcagagcgggagaaggcggcggccaccctcgtctcttccggtaggtgggttagtagggagaggcgagaacgatagggcggcggagtaggctgcaattgcaacgctggtcaaagtcgaggcagcgacactcaccgccaacgtcggaaggaaacttcaaccgcagttcgactagcgccggcgcgtcccagactcccagccgtcggatcgctggacgctgggcgcctgggcgactcgcgtgatggtcacgatcttcactgggccacggaactatatgggccggtcgccgatgcccgaggtgggcttctgctaatggacccccagattcccccgcggctcctctcttcctgtcttacgtcgctcgccgcatttcgccatttttggggagggtgtgttccagccttgcaggccgccgagatggtgggaggcagcaagccgctgggggaaagcgtattcgcggtccacgcggtcgccggtgcggcggcgatcagcgcctccgccgtcgccgtgtaccccctcgatacggtcaagacactcctccagctgggagcgacggggcagaagcagaagatggggctccggcaggtggtggaccggctcatggccgcttccggccctgcaggtttttacaatggcattggatggtccatattgggtaaacttcctggattgggagcacgttttgggacctatgaacttttaacagccttctataaagatggaagggaggacaactatgtctattattctgaggctatgaaggctggcatagctgctggtgctgtagaggctgttttctgcacaccatttgaacttttcaaacttcgaaaccaacacccatggatgcttacgggctctgggaaacccccattaccgtctgatgtgcatctaccttctagagtgatattgcttgaaggatggggtgctctttggagagggctcagatcagggatagctcgagactgtgtatttggtggtatgttcttttctacttggcaattcctacacacagtgatgctcacctggaaggcagttaatatgagccctaaacctagaaatctagaagcagcaggacctgtacccccttttgcctctagtgttgctgcaggctttgcaggagcgatagcagctgctgcttcacatacatttgatactgctaaaagtcgttcagagtgtactgtggtgcctaagtatatcgcaatggagaggaagtttcttaagtggaaagcaccaggaacgtggatagagaggaagacaggaatatcccctgctgataggaatgttttgttccgtggcattggcctacgaaccgcccgtagtggaatcgcatcatttgtgttagtcggctcatactatttagctgtgaatcacctctcgtagttgatcaagagaaatcatatggagatttttttttgcattcagaagttcaaaactaaaattttatgactgtatatgcatgcactgaatggctggaagctgactttgccacagtatccactgattatttgaaaatcctgttcacctaagtgctcagatgaaactgattgtcccacggcatgttttaaggtgccgatgtaaatgttttatggcaaaaaaaaatttgaaggctgccactttcgatcagaggctagtttacagttctacataaattgctgaaaatctgtttttgacaaaatgcaagcatcaagatgcacaatgatcaaggaaccctttgacatagcatttcccttgtcagaagaagaatcgcctgtacaaagctcttcagattgtcttcaggccttgcgtaaatttgtgaacatgtatttttgtttgaaaatactttgtacacttcattcattacacatcagctcttgacatggcagatcttggtccttcctttctctccagag

SEQ ID NO: 17480 - DNA, 2360 bp, Zea Mays
ccgcaccatgctgcatctccttctgctgtcatgctgtgtgtagtgtgtaccacgaaacacaactccaatccagaatccacgcctcccaaagctctcctactctcaaacaccaccatagcatcggttcgccattaaaccggtcacctcgcctccctggcgctgcccctcttcctctccaccgcgttcgaatcccatgggtctctgtttcagcaagaagcagcaagagaagcgccgagacgtgcagccatccagtgacgccaagaagagcggatgccggaaatccggcagggacaccgtgcttgtcgccgatgccaagaaggctcctcaggcaaaggcgccagcacttcccaagaaggctgtagccaggccggaggaggcaacagctgacaagaggaccgtgttcgtcgtcaaggccgcggcagcggcggcggccgccgaggttgcggccgccgcgaagggaagacccgaggatgcgcaggcgaagagggcggcgccggaggaggagctgaggcccggcgctgtgggccgggcgccagtgcggacgtcgagctgcaccaaggaggagttggacgcgatcctgatccagtgcggccgcctcagccgtagctcgtcgtcgtccgggaaggcgccgtcgggcgagcaccggaggtacgccggatccaagcggagctacgacttcgaccacgagaggaggggcggtggcggcgacgtcgacgaatgcgattggggcagggagggggccgcggtggccaggccctcaccgcgccggaggtcgccagaacggaagcgctcgtcgagccacgatggccgtgctggcagcgggagcgggagccagagccggaggattagcaggtcaccggggcggcgagcggacgtcgttcccgccccggggagctccgcgaccggcgagcgaggcgcgaggcagcagccgggcaagatggtgtcggtcccggccagggagaaggggcgcgcgccgtcgcccgtgaaggctgcttcgtctggcaagaggtacccatcaccaaggtcaaactcgcccgcgagggcagcggcctcgggtaatgagaatgccggggtgcagtcgacgcacggtccctcgctgagccgcagcacctctaggaaggccgagcagtcgccgttccgtcgcaaccccatggcggaactcgacgagaacacgctcggcaaccaccaccaccataacagcaacggcaggcctctaaagaccgcggagcggacaaaggatcagatctccagctgccgaactgcgaaggagattgcggatgaggccgtggcttcggacaccaaagcagcgcctgcaaggatgaacgcgacccactcggtgagcattgtggccgagaacgtcaccaatccgaggccggggagccggtcgtcgaggcgctcctcacgcgacttcgagcacaatggcaacacctacgcatccctgttactggaggacatccagaaccagcagcagcagagcaccagcgctgccactgtcgctgcagcgccgaccttcgcgcttccggcgtgtgtgtcgaaggcctgctctatccttgaagcggtcgccgacctcaactcctcgtcgtccgagaacaagaacttcgagctggagaggtcggtcaacgataaggaatccgtcaacggcaggtacggcggaaagggtgcggtcaccctcgtgatggagtcggaggtcggcgtgaaggacgatctcatggagccgagcatgcacaagtacgtctcggtgcgtgacattcgtggggagaccgagccgcaggagtcagcagggagcaacagctttgccggcaacgcctggacgtgctcgtgggagcccaattccgtcgactccgcagaccggacctggacggcctcgcagtcgtacaacggcgacgaggtggagcagtcatggcagagcaagcagaagccgtcgtcatccaaggagcccagccacgttggttctactagcgatgttcaggtccagcgcgtgcggggtgctcaccgcctccgcggcagcagcagtgctgtcaacggccagtccgatgttcggggtgtctcggcgagttcgtcgatcgcttaaggatgcaactggaggttttaggagtcatatgctccagttggtcacggtatcaagctgttgtggcaagataggttgctgtttcagactagtgtttaagcgtttggattctttgcttagtttgatgatatactctcctcgttctttttttatttatcacgttttagttaaaaataaactaacgaaaacgaagacagtacattgtttagatgtgatcaagcagtgatattggcaatgtatactcttccgttcacttgctaatgcttagcgtcagcaaacatatctgcacgta

SEQ ID NO: 17481 - DNA, 1370 bp, Zea Mays
gccgacgaaaaacatttcatttccttccgtcttctcccgccctcctctccgccatgtcatcgctccgcgtgaaaagcgcatcgcgaccgtccgttagaagaagcaccaacggcccacgccgcttgaagccagcgatccgcggcacctgcccctcaaccaattagcgcacacctctcccgtcctataatagacgcaccgcccccgtatcctgtcccaacaacagcgaacacatctcctcgcatttcttcccatccgatccccccttcgcaaccaaaaccccaactcgccccgcatcgatggcgcccaaggccgagaagaaacccgcggcgaagaagccggcggaggaggagcccgcggccgagaaggcgcccgccgggaagaagccgaaggcggagaagcgggtccccgctggcaagtccgctgccaaggaaggcggcgagggcaagaggggcaagaagaagggcaagaagagcgtggagacctacaagatctacatcttcaaggtgctgaagcagctcgctgctgaggccgccaagctcgcgcgctataacaagaagcctaccatcacctcccgtgagatccagacctccgtgcgcctcgtccttcccggggagctcgccaagcacgccgtctccgagggcaccaaggccgtcaccaagttcacctcggcctaggctgcgcggccgccgcttgcaggattctctcctgtgttcacgtctcttgctgtagttaggtgctgctgcctgctggcttctatgtatgttatctatctgtctgtagcaactgtgttatctgataggaccgtaatggtgcttattcaacccagctatatgtttctatgtgaatcatctctctatcggttgttgagtaactttatattgtgatgaagatgtgaatgtgatttataaaatgcgtcagtttctacggtaaggttagctgctggccatcaaggtccttgctaggtgtcaggtgcatacatcgttggattggaatgtagtcttgttctgattcagtttgattgtaatatgatgttttgtttgcacattgatctgtgaacaactgaactttgaaggtcactaacgtgttgctgatagaacccatggctgaaacaaatgtttttccagcagtgatttaagttgtggatactgaaacaagaacacatgagtggctacaaatgttttctactctgctgaagttgtatataacaacataggtttctgttccgttctcttgcgtgcttggtagcactgaaaagtcttggtcctgcaattggagatgtcagaaacacttgagaaagacaataaacttggacatgagaaaggggactatgtgttgctggagttactcgactatctttactcagacatcat

SEQ ID NO: 17482 - DNA, 554 bp, Zea Mays
gttgaggaggtttgggaacggaggagccgaagcgagcagacgcggatcgaggaatcgccttccagggagactacggacgcagagagagccgggcgcagcggacgcggattcctcgatctccttccatggagagcttgggcgaggaccgagagccggggcggcgatttggggcgaggccgtgggattgcgggagagagagttgggcgaggagagccgggcgggagagagagtgaggggtgctggttcgcggacgcggcgctgggcacgaggggagcagaggcggtggtcgcggagcggaggatggcacggcgggacacgacgggatgatggagctaggggcgaagacacggcggcagtcacgggatctggggtcgcggacgggagcgtgtggagggggctcacggacggggacgggatgcagggaagggacggcgcgggcgagggcgagattgaagggaaaggacgacgcgcgggcggtggcgggattgcagggaggaagacggcgcgggcggggctggagcgggggcacggtaagggtggtggacgccctcgct

SEQ ID NO: 17483 - DNA, 746 bp, Zea Mays
gatctatgcatcgatcatatgaccagagagtagatatcctctggaggcatctgccttggaaagctttagatgtcttctatttgtcccatgtctttctccatgtatgctgtcaagaattgccatcaccccaatgatgaaagcttggtcatatcctgactgtacttccacatggtagaagtccttgcctcccatcagctctttcttacccatctgcagaacatatactatgtctttagatctcaacccctctgacactcaaatgctggtggcatgagtgtaatgctgcccttaaacttctacactttcatacaagtacttgcaaacacatgtacatcacagggtagcactatttctagagacggttatacatttttcttagccaaaaaaatgcaccatgtctatagacatctagatgtagacatattattttctgctctcatgggatatgcctttaatctgtgacaacaaaaggaatctgcaaagataacgcactacaaaagcagagctgtaggggatttaggattaaaaaggcgcggcatacctgggctactatttttctggtgcaatcaactatcgtacagtctctacctgcaaaagatcccccaatttcgaaatcccagtttttacattgcctcttgggtgcaatcaacatgaactctaaccttgtgctgtgcatgatttcggatcagttaggctaaaaaccagcttgttttttccttggtaatccatggagtacccattccatc

SEQ ID NO: 17484 - DNA, 1427 bp, Zea Mays
aaaactagaaacgtggtttgcggtttgcttcgttgcttccggtcttctttcttgcacttctttagtcctcccacacgtgctgtcattaccgaactaaagcagtttctgagagcaagcgtcacaatcgccatggaagctgggagaatggatcagccttgcatggcttctatcaatagccagcctttcgtggctgatactgagccagtgaagaaagccagtggggacatgcctgcggcgccgacaggaagcgggtgcttcgactgcaacatctgccttgattttgcagcagaaccagtggttaccctctgtggtcatctctactgctggccttgcatctacgagtggctgcgccctggggtggagtcaaccgccagcgacaacggcagttcggcaaggcggcaatgccctgtatgcaaggcaacactctcaccggacacccttgtgccgctatacggccgcggagggagctcaaagaagtcactggatggcatggccatcccgcgccgccccatggtacaccgggaggctgtcgagcaacagaatgcacggagccatgtcaatgaccagcactaccaccagagcacgggagacagccctcagcaccagccattgatgcaggcgcaccaccatcccgtcccccctgggttcgacttcatataccctccagcgccggtagggcgtggtttgatccactcgactgccggaggggtgctcggagggatggcagaggttgtgctcccgtgggtgctccgtggccagctgccagccagcttgcactacacgagcccataccatgttgcggcacagaacgtgaaccccaggctgaggcggcaacagatggaaatagagaggtccctgcaccagatctggttcttcctctttgtgtttgtgctgctgtgcctgctcttgttctgagacagaggactgttctatatgcctctctgtagatattgaagagggggagagagggatactaatggatgatgcgtatagtagacagggtaatggtctgtatcgacaagcatgctgatatagagttgtaatatgatgagacatgggaggtgaaatgtatatttcattcttctcgtcataacgtcagcggtttcctgatctatcgctgttggcctgttaggtaggttgcctacctgacatgtcttcatgtcagggccttcgatttgctcatttgcatatgtaaatcgaaaatgatgttttggctaccaatgtctgcgtcctcttcaatccctgttccgaaattgatacggcaattttgtagccaggacctcaggtgcacaacagcacaagtgcattttccttctatatgtgattacatgcatctgacgctgatccgggccattatatgtatgtggtatattgatcggagccaatatagattggcgtgaaagctaacagggaagagaaaaaaaaac

SEQ ID NO: 17485 - DNA, 1403 bp, Zea Mays
ctttgctgtgctggattcgtgtgcagctaccagtttagtttatgttccaaaagtgctgtcattaccgaactaaagcagtttctgagagcaagcgtcacaatcgccatggaagctgggagaatggatcagccttgcatggcttctatcaatagccagcctttcgtggctgatactgagccagtgaagaaagccagtggggacatgcctgcggcgccgacaggaagcgggtgcttcgactgcaacatctgccttgattttgcagcagaaccagtggttaccctctgtggtcatctctactgctggccttgcatctacgagtggctgcgccctggggtggagtcaaccgccagcgacaacggcagttcggcaaggcggcaatgccctgtatgcaaggcaacactctcaccggacacccttgtgccgctatacggccgcggagggagctcaaagaagtcactggatggcatggccatcccgcgccgccccatggtacaccgggaggctgtcgagcaacagaatgcacggagccatgtcaatgaccagcactaccaccagagcacgggagacagccctcagcaccagccattgatgcaggcgcaccaccatcccgtcccccctgggttcgacttcatataccctccagcgccggtagggcgtggtttgatccactcgactgccggaggggtgctcggagggatggcagaggttgtgctcccgtgggtgctccgtggccagctgccagccagcttgcactacacgagcccataccatgttgcggcacagaacgtgaaccccaggctgaggcggcaacagatggaaatagagaggtccctgcaccagatctggttcttcctctttgtgtttgtgctgctgtgcctgctcttgttctgagacagaggactgttctatatgcctctctgtagatattgaagagggggagagagggatactaatggatgatgcgtatagtagacagggtaatggtctgtatcgacaagcatgctgatatagagttgtaatatgatgagacatgggaggtgaaatgtatatttcattcttctcgtcataacgtcagcggtttcctgatctatcgctgttggcctgttaggtaggttgcctacctgacatgtcttcatgtcagggccttcgatttgctcatttgcatatgtaaatcgaaaatgatgttttggctaccaatgtctgcgtcctcttcaatccctgttccgaaattgatacggcaattttgtagccaggacctcaggtgcacaacagcacaagtgcattttccttctatatgtgattacatgcatctgacgctgatccgggccattatatgtatgtggtatattgatcggagccaatatagattggcgtgaaagctaacagggaagagaaaaaaaaac

SEQ ID NO: 17486 - DNA, 1710 bp, Zea Mays
gttgttttctccctcccccatcgttatatacccctacggagcctcttctcatcagcctgctccttatcgccggctgccgtgccgccgcgtcctgctccccgctcccgtgttcgtcgtccgaagcaccgccgagcgccgcggcctcgcgccagcgccaccgcccagaaaccatctttccctcccgcgccgctgagcccatagcccatatcggggcctcgttcgacttcgaccgaagcgcgctgtgtcaaatttctgcgaccttgccgccgccttcatcattctggagctcggattgatttcttcctttgctggagccaagtcttggagtcaatattatgctgccatgcacattgcaataaatgctgtcattaccgaactaaagcagtttctgagagcaagcgtcacaatcgccatggaagctgggagaatggatcagccttgcatggcttctatcaatagccagcctttcgtggctgatactgagccagtgaagaaagccagtggggacatgcctgcggcgccgacaggaagcgggtgcttcgactgcaacatctgccttgattttgcagcagaaccagtggttaccctctgtggtcatctctactgctggccttgcatctacgagtggctgcgccctggggtggagtcaaccgccagcgacaacggcagttcggcaaggcggcaatgccctgtatgcaaggcaacactctcaccggacacccttgtgccgctatacggccgcggagggagctcaaagaagtcactggatggcatggccatcccgcgccgccccatggtacaccgggaggctgtcgagcaacagaatgcacggagccatgtcaatgaccagcactaccaccagagcacgggagacagccctcagcaccagccattgatgcaggcgcaccaccatcccgtcccccctgggttcgacttcatataccctccagcgccggtagggcgtggtttgatccactcgactgccggaggggtgctcggagggatggcagaggttgtgctcccgtgggtgctccgtggccagctgccagccagcttgcactacacgagcccataccatgttgcggcacagaacgtgaaccccaggctgaggcggcaacagatggaaatagagaggtccctgcaccagatctggttcttcctctttgtgtttgtgctgctgtgcctgctcttgttctgagacagaggactgttctatatgcctctctgtagatattgaagagggggagagagggatactaatggatgatgcgtatagtagacagggtaatggtctgtatcgacaagcatgctgatatagagttgtaatatgatgagacatgggaggtgaaatgtatatttcattcttctcgtcataacgtcagcggtttcctgatctatcgctgttggcctgttaggtaggttgcctacctgacatgtcttcatgtcagggccttcgatttgctcatttgcatatgtaaatcgaaaatgatgttttggctaccaatgtctgcgtcctcttcaatccctgttccgaaattgatacggcaattttgtagccaggacctcaggtgcacaacagcacaagtgcattttccttctatatgtgattacatgcatctgacgctgatccgggccattatatgtatgtggtatattgatcggagccaatatagattggcgtgaaagctaacagggaagagaaaaaaaaac

SEQ ID NO: 17487 - DNA, 1275 bp, Zea Mays
ttaatgccctaggagtaacagtaacttggtattatcatctctgatttcactcctctccatctctacgtcgtctagagacgttttgagtggcctactaatttcaagataaatcttaggatcttgggtccctcatggaaggtcagatctagatgttgtcgctgcctatgcacacacgcggaccatcagaccacctggcacgggtcgtccgacttcgacacctgctcttgtcataggtcgtggaccatgtgaccataaaccacgaaccaaaagtaccatcgtcggtacatcttttaatgatcggtgactggatcaatgccaacagttggtcggcatcatccagaatcgcaggtactagtcaaaaggactgacttattatactggcgctaaaatctggtggtagatgagtgtgaatctctttggtggctcagtggctgccctgcgtttccttcctagagctccaaccaccgcagaaaatgaagccactggaaacggacaagcggcagcccgtgtcctgcgacctgtgggtgggctggtatcgcgttgtcctcctctccaacctccaatccgtgcaaaaaattttgttacagtccggctgtaaatcagactctttatagcccctcacaaaaataaggataggtcctacccgcagatcaataacacaactaaaacgttatctggtggacctgcaggtggagtctatcctcatttttgtgagggctgcaaacagccagccgaactgcagcaaatttttttcgcaatccgtgggtacgcgccgttcaaggaaaaggggccggaaacgttgacgctgtggctgacaattgacctatcacgaatgttatcgatagaaaaaaaaaacagcaataatcttctggatacacatgaccacgaacgccaatgatttcatggtttctgaaatggcgaccacgaaccatagtatctgaaacaccggagggtgcttggtaatgtgaccactaaggccctgttcggttgttccggattaattcctagcccttgttagtacagcaataatccagtactaacacggttgctactgaagactaaacagcccgttttgcggattggatcagcggctgggagcggagaccgagggacaagagcacaagcatccgcatgagggcaggggggcacacggggtgccgggcgcaggcgtcgcgggtcataccgattaccgagtaataccgacccatgacaatcgcggtatgatttcgcgaggcaattcaggctgcgggtgggagagggctgcgcgtgggagca

SEQ ID NO: 17488 - DNA, 282 bp, Zea Mays
caaaatcgcatgtcacagtcgcactcggagaatagtttacatacagcaccagtacaaaatcagtacggcgagaaatttaccactcgcgggggttacagacttacagtacaactacgtacgtcaggaaagacctagcaaggcaagacgtccaagaagctactgacagcgaccgtcttcttaatcttattcaccttccgccggagaggccggacacggaagaagagaagccgccggagacagggctgacgctcgacgtgaccgtggacgggaacgacacgttgg

SEQ ID NO: 17489 - DNA, 1646 bp, Zea Mays
agaggaattagcaggcaactctcatactataagcacattgcagatgacgaaacggtaaaggaagaccttcgatgtctttgagagcaccttctatgtctgtaaaggaagaccaaagttcttcaaacaagtcagatgacgaaatggtataatcgattctatccagaatgtatgaagtgctaattagctacatttgagcaaaagatttcttatcatgaataactgcttgtgcactatgcttaatgcattcaagaatcagtgtgttggtgaagctgagcgcacgtcagatcacacttctgctgtcatccatttgggctcaagcaacatcccctgaaaatacacctgccaactatggaaaaaaaaattataaccatcagttttgccccctgaaaataacctttgccactacacgataaggaaaaaagaaacaaaatctatcaaggagctgcagcaaagtaccatttgatattcgcaaaggactgagacacagaaataaatcttgttagtgggtgcaaatatcaagatttttgctctgtatgcaatgacttgagaaagtgttcaggttgatcaaaagtagttatatatatgggcatatcgctagctttcaggtcattcagaaaataagcagaaactagattgtttaaaattgaaaaaatgggtcttggtacccaaagaattacacaatccttaaatgtttacacttcaaggatacatcccgaattatacttcagcatgcatcaagacgattcagacgaacagagcgagggagatgattggttccgcagaccaccgcaccaatgcggagatgatttggttctcgtttccaaggttcggtttgtcttttcctcactccaccctttttctgggtttaaaaaaatgggacgagggagatttcgtccgtccgtcattctgtccaggattgcagaatccaagaagctagcatcaaggctgccgtgccatgctgatgcttgtcaatcatcgcctccaccaccatgagagcttgattgaggggggtcacggtcaccaccagccacctagctactccctccatttccagcccaccgagtgactagctgtgagatggcagtatgtattacaaaatcacgaaacgcgatggtttcttcttcttcttaacaaccccatattatatgattatcatctgtaagagaacatgaacattgaaaggagaagaagtgctaaggcgataacttataattcctggagacaatggatgatgcgctgatgattgatgtggaggaggcctgaatttcccaaaatggctaggaaggaagaacgtacatctcacggccatccaaccaatcaggcaaccaagcatccaaagttgagcagagagatgaatccagccgccaccgccctagttggaccgcgacggggaggaattattcagtcaatcgatcgatcatgacggcgggcaggcggtcagcggctgctgcgacggcggctgggccacgaacgagtgctgcagcagccgcatcgcgggcgggcggttcgctgggttcttctagaggcagaggctcatgaagtaatctcacctgaagtaaagcaagctccgaagccttaagcctgaaggggaccgatcgatttggccaacaaggggaggggagcgcgcgtgcagtgctgagctctcc

SEQ ID NO: 17490 - DNA, 1257 bp, Zea Mays
gtgcgaatgttttaaagctgctgcagactccaaaaccatgtccagaacaacagctcctatgaacatacacactgctccttcgtgtcaagtctgttgacctgagagaagtatgcaaatgtaagatgaaatgcatttagggaggggtgtttgaatgcactataactaatagttagctgttaaaaatagctaaagacatccaaacagcataactaataattcaactattagctacttttagcaaattagctaatagttagatatctatttgttagctagctaactctactagtaattttttagccaactacatattagatctagtgcattcaaacacaccttagatctagtgcatcactctgcctcgataaccataacttggtcccctagagatcaatcaagcaatttatataaacaaatatatgtattggactaatatggtgctacaaaaaatgtgatatggggaaagaatatctgatttcacaggatagtcaatacaaaagcaagctcataactgggttgcctatgagaagtctcatgttcagtataggaaaattgtaatagaacgtgcaataattcaaagtttcttagcttctgaatgttcatgagcaggtaaataaatatacagtatgagcttacccaaggtagcaaaagtgaatccaagacaagaagtctagcaccaaaatgtttagcaagtgcctttaccaatgtttcctgataaatctcagaacctaaatgcattgccgcaaaaaattagagaaatacagaagcacatgaagttggataattatcaaacaagtatggccactagcattacaaatcaactggaaaaggtaaacaacaaaggaagtacaggtctccaaacagagacaaagtaagtacctgctggaccggataacaaaattcgttggtttattgatgaaatctcagcaaactgcttgatgaactccttcttttacatatttttgtgaataaaaaagcttaccaccaaacacgagcatcactgaacagcccctttccatcataaactactatcccgtctttgttgtagatgccaagagcagatacaacagctgaaaatgccttttcagatggcaacatgtgtggtaactgaacaaggaaaaaatatataaccaatggatgtcaaatttaattgcagattcttaccaaagagagaaaaagcaactagttatatcagacagtattagtatcatcaacaagcaacaaaaaaatgcaggtactaagtagatatgccctgtt

SEQ ID NO: 17491 - DNA, 796 bp, Zea Mays
cttcctggtagctgtacagtgggagtactagttgcagataaatctactcctgagaagcctatcgctgagaagcaagggggctccagtatcagagatctcgctcttgcaagggtggaaacggagaagaggaactctctgattaaagcatgggaagataatgagaaggcaaaagctgataacaaggctactaagaaagtatctgttattctttcatgggagaacacaaagaaagcaaacatagaagctgaaatgaagaagattgaggaacaactggaaaagaagaaagctgaatatgctgagaagatgaaaaacaaggttgcaatgatccacagggaagccgaagagaagcgagcgatggtggaggcaaagcgcggcgaggaggtcctgaaggccgaggagatggctgccaagtatcgggccaccggccacgcccctaagaagcccattgggtgcttcggagcctaagaaatgttccaagtcacaccgagcagaaagtgagaaacctcaaccagtgattgcttggtcacctcgctctatcaagtgtgtagtgtgtgttcgaaagtgtgtaagtcctactgctcctgtatatatagatatcgcttccaagacgtgtacatgttggatgcttgatgtgaaacttttttatgtatagttaaggagtcacactgttgttttcgttgttgttgacatttaagtggatttttttgttgttctccttgtgttggtattttttgtccctgtctctttgttccttactactgatttaagtttctgtccatgtgcatctatgattttc

SEQ ID NO: 17492 - DNA, 1805 bp, Zea Mays
ttaaacgagtagtagcgaccgataagatagaaacaacgattcggcgaggatacagtactacggaagggacggcccaatggcgagcggcattttaatatccacgcacgatgcaaggaacagaaagcatatggtcaccgatggttcgtagcgacgtcgccgcccacgcatttatgccgccgcgcgccgcgctggtacgttcgagcgagccctgtggtctggtctctcgacgtttgcccggctaagctgcggagccgtccgacgacctgcccggccgcgtgctactgcatatacactgcacgtccccgtggtctgtcgttctgtcaacagtgcccacgggacgggcccccgggcacgacgacgttgaacgaaacgaacgttgctgccttgctggcgtgaaaggcgacgcgcgtcgtgcgacggccaccagagagtctccgcgctcacgggatccgagcgcccagcggtgcgggccagctcgtctcgtctgagcacacagcacagggcgattgcgctgggagccaatgcgctgcgcccgcgggccacggcgggcccaatgccatgatgcgccggcccgggtcgccgtcacgtacgcgcgcatgggttccttcatcccttgccgactcccctgtcagaaaaaaaaaatacgaggccgtgtccttcctgtcagaatttagaaacacatcaaaccttccgctctcttcccttcctttgcgggctgctctccagttcaggcgtccagcttcgcccagagtccagacacggccaacagttaaacgcgccaccgccaccacgctcgcacgcacgccccacaggtacagctagctcccacccctcaacagcaacagctaagcttctcctagcagacagcaacatgaccgaggaggaggccaaaaaggtggaggtggaagtggaggtcaccaaggcggcgccggcgaaggagaacgccgccgaagagaaggccgtcatccccgcgaccgagccgccggccgcccaggagaagccgccagcgccggccgacgactccaaggccctggccatcgtcgagaataaatctactcctgagaagcctatcgctgagaagcaagggggctccagtatcagagatctcgctcttgcaagggtggaaacggagaagaggaactctctgattaaagcatgggaagataatgagaaggcaaaagctgataacaaggctactaagaaagtatctgttattctttcatgggagaacacaaagaaagcaaacatagaagctgaaatgaagaagattgaggaacaactggaaaagaagaaagctgaatatgctgagaagatgaaaaacaaggttgcaatgatccacagggaagccgaagagaagcgagcgatggtggaggcaaagcgcggcgaggaggtcctgaaggccgaggagatggctgccaagtatcgggccaccggccacgcccctaagaagcccattgggtgcttcggagcctaagaaatgttccaagtcacaccgagcagaaagtgagaaacctcaaccagtgattgcttggtcacctcgctctatcaagtgtgtagtgtgtgttcgaaagtgtgtaagtcctactgctcctgtatatatagatatcgcttccaagacgtgtacatgttggatgcttgatgtgaaacttttttatgtatagttaaggagtcacactgttgttttcgttgttgttgacatttaagtggatttttttgttgttctccttgtgttggtattttttgtccctgtctctttgttccttactactgatttaagtttctgtccatgtgcatctatgattttc

SEQ ID NO: 17493 - DNA, 4109 bp, Zea Mays
aagagactgcagctttcttctgcgcatggaaacgacagcacgcaaaaggacagcagcacaagtgccagcaggccacacacccacacaactgctcttcattaagcccccaatagaacccttgatctgaaaattgcagcaccaggacccaaagcctcaatatgtctagcaccgacaagcctcaaacactcaaactcatccagaaaaacttattttattccatgaatggaaggcctgacgccatcaaaaaccgccttattacgatgaagccataaacaccaagcccccaatatgatgatattgttaaagcctcttcttttggatttgtgcacttgcttacacaccttctcccaccagtcagcaaaagtggactcattagaggcaggagaaagattagccagtcccaatgaagagagaatgtagaaccaaaattgccgcgcaaaaatgcaagtgcaaaggaggtgttggatattctcccaatcttgatcacataaaggacaaacctcaggataaggcaaccctcttttctgcagtctatcagccgtccaacatttatttcttattgccaaccaaataaaaaatttgcatttgggtggagcccaagtcttccataacctcttccattgttcgaaggtaatcgaacccatgaagaaggccctataacacgacttcgaagagaactgaccagaggaagaatgaatccaaacatgtcgatcagcctcctgagtgagcaccactccccttaatgcatcccaaaggttaagatattgttgcagcccaggcaaattaagaggggtctcaatgtcactgatccactgccagttttgaagagcatgggccaccgttctagaagaaatagctcgtttcccaacattagccacaacagcaggggcaaaatcttggatacaagacccatccaaccaccaatctgtccaaaataatgtattatacccattaccaaccagagaaacaatagaagcagtaaagaatctcttgacaagatgttgaataggcaagtccaaaccagaccacggcttggtaggatcagttttttgtagccataaccatttagcttgcagcgcccaactctggtacagcaggttagaaatcccaagcccaccgagatctaaaggccttgtaacaatgtcccacgacacaaggcaattgccaccatttacctcatttcttcctttccaaataaatcctctccgaatcttgtctatagaattaatcacccacttggggattttcatggcaatgagaaggtagatcgagatggctgaaagcacaaagcgcaccatagctgtcttgccagcaagactaagcaaccgagccttccaattaggaagtcggtctgcaactttctcgatccaaaccatgagatcagattttctgagctttttatctgaaatcggcagccccaaataagtgcaaggaaaagaggaagaagtgcactgaagaatattgcagcccatctgtaccgcctgctcattacacctgattgggataacgaaacttttttgcaaattagataccaatcccgtggctgaaccaaagcagtacaaaatcgttttgacacattgaaaatcttcctcaaaaggttgaacaaaaaggaccacgtcatcagcataaatggacagtctgtttcggatattagcaccctccaagctgtgcagcagccccctattttcagccagattaaacagactattgagaatatccataaccaatacgaacaacattggagagagagaatcaccctggcgaagccctctccggtgcctaataggaataccaggagacccattcaaaagcacttgcgtagaagaagaggccagaatattggagatcatattacgccacacaggaccaaacccaagatatgaaagcacttcaatcaagaaggcccaagagaccgagtcaaatgctttggagatatccaacttcaagagcaaactagagactctcttcttatggagagatttaattgaatgctgcaccaacataaagttatcgtgaatcgatctgcctctcacaaaggcactctgattagatgccaccaactcctgcagatagggtcccaatctattagcaagcattttggtgaccaatttagcaaaactatgaattaagctaattggtctaaaatctcttgcagacaaggcatcaactttcttagggagaagagttaaataagctgaattcagcatccccaacttgtgagtattctcttgatgggagtgaattaatggctgccaacaaatctgatttaataatatgccaacaacatttgtagaattttccagtaaacccatcaggaccaggagccttatcagatgggagagcaccaatagtgtcgcgaacctccttctcagagaaaggttcctctagggaactcaaatcaatagtgtctctgtggcaagcagctaggttaagagaaaacggtctctggatattagaacccaacagattggagaaaaaaaacgtccagaacctcctgcatttgttcatggctggtgactgtcctcccttcattctccaaattggaaatgaaatttctcttcttgcggaagcgagcctgtagatgaaaactttttgtgttggcatctccatctctcaagtagtgcaaccgggaacgcaagcgtgcaactgtcctttccaaaaaagcaaggacaaggcagtgttgtttcaatttctgcagcaacctcctgctgtcctgcgccatctccaacctgtgcagcacctcgcgagccagctccagctgagaattgacatttccaaccgcactatgtccccaggaagagattcatagccattgaattgcagattcagcatgctcgtggtgatccacggtgttttcaaacatacaaatcagcttgttttggtggatcaaataaaaaggatgaaacaaaaacgtcagttctggttcatttccaggcgctagtgaatgcttggcaaatcccatgaaccagacttgttctacattttaatgtggattccaaataaaatatttaaaacttgagtggaaatcgaagacaaaccttcccatcaccgtcactatcaaagcaacggatcatcttagatatctcagaatctgtccagatgaaatcatttattgtagccattctttcaagatcccatggtgtaatatatcctttaccaacttctgtgaaacaaaatgtgaacaatttggtactatttgcgcaagtgatatatccttctaaagagcatgcactaagtataagcaataagtgtatcaatcattttttaataaaagtgtatcaatcatgtgtttgctctttaaataactatatccatttccctcggaacaaataaccagagaagctacttcaaggctagttatttcagtttgcctcatgatatacatacagtactacgctactaacacctgtgctatcatttcttggcagatattgcacaatatagtgtagaccaaaataagttttcaaatgttcctaccagcttccacagaaattaaattacaagcaaccaatgaagcgaaaggtgtatcagttattcctttgcagtctgtgtgcatcaacatattacgatagcggcatcgtccttctctagaaacaagaccagaatcatgctagttttaagtttggtttaagcttctttcttgcatctaaacctacaggcgatccataagcagatttttttttgggggggggggggggggtcaagggctaattctatgagctgcaaacaagtatgaaatggtcaagctagactaaaaactatccgcaccaagcaaattcaaaataaagcggattcaaaccaagttaatctgagttcattacatttcatgaaaatactagtcattgcacttaacaagatcctgaaataatgaccaatattcaacccattgatgggtcagacatgtagaaaatcaattttggtgtcagataagagtaccgtcaaatgagaagaagaattgaaccacatcatcttctgacagctgaatcctgctcttacccttggggaaaacacgagagtgtaaaacatatatggcacaagtgaaattgatacaagtcacgcttgaaggggcgtaccagctttttaatcttcttgttcttagctgagtcctg

SEQ ID NO: 17494 - DNA, 1089 bp, Zea Mays
gtgcattcaaacacccccttagtaagacgtctcttatacaaaacttttaaagctatgattgcagtaactatcaattttagaattggtttgttccacggaagaacataacctttctattcaattttgaatagccactcaattccatctaatccccttctctcaaacaagttagtagaatcataaaatccccggtcaactggacttgacaagctgcaactacaaaggttatgtgcaatggctttatgtccgctactattccaacaatgttgatgcaatgtcacaggttaggccatgcaaaactagagtacaagcatctgcagaccagcaacactcgtcatcctcacttctcatgctcctgcaacatgttgcattgagatataatgctgcggaaatcctcgaggtttatctgtggaacagcaaaatcaagatgtaagaaaatactccttccattttaaattgtaagttgttttgactttttatagatacatagatttttctatgcatttagacatagtgtatatctaggtgcataacaaaaactatgcatttagaaaagctagagcgacttacaatttgatacagagaagggagaaagtacagtggaattggaggttgaaaagaaaccttattagggtgtttggtttgaggaatgagttagtccatcatcttcttactccacactatttttgtttggcttgtgcaatggaatgagttgatccatcaccacctcattcctcatagttagttagtactaatatgaggaatggagtcatcccaccaaatttgaggaatgaactcatgatgcaccacatcaatttagatgtagtgattccttaaaccaaacacaccctatatttctagtgcttgttcaacactgacaatcatgaaccaagatatataaataatttccagaataaaaaatcagtaatacacatccacgatgctaactattgtcttattaattttttttcgtgaacgcgcaggagagctgcgcatcattaaattaagagaagaaacaatataaaatggaccaaagtacaatgccacaaaaggccaaacacaagaccaccaaaacctgaccaaacacta

SEQ ID NO: 17495 - DNA, 1060 bp, Zea Mays
gttgttttctgaagcgggatttgggctgttgctgtcgagacaaagaagcagatctcgtgctctatgcagttgacaaaccgaacagatgactacatcggctttaaggttaagacgacgagcccgaagaagtactgtgtccggcccaacagcggcatcgtgccacctcggtccaccagcgatgtcattgtgacaatgcaagcacaaaaggaggcgccaccggacatgcagtgcaaggacaagtttcttgtgcaaagtgtcgttgtggcggaagggaccttagtcaaggacatcactggcgatatgctgaaggtcgtctacatcccaccacccaaaccgccatccccagtgcatgaggaatctgaagaaggctcatcaccccgaccttcattgtccgatggaattaacttgaattatcaagagatgcagacaacgagggaatctgatgagtcactgttgttctcggctgtaaaaactcatatagatcaaaaggactacacctccgagacatctgctttgatttcaaagttgacagaagagagaaactctgccattcagcagaacaataagcttcgagaggaactggaccttacgaggagggaagccaacaagcagaatggtggattctcctttgtggtcgtggtggccattgctctcctgggaatgctactgggatatatcatgaagagatagatgggctcataatgactcggcctcatgttagaccgttttcctcacagtattgaatattgtctaatgcacttatcacatgcacactgctactccatagcatattcatctggtgtcttacgtgatctgtttcgtgcttgggattgggatgactagtcaccagtcgcaacacaggctgtcaaacaatggtctgtgtgcttaatcttgttttagctgttatgttagtgtgtgcaactaaaactgggtaattaatgatgtcgttttggtcgaccgtttgtgtaacagcgaagtcaacttgctgtgggacagcttttgtttcatgactagaacttgccattgccgccaattaggcatgccgcaatttgttagccac

SEQ ID NO: 17496 - DNA, 1122 bp, Zea Mays
gtttcctgcacatgcctgtgtgtgttgttttctgaagcgggatttgggctgttgctgtcgagacaaagaagcagatctcgtgctctatgcagttgacaaaccgaacagatgactacatcggctttaaggttaagacgacgagcccgaagaagtactgtgtccggcccaacagcggcatcgtgccacctcggtccaccagcgatgtcattgtgacaatgcaagcacaaaaggaggcgccaccggacatgcagtgcaaggacaagtttcttgtgcaaagtgtcgttgtggcggaagggaccttagtcaaggacatcactggcgatatgtttaccaaagaatcagctaatgtggtggatgaggttaagctgaaggtcgtctacatcccaccacccaaaccgccatccccagtgcatgaggaatctgaagaaggctcatcaccccgaccttcattgtccgatggaattaacttgaattatcaagagatgcagacaacgagggaatctgatgagtcactgttgttctcggctgtaaaaactcatatagatcaaaaggactacacctccgagacatctgctttgatttcaaagttgacagaagagagaaactctgccattcagcagaacaataagcttcgagaggaactggaccttacgaggagggaagccaacaagcagaatggtggattctcctttgtggtcgtggtggccattgctctcctgggaatgctactgggatatatcatgaagagatagatgggctcataatgactcggcctcatgttagaccgttttcctcacagtattgaatattgtctaatgcacttatcacatgcacactgctactccatagcatattcatctggtgtcttacgtgatctgtttcgtgcttgggattgggatgactagtcaccagtcgcaacacaggctgtcaaacaatggtctgtgtgcttaatcttgttttagctgttatgttagtgtgtgcaactaaaactgggtaattaatgatgtcgttttggtcgaccgtttgtgtaacagcgaagtcaacttgctgtgggacagcttttgtttcatgactagaacttgccattgccgccaattaggcatgccgcaatttgttagccac

SEQ ID NO: 17497 - DNA, 1142 bp, Zea Mays
gtcgtgtcgtaattagttagttaagcgtttcctgcacatgcctgtgtgtgttgttttctgaagcgggatttgggctgttgctgtcgagacaaagaagcagatctcgtgctctatgcagttgacaaaccgaacagatgactacatcggctttaaggttaagacgacgagcccgaagaagtactgtgtccggcccaacagcggcatcgtgccacctcggtccaccagcgatgtcattgtgacaatgcaagcacaaaaggaggcgccaccggacatgcagtgcaaggacaagtttcttgtgcaaagtgtcgttgtggcggaagggaccttagtcaaggacatcactggcgatatgtttaccaaagaatcagctaatgtggtggatgaggttaagctgaaggtcgtctacatcccaccacccaaaccgccatccccagtgcatgaggaatctgaagaaggctcatcaccccgaccttcattgtccgatggaattaacttgaattatcaagagacaacgagggaatctgatgagtcactgttgttctcggctgtaaaaactcatatagatcaaaaggactacacctccgagacatctgctttgatttcaaagttgacagaagagagaaactctgccattcagcagaacaataagcttcgagaggaactggaccttacgaggagggaagccaacaagcagaatggtggattctcctttgtggtcgtggtggccattgctctcctgggaatgctactgggatatatcatgaagagatagatgggctcataatgactcggcctcatgttagaccgttttcctcacagtattgaatattgtctaatgcacttatcacatgcacactgctactccatagcatattcatctggtgtcttacgtgatctgtttcgtgcttgggattgggatgactagtcaccagtcgcaacacaggctgtcaaacaatggtctgtgtgcttaatcttgttttagctgttatgttagtgtgtgcaactaaaactgggtaattaatgatgtcgttttggtcgaccgtttgtgtaacagcgaagtcaacttgctgtgggacagcttttgtttcatgactagaacttgccattgccgccaattaggcatgccgcaatttgttagccac

SEQ ID NO: 17498 - DNA, 1218 bp, Zea Mays
accacttcatacacgttcgactgcccgagagatatacgctcggccgttttctgcatcaacattcaacggtggcaggcggagcaaccgaacacgcccgccgccgccctactcccacctgcccctgtattcgttgccggcgacgagcacccactacaccagtcgagacaaagaagcagatctcgtgctctatgcagttgacaaaccgaacagatgactacatcggctttaaggttaagacgacgagcccgaagaagtactgtgtccggcccaacagcggcatcgtgccacctcggtccaccagcgatgtcattgtgacaatgcaagcacaaaaggaggcgccaccggacatgcagtgcaaggacaagtttcttgtgcaaagtgtcgttgtggcggaagggaccttagtcaaggacatcactggcgatatgtttaccaaagaatcagctaatgtggtggatgaggttaagctgaaggtcgtctacatcccaccacccaaaccgccatccccagtgcatgaggaatctgaagaaggctcatcaccccgaccttcattgtccgatggaattaacttgaattatcaagagacaacgagggaatctgatgagtcactgttgttctcggctgtaaaaactcatatagatcaaaaggactacacctccgagacatctgctttgatttcaaagttgacagaagagagaaactctgccattcagcagaacaataagcttcgagaggaactggaccttacgaggagggaagccaacaagcagaatggtggattctcctttgtggtcgtggtggccattgctctcctgggaatgctactgggatatatcatgaagagatagatgggctcataatgactcggcctcatgttagaccgttttcctcacagtattgaatattgtctaatgcacttatcacatgcacactgctactccatagcatattcatctggtgtcttacgtgatctgtttcgtgcttgggattgggatgactagtcaccagtcgcaacacaggctgtcaaacaatggtctgtgtgcttaatcttgttttagctgttatgttagtgtgtgcaactaaaactgggtaattaatgatgtcgttttggtcgaccgtttgtgtaacagcgaagtcaacttgctgtgggacagcttttgtttcatgactagaacttgccattgccgccaattaggcatgccgcaatttgttagccac

SEQ ID NO: 17499 - DNA, 1128 bp, Zea Mays
gaaatgaaaagaaaatggatccgagaaagaatgtaccacttcatacacgttcgactgcccgagagatatacgctcggccgttttctgcatcaacattcaacggtggcaggcggagcaaccgaacacgcccgccgccgccctactcccacctgcccctgtattcgttgccggcgacgagcacccactacaccagagtggaccttatggtgatacagctgcttggttcagctcagtccattatggagttcccacaatcacataacaacccattcacgaccgatactgcccctctgcatgtcttattacattatgcagctgctgccgtgatctgttccccttacgtttttccaatcgaacaaatcaaggaatcaagacccccctgtgacaccccccgtgatctgttttctttaccatttacgttcccaaatcctaaccatggaaccaaacaccatcattatgtacttcactgttagtgtatacctctattgtaatgggtcttggcccacctaactctattatattaatgcattcccaaccctgattagggttagggtttccaatagtgatgtacagttcatgttgactctctagtttattagatgattctgaatttattgctgtggaaccaaagtgatcatctccaaaagggattgcatgttttgtccacccataagtccttgaacattggctttagaccttcattgttgttcttgaagccatcttaccaatagggagctatgaagcctagctggtatgttcatgttgtttagagaacaaacacaagatgatgagagctgaacttttcgattctttagaaccaatttgtattaacaaaagcttattaaaacattgaccagaaaccatgccgtatgtgtctgactactgtactaagtttaagttctttatcgtgtcgttacttttgaatctatgatccattggtcacacacactgatgccttgatttagtaccatccaccaattgtttatgttggatacaaagggaatcaaacactaaggtctaagacaatctttatatcaaatttggtttagctccactgttcttaaccagacatgaacttggattactattgtatcttaattttgagtttctctggacctaattagatat

SEQ ID NO: 17500 - DNA, 1105 bp, Zea Mays
aacacaatgaacacaatagcattaagtgggccttaactgcctgcagttcctgggctgtggaaatcacacacacggcggcatcccggaactcgccttcgactccgacagccgacacgacggcggcatcccggaccccaagccggccgccgcgtccgagagcgtcattgttgaatagatcaagtccaccccgggtcggtcggcatcctactcccacctactcccctaccaacacgcgggggaggggggacgccatgaggaagactttctgcttcgggggcagacgtgtggccaggaagatgtcggaacgggcgccgatggtcgacgggtgcgtgttctgcgagatcgtccgcggcgcccccgcctccaccaccgctctcctctactccgatgataaggtcgtggcgttccgcgacatcaacccgtcggcgttcaggtactcgattaggagttggtgttcatttcgtttgtacagctccctgttgcttggattgatctagatgtcgcattacgggtcatcggacgaactagggcatgggttcatttcatcgaacacctggcactatcttgtcatacccattgatcatataccaactgtaaatagcctccgcaaaaccaaagatgatcaccagttagtgagccacatggtgaaggtggggaaagacttcctcaatcaagatgctccaaattctgaggaacacaggtttgggttccatcagcccccatttaatagtattgatcaccttcatcttcattgcctggcactgccatttatccccagttggaggcaagtaaaatatacccctctgggacctttaggggggtttatcgcagcagaaaagctattggaaagaataaaaccagaagcagaagcatacagttagcatcaatatttttactgatacctgctatccctgcttatttgcattattttgtactcttatttatgggtcaatcacaatcagtacatttatgtgagtatttactctcttccctcttctgtaatcagctgacgcgtattgtgtattgtattcactgtttggacttctcaaagactagatctgtaatgttgaactcaatgaaactaaccactctagaagttaaactg

SEQ ID NO: 17501 - DNA, 2606 bp, Zea Mays
  misc_feature (197)..(296): n is a, c, g, or t
ctaacagcgacgtattaacccaaacccagagagcacagctaccgatccttaatcctcctgcagataaacaccctatcaacgcaaatccccagctcttccaacctctcctctccctccccatcagcgcacagatctatcgatcactacggttccatctcgcacccaactaggcctccgattattccgatcgccagcgnnnnnnnnnnnnnnnnnnnnnnnnnnnnnnnnnnnnnnnnnnnnnnnnnnnnnnnnnnnnnnnnnnnnnnnnnnnnnnnnnnnnnnnnnnnnnnnnnnnngatcggatttatgcagtcttactgccgccagctcctgccatgccgcggggcagcagcttggaccagagcctgagcgacgaggagcggtcggcaggtactggggcggtttgggtccggcgtcgccggcaatgtccgggatgtccgactccgcgggcggcgggcgtgcgggcgcagagctgatggtggagcagttccacctcaaggtgctccacgccgtgcgcacgccgcgcccgctcgccgccgccgccgctgccgcgtcgtcgtcgtcgtcgttcaggcggagggacaggtggttccatctcccgctccacgacccgccgccgcccgaggcggccggtcgcctcgacgagctggcccccgggcagccgcgtgtggtggacgtcctcctgtgtcctgccaccgccagtggtgtgggagaccgaggggaggtggtggagaggtggaccgtggcgtgcgagccctggccagacgccgcgagcggcgaggaggttgccgtgaaccgggcgtacaagcactgcttcacgctgctcaggtccgtttacgccgcgctccgcgtcctcccggcctaccgcgtcttccgcctcctctgcgccaacgcctcctacaactatgagatgggacaccacgttgacaccttcgccgagcccttctcgcgccctcaggaggccgccatgcgttcccaacgcttcgttcccgtcgaaacccagctcggtcgcctcgtcgtttccgtccactatctccccagcctcgccggcgtcgccgccttcaacctcgagatcacccccctttcgccctccatgataatcccagactacgtcggcagcccagccgctgagcccatgcgcaccttcccggcctcgcttacagaagccacgggctccggcttcccaccgtcctatgagcagcagcgtccacacagctgggcttcacctgcgttctggccgcacacgccggcacaccaggccaggttctcgccacctccagtgttttatgcgtcaccgacgccatcgcctccccactttccgcccggtctcatgaggtgggagtctgcgccaatgcccataccacaggtgagcgagaggaggagccccgcacacctccagaatatgctgccaccgccttcgccgagaagagcagacacgggggcagcaggtgctctagagtttccatctgagagtggccggttgattgggaggatggaggaacttcggctagctgatctacatgcgacctcgtcacccagacacaagggcaaggacaataaagatgaatctggcagattctctgcactctcctcatgtgattcaccacggcaagatgatctggatgatgtggattaccattttgatgttgatgatgttgataccccagtctctcaacctcgacacataattgatcttgtcaaaattctgcacatgatgagattggtgttactacgaggatttaaaaccttggcatgaaaaaggagcactagcgggaaggaaacaggtgatcaggttggttcattgccccacaaatctcaagacgcacaggtcggttatctagtcaacctgctgagaaacgcccgcccgctgcgaaatcctagcaatccatcacaaacaccaagggctcagtccaccagagtaacctcagcaagctcggtcaccacatctgacgcgctggaggtgctccagtccttcaaagagacaagggagcgactgctgtcccggagcagcgcaaaacatcaagagccaccgggaaagccataggcccattctttgctttgtttctcttaacgtgatcgctggtagacccccaaccaaccgcgaaacgggatgcacaatgagctaagcggactatagctgctgtgttcatgtacatatgactgccgaagttgatgcctttggttggagagaaggcaccggtttccatttattccagcggaaggatcactcgtcgttcttaagagtgatgccgctgttgataccccctttttttgtatatgggaagtgaaaccgatacacgtaggtgggagcgagggagcctgtgaactgtgatagatgaaagcagggcgtgtgtgtgtgctgtgtgtgtaaattatgtaactgctgggaatcaaatgtttcattggacatcaagctttgatctgggaagttgtggattggcgaactgcaggctgtagttggaaaaggaactctcggttgaattgagagttccaaattataattgaaacatagtatatgtacatcatgtattttgttttgttgttgttttaaacgatctgttgtgcaatacggattagagtctctcgccggttcgattgttgctgct

SEQ ID NO: 17502 - DNA, 1987 bp, Zea Mays
  misc_feature (197)..(296): n is a, c, g, or t
ctaacagcgacgtattaacccaaacccagagagcacagctaccgatccttaatcctcctgcagataaacaccctatcaacgcaaatccccagctcttccaacctctcctctccctccccatcagcgcacagatctatcgatcactacggttccatctcgcacccaactaggcctccgattattccgatcgccagcgnnnnnnnnnnnnnnnnnnnnnnnnnnnnnnnnnnnnnnnnnnnnnnnnnnnnnnnnnnnnnnnnnnnnnnnnnnnnnnnnnnnnnnnnnnnnnnnnnnnngatcggatttatgcagtcttactgccgccagctcctgccatgccgcggggcagcagcttggaccagagcctgagcgacgaggagcggtcggcaggtactggggcggtttgggtccggcgtcgccggcaatgtccgggatgtccgactccgcgggcggcgggcgtgcgggcgcagagctgatggtggagcagttccacctcaaggtgctccacgccgtgcgcacgccgcgcccgctcgccgccgccgccgctgccgcgtcgtcgtcgtcgtcgttcaggcggagggacaggtggttccatctcccgctccacgacccgccgccgcccgaggcggccggtcgcctcgacgagctggcccccgggcagccgcgtgtggtggacgtcctcctgtgtcctgccaccgccagtggtgtgggagaccgaggggaggtggtggagaggtggaccgtggcgtgcgagccctggccagacgccgcgagcggcgaggaggttgccgtgaaccgggcgtacaagcactgcttcacgctgctcaggtgagcgagaggaggagccccgcacacctccagaatatgctgccaccgccttcgccgagaagagcagacacgggggcagcaggtgctctagagtttccatctgagagtggccggttgattgggaggatggaggaacttcggctagctgatctacatgcgacctcgtcacccagacacaagggcaaggacaataaagatgaatctggcagattctctgcactctcctcatgtgattcaccacggcaagatgatctggatgatgtggattaccattttgatgttgatgatgttgataccccagtctctcaacctcggagcactagcgggaaggaaacaggtgatcaggttggttcattgccccacaaatctcaagacgcacaggtcggttatctagtcaacctgctgagaaacgcccgcccgctgcgaaatcctagcaatccatcacaaacaccaagggctcagtccaccagagtaacctcagcaagctcggtcaccacatctgacgcgctggaggtgctccagtccttcaaagagacaagggagcgactgctgtcccggagcagcgcaaaacatcaagagccaccgggaaagccataggcccattctttgctttgtttctcttaacgtgatcgctggtagacccccaaccaaccgcgaaacgggatgcacaatgagctaagcggactatagctgctgtgttcatgtacatatgactgccgaagttgatgcctttggttggagagaaggcaccggtttccatttattccagcggaaggatcactcgtcgttcttaagagtgatgccgctgttgataccccctttttttgtatatgggaagtgaaaccgatacacgtaggtgggagcgagggagcctgtgaactgtgatagatgaaagcagggcgtgtgtgtgtgctgtgtgtgtaaattatgtaactgctgggaatcaaatgtttcattggacatcaagctttgatctgggaagttgtggattggcgaactgcaggctgtagttggaaaaggaactctcggttgaattgagagttccaaattataattgaaacatagtatatgtacatcatgtattttgttttgttgttgttttaaacgatctgttgtgcaatacggattagagtctctcgccggttcgattgttgctgct

SEQ ID NO: 17503 - DNA, 1232 bp, Zea Mays
ggtggatctgcttaagaatcaaaagtcagacaaggtggacatcaccatccaaccggaggagcaggaagccatgaatgatgttctagcagccagcacaagaagagaccgtaccacttcctcgagccaaatcgccagcaatccaccatggctaaaccagaggggccaaccattggcgtgaagctgttcgtggacaaagagaagaagaaggtgctctttgctgagtccaacaaggagttcgtcgacgtgctcttcagcttcctcaccgtgccgctcggcaccatcgtccgcctgctggataagcagtctcagttgggttgtctcgaccagctgtacaagagcgtggaggacctcaacttggagtacttccaaaccaatgcttgcaaggcgatgcttctgaaaccgctcaacgcggcttccggccactgctgtcgcctcaagatcaacatcgatggaagcgttccaagggtggtctatgtctgcaaggacacgcggtgcaacgctctcagcgacaatgcgttcagttcgttccctggcacggtctgcaaatgtggtaaggtcatggagtccattggacagttcccaaaatacgatggtgacactgaaaccgccgccgccacttgttcagagggtggagtttttgtgaaaggttgcttgaagtttatcgtcactgatgatctccaggttgcgccagcatctacctctcttatgatgtttgtcttcgagaaatttggtgtgcttgatccagctgtcctagagcagcaggttctgcagttcagttcagaaaagataacatgcttgctgaagagattgttgacgtctaagtaacctctcactgatcattatttcgaagctcctgttccacaagatgatgcaagcctagaagcgcttgttcagaacttacatcctaaacaagaaaacgaggaccaggtcttgtgtaactgaatcttggaacaggttatggagctacatagggctgtcctgctgctgagtcgtaccacactcagctccgtgcttctgcatcctaagaagaccaagaagctgcaccattaccatcgtgtgtattaaagccgtcgttgttgctttactctatgattagccacaataataactatgtatgtctgttttcctgctggatttgtaagtttcattttggccactgatatttggtaactattataacagttcgagcatataataaatataaacatttgattcgagggttggtagggtca

SEQ ID NO: 17504 - DNA, 2038 bp, Zea Mays
ctctgttttgactcccatacaccaagaatcgagggcgcctgcatccgtgggagtaagactctccggctttgaaggaggagacaaaggccgaagggcagacacattgccttctgttcatgctgcttgatgttgaaacaccaaccactcaccagtcatttactctctcacttgctcattggatcatgtgcaccgccatagttagaaacctttatgtcatagttagagcaatgcattgggattttttttgctatgcacagaatacttgtatttggatctggcataattacaatcatcctgtcatcatcagtttcactcctctggctgctccttgtgtgtgtgtgtccactaatgcgttcagcattgcaactgctgctgccaaatgctgagcattcgttgccaacatagatggtcactctgataaaactgtcaccttcaatgggaggatgctcaggttttgagaccgaacctatatgtaccaccaaaacaatatcctaattgcaaggaaggtgaccttcctctcatcatcgcgattgactagcaaccaatggccctgataggtgttatgcaagtgtagggcgacatcactaatgctcggacaacggatgtggcatttcgatggatgcaaagcagacttggttgtttgcgatggaggcttcggatagtaagatatcatatgagtgcaagagaactactcccaccattaactataacaaattttgtcaccaaaatttggtggctggtggatctgcttaagaatcaaaagtcagacaaggtggacatcaccatccaaccggaggagcaggaagccatgaatgatgttctagcagccagggcgattcaccgcatgctgcacgcaccaggtattttaaggggtcacacttgcttgtttcatgtactagcacaagaagagaccgtaccacttcctcgagccaaatcgccagcaatccaccatggctaaaccagaggggccaaccattggcgtgaagctgttcgtggacaaagagaagaagaaggtgctctttgctgagtccaacaaggagttcgtcgacgtgctcttcagcttcctcaccgtgccgctcggcaccatcgtccgcctgctggataagcagtctcagttgggttgtctcgaccagctgtacaagagcgtggaggacctcaacttggagtacttccaaaccaatgcttgcaaggcgatgcttctgaaaccgctcaacgcggcttccggccactgctgtcgcctcaagatcaacatcgatggaagcgttccaagggtggtctatgtctgcaaggacacgcggtgcaacgctctcagcgacaatgcgttcagttcgttccctggcacggtctgcaaatgtggtaaggtcatggagtccattggacagttcccaaaatacgatggtgacactgaaaccgccgccgccacttgttcagagggtggagtttttgtgaaaggttgcttgaagtttatcgtcactgatgatctccaggttgcgccagcatctacctctcttatgatgtttgtcttcgagaaatttggtgtgcttgatccagctgtcctagagcagcaggttctgcagttcagttcagaaaagataacatgcttgctgaagagattgttgacgtctaagtaacctctcactgatcattatttcgaagctcctgttccacaagatgatgcaagcctagaagcgcttgttcagaacttacatcctaaacaagaaaacgaggaccaggtcttgtgtaactgaatcttggaacaggttatggagctacatagggctgtcctgctgctgagtcgtaccacactcagctccgtgcttctgcatcctaagaagaccaagaagctgcaccattaccatcgtgtgtattaaagccgtcgttgttgctttactctatgattagccacaataataactatgtatgtctgttttcctgctggatttgtaagtttcattttggccactgatatttggtaactattataacagttcgagcatataataaatataaacatttgattcgagggttggtagggtca

SEQ ID NO: 17505 - DNA, 3412 bp, Zea Mays
cgacctggagatcgtggggggaggtggtggaggtcgccctcgctcatccaaccgccagtgcttgcttctagaccaacccctctctctcggcttctccgcctcaagcctcttcccaattccgctagctgctgcccatcggccgccgcgaaccgaccgaccggtgctgctccggctccgccatggccggcgccggcgccgagctgggccgccgagccgctgcgaacgctgccaacaccgcgggggcccgcatctaggctcgatggtgtaggggggactgggaactgcggagaggagaagtggaggtgagaggggcgacgacaaagagagagagagagatgggagcgattggaggcgacgcgccggtgcagtgggacaaggtggatggggccgaggtggccaatggcggcggtggaggtgctgcgggaaggctggagaagatactcgtctcggtgaggctgagaccgctcagcgacaaggagatttcaaggggggacccggcggagtgggagtgcatcaacgacactaccatcatctcccggagcaccttcccggaccggcccactgctccgactgcgtattcgttcgatagggtatttcgttctgactgtactaccaaagaagtatatgaggaagggaccaaagcagttgccctctctgtagttagtggcattaactcaagtgtttttgcatatggtcaaacaagtagtggaaaaacatacaccatgactggaataacggaatatacagcagcagatatctatgattacattgccaagcatgaagagagagcgtttgtattgaaattttcagcaatcgaaatatataacgaagttgtaagggatcttcttagtgcagaaaacacatcgcttagactttgggatgatgcagagaagggaacatatgtagagaaccttacagaggtgaccttgagggattcagaccacctgaaagaacttatttctacgtgtgaagctcaaaggaggaccggagagacatacttaaatgaaaacagctccagatcacaccaaatacttaaactgactattgaaagttctgctcatgagttcttgggtaaggacaagtcaacaacacttgttgctagtgtgaacttcgttgatttggctggaagtgaacgtgcatctcaggcattatcagctgggactaggctgaaggaaggttgtcatattaatagaagtctacttaccctaggaactgtgattcggaaactaaggtaagaaatgggcacataccataccgagattcaaagctcacgcgcatattacaaccttctctaggaggcaatgcaagaacagcaattatttgtacaatgagcccagcccggagccatatggaacagtcaaggaataccttgttgtttgcaagttgtgcaaaggaagtggtgacaaatgcccaggttaatgtcgttatgtctgataaggcactggttaagcaattacaaaaagaacttgcaaggttggagagtgaattgcgatgcccagcttcatattctggtcttgaagcattagtgagagaaaaagataatcaaatccggaagatggataaagaaattaaggaactgaagttacatcgtgatcttgctcagtctagactgcaagatttgctcaaggttgttggagataaccacggttcgaagcaccccctggcttcttctgcaagaaattttacttttgatgttcctcagccatgtgaggatgagcaatcgacgacatcagaagctatcagcagtggccaaaattttaggcttcaaggacgcctgacaacacaaagagattataggtcacagcaatctgaaaatgatgtgcagtttgctacccctcttagctattcaatcagcagtcccccattcagtgggatgcctccaactaatggcagaaatgataactctcatatatctgatgaagattcagaggatctttgcaaagaagtacggtgcatagagaccaatgaaacagaagaaaatgaatgcttagagtcgtcagctgtgggaagcaatagtctgcaagattcaaatttagcttccagcatgcatgggaacgacaatacaaatcgatctgtgaattctggacggaatgatgcatcttctattaccctggaacaacatctggagaatgtcaaaaaaccgtttgccaatcctggcatggatctgggatcctctacacgtaactcgtcaagctcaaaagtaattggcagaagcaggagctgtaggtctctgatgggttctactctgttggaagacttggagaaagaagtttgcacccctccaagcagaagtttcatggactacccagggaggcccgaaacatgtcaaagaagggtacccgcactgaactacgatgcagagagtgaagctttatccagggcaggatcaatgctatctgaaattaccaccacgaggggtggactgaaggaaaacagctctgctgctggtgatacagaatttgttgctggcataggtgaatttgtcgcggagctaaaagaaatggcccagggtcataatggagaattggctgaagggaccataaggagcgtggggctggatcccattatggatatcttgcaatcaccttctcgctggcctttggaattcgagaagaaacagcaggagatcattgacctgtggcatggatgcaacgtttccttggtccacaggacttactttttcctgctgttcaaaggggacccagccgacgccatttacatggaagtggagcttaggaggttatcatttctcaagaacacatactccaacggaagcatggggtatgatatggtggcaggcagcttgagcacttctctggtttcaaggtaactcatcttcacgtttttttttactacacctttgctgtgtagcgtcactcaaactactcagtgacctgctgtgcagtgcaaagaaactgcaacgcgagagggagatgctctgcaggcagatgcagaagcggctgacgatccaggaacgggagagcctgtacaccaagtggggagtctcgctgtcctccaagaggaggcggctgcaggtcgctcggcgcctttggacggagaccagggacctggagcatgtgagggagagcgcgtccctcgtggccagactgatcgggctcctggagcctgggaaggcgctgagggagatgtttggtctgagcttcgcgccgcagcagtccacccggaggtcgcacagtagttggcggtatggccgttcttctctagactgactgagctcgaaagacgcagctgacaaaaaaacaacaacagttattccgttgttttcgttttgtgtagtgcctgatttttttgctgtcctctcggaaaatagaaattcctgaacattttgtgaccagtctgcgagaaaatttggtagcattttcaagatttattgatgtttacaatttggaaa

SEQ ID NO: 17506 - DNA, 3298 bp, Zea Mays
cgacctggagatcgtggggggaggtggtggaggtcgccctcgctcatccaaccgccagtgcttgcttctagaccaacccctctctctcggcttctccgcctcaagcctcttcccaattccgctagctgctgcccatcggccgccgcgaaccgaccgaccggtgctgctccggctccgccatggccggcgccggcgccgagctgggccgccgagccgctgcgaacgctgccaacaccgcgggggcccgcatctaggctcgatggtgtaggggggactgggaactgcggagaggagaagtggaggtgagaggggcgacgacaaagagagagagagagatgggagcgattggaggcgacgcgccggtgcagtgggacaaggtggatggggccgaggtggccaatggcggcggtggaggtgctgcgggaaggctggagaagatactcgtctcggtgaggctgagaccgctcagcgacaaggagatttcaaggggggacccggcggagtgggagtgcatcaacgacactaccatcatctcccggagcaccttcccggaccggcccactgctccgactgcgtattcgttcgatagggtatttcgttctgactgtactaccaaagaagtatatgaggaagggaccaaagcagttgccctctctgtagttagtggcattaactcaagtgtttttgcatatggtcaaacaagtagtggaaaaacatacaccatgactggaataacggaatatacagcagcagatatctatgattacattgccaagcatgaagagagagcgtttgtattgaaattttcagcaatcgaaatatataacgaagttgtaagggatcttcttagtgcagaaaacacatcgcttagactttgggatgatgcagagaagggaacatatgtagagaaccttacagaggtgaccttgagggattcagaccacctgaaagaacttatttctacgtgtgaagctcaaaggaggaccggagagacatacttaaatgaaaacagctccagatcacaccaaatacttaaactgactattgaaagttctgctcatgagttcttgggtaaggacaagtcaacaacacttgttgctagtgtgaacttcgttgatttggctggaagtgaacgtgcatctcaggcattatcagctgggactaggctgaaggaaggttgtcatattaatagaagtctacttaccctaggaactgtgattcggaaactaagcaaggtaagaaatgggcacataccataccgagattcaaagctcacgcgcatattacaaccttctctaggaggcaatgcaagaacagcaattatttgtacaatgagcccagcccggagccatatggaacagtcaaggaataccttgttgtttgcaagttgtgcaaaggaagtggtgacaaatgcccaggttaatgtcgttatgtctgataaggcactggttaagcaattacaaaaagaacttgcaaggttggagagtgaattgcgatgcccagcttcatattctggtcttgaagcattagtgagagaaaaagataatcaaatccggaagatggataaagaaattaaggaactgaagttacatcgtgatcttgctcagtctagactgcaagatttgctcaaggttgttggagataaccacggttcgaagcaccccctgccatgtgaggatgagcaatcgacgacatcagaagctatcagcagtggccaaaattttaggcttcaaggacgcctgacaacacaaagagattataggtcacagcaatctgaaaatgatgtgcagtttgctacccctcttagctattcaatcagcagtcccccattcagtgggatgcctccaactaatggcagaaatgataactctcatatatctgatgaagattcagaggatctttgcaaagaagtacggtgcatagagaccaatgaaacagaagaaaatgaatgcttagagtcgtcagctgtgggaagcaatagtctgcaagattcaaatttagcttccagcatgcatgggaacgacaatacaaatcgatctgtgaattctggacggaatgatgcatcttctattaccctggaacaacatctggagaatgtcaaaaaaccgtttgccaatcctggcatggatctgggatcctctacacgtaactcgtcaagctcaaaagtaattggcagaagcaggagctgtaggtctctgatgggttctactctgttggaagacttggagaaagaagtttgcacccctccaagcagaagtttcatggactacccagggaggcccgaaacatgtcaaagaagggtacccgcactgaactacgatgcagagagtgaagctttatccagggcaggatcaatgctatctgaaattaccaccacgaggggtggactgaaggaaaacagctctgctgctggtgatacagaatttgttgctggcataggtgaatttgtcgcggagctaaaagaaatggcccagggtcataatggagaattggctgaagggaccataaggagcgtggggctggatcccattatggatatcttgcaatcaccttctcgctggcctttggaattcgagaagaaacagcaggagatcattgacctgtggcatggatgcaacgtttccttggtccacaggacttactttttcctgctgttcaaaggggacccagccgacgccatttacatggaagtggagcttaggaggttatcatttctcaagaacacatactccaacggaagcatggggtatgatatggtggcaggcagcttgagcacttctctggtttcaagtgcaaagaaactgcaacgcgagagggagatgctctgcaggcagatgcagaagcggctgacgatccaggaacgggagagcctgtacaccaagtggggagtctcgctgtcctccaagaggaggcggctgcaggtcgctcggcgcctttggacggagaccagggacctggagcatgtgagggagagcgcgtccctcgtggccagactgatcgggctcctggagcctgggaaggcgctgagggagatgtttggtctgagcttcgcgccgcagcagtccacccggaggtcgcacagtagttggcggtatggccgttcttctctagactgactgagctcgaaagacgcagctgacaaaaaaacaacaacagttattccgttgttttcgttttgtgtagtgcctgatttttttgctgtcctctcggaaaatagaaattcctgaacattttgtgaccagtctgcgagaaaatttggtagcattttcaagatttattgatgtttacaatttggaaa

SEQ ID NO: 17507 - DNA, 3126 bp, Zea Mays
acgacctggagatcgtggggggaggtggtggagatggtgtaggggggactgggaactgcggagaggagaagtggaggtgagaggggcgacgacaaagagagagagagagatgggagcgattggaggcgacgcgccggtgcagtgggacaaggtggatggggccgaggtggccaatggcggcggtggaggtgctgcgggaaggctggagaagatactcgtctcggtgaggctgagaccgctcagcgacaaggagatttcaaggggggacccggcggagtgggagtgcatcaacgacactaccatcatctcccggagcaccttcccggaccggcccactgctccgactgcgtattcgttcgatagggtatttcgttctgactgtactaccaaagaagtatatgaggaagggaccaaagcagttgccctctctgtagttagtggcattaactcaagtgtttttgcatatggtcaaacaagtagtggaaaaacatacaccatgactggaataacggaatatacagcagcagatatctatgattacattgccaagcatgaagagagagcgtttgtattgaaattttcagcaatcgaaatatataacgaagttgtaagggatcttcttagtgcagaaaacacatcgcttagactttgggatgatgcagagaagggaacatatgtagagaaccttacagaggtgaccttgagggattcagaccacctgaaagaacttatttctacgtgtgaagctcaaaggaggaccggagagacatacttaaatgaaaacagctccagatcacaccaaatacttaaactgactattgaaagttctgctcatgagttcttgggtaaggacaagtcaacaacacttgttgctagtgtgaacttcgttgatttggctggaagtgaacgtgcatctcaggcattatcagctgggactaggctgaaggaaggttgtcatattaatagaagtctacttaccctaggaactgtgattcggaaactaagcaaggtaagaaatgggcacataccataccgagattcaaagctcacgcgcatattacaaccttctctaggaggcaatgcaagaacagcaattatttgtacaatgagcccagcccggagccatatggaacagtcaaggaataccttgttgtttgcaagttgtgcaaaggaagtggtgacaaatgcccaggttaatgtcgttatgtctgataaggcactggttaagcaattacaaaaagaacttgcaaggttggagagtgaattgcgatgcccagcttcatattctggtcttgaagcattagtgagagaaaaagataatcaaatccggaagatggataaagaaattaaggaactgaagttacatcgtgatcttgctcagtctagactgcaagatttgctcaaggttgttggagataaccacggttcgaagcaccccctggcttcttctgcaagaaattttacttttgatgttcctcagccatgtgaggatgagcaatcgacgacatcagaagctatcagcagtggccaaaattttaggcttcaaggacgcctgacaacacaaagagattataggtcacagcaatctgaaaatgatgtgcagtttgctacccctcttagctattcaatcagcagtcccccattcagtgggatgcctccaactaatggcagaaatgataactctcatatatctgatgaagattcagaggatctttgcaaagaagtacggtgcatagagaccaatgaaacagaagaaaatgaatgcttagagtcgtcagctgtgggaagcaatagtctgcaagattcaaatttagcttccagcatgcatgggaacgacaatacaaatcgatctgtgaattctggacggaatgatgcatcttctattaccctggaacaacatctggagaatgtcaaaaaaccgtttgccaatcctggcatggatctgggatcctctacacgtaactcgtcaagctcaaaagtaattggcagaagcaggagctgtaggtctctgatgggttctactctgttggaagacttggagaaagaagtttgcacccctccaagcagaagtttcatggactacccagggaggcccgaaacatgtcaaagaagggtacccgcactgaactacgatgcagagagtgaagctttatccagggcaggatcaatgctatctgaaattaccaccacgaggggtggactgaaggaaaacagctctgctgctggtgatacagaatttgttgctggcataggtgaatttgtcgcggagctaaaagaaatggcccagggtcataatggagaattggctgaagggaccataaggagcgtggggctggatcccattatggatatcttgcaatcaccttctcgctggcctttggaattcgagaagaaacagcaggagatcattgacctgtggcatggatgcaacgtttccttggtccacaggacttactttttcctgctgttcaaaggggacccagccgacgccatttacatggaagtggagcttaggaggttatcatttctcaagaacacatactccaacggaagcatggggtatgatatggtggcaggcagcttgagcacttctctggtttcaagtgacctgctgtgcagtgcaaagaaactgcaacgcgagagggagatgctctgcaggcagatgcagaagcggctgacgatccaggaacgggagagcctgtacaccaagtggggagtctcgctgtcctccaagaggaggcggctgcaggtcgctcggcgcctttggacggagaccagggacctggagcatgtgagggagagcgcgtccctcgtggccagactgatcgggctcctggagcctgggaaggcgctgagggagatgtttggtctgagcttcgcgccgcagcagtccacccggaggtcgcacagtagttggcggtatggccgttcttctctagactgactgagctcgaaagacgcagctgacaaaaaaacaacaacagttattccgttgttttcgttttgtgtagtgcctgatttttttgctgtcctctcggaaaatagaaattcctgaacattttgtgaccagtctgcgagaaaatttggtagcattttcaagatttattgatgtttacaatttggaaa

SEQ ID NO: 17508 - DNA, 1403 bp, Zea Mays
gtgcgggaagccaaccaggccaccgccgccaaagcgcggggaagtccgacgaacgaagcagtacaagcgaacgaacctaggcaggaccggttcgctgtctcgtcccgacctcgccgcccgccctcccgcacgcctgcccatggaggcgctgtggaagcaggcctccaggctcaaggaccaggtcgctcggcagatgaatcagaggttaaaatgcatcagagattggaaaagctttacttatcgactcgtgctgctaaacattttcaaagagacattgttcggggcatggagggctatatagtcacaggatccaaacaagtcgaaatagggaataaattgtctgacgacagccaaaaatatggtgctgaaaacacatgtacaagtggtgatactttatccaaagctgctacatacttcgggaaggcacgctcacagatggaaaaggagcgcggcaacatgttgaatgcatttggcacacaggtggcagagccactgcgggcaatggtaatgggtgtgcacctttagaggatgcaagacatctggcccagagatatgacagaacgaggcaagaagctgaagcacaggctgtcgaagtatcaagacggcagaatagggtgagggagtcagctgggaatggagatatgatatcgaaattggaagccgctgagtacaagcttgaagaactgaagtcaaacatggtggcattagggaaggaagctatctcagcaatgtcagcagttgagactcagcagcaatggttgaccttacaacgtctcattgcactggttgaggctgagagaggttaccatcagagagttctggagatacttgaccagttggaaaaagaaatggtgtctgagcgccaaaaaattgaagcacccctgactccagcagctgacaattacatgccaccaccaccaccatcttatgatgaagttaacggagcgtttgcatccacttctgttaatgaatcagtccaatctgtcaatttcttccttggagaggcccttgattccttcaaagctgaaagtgagtttgagcttaccttgtcagctggtgacattgtaattgtccgaaagatttcaagcaatggttgggcagaaggtgaatgcaagggcaaagcaggatggtttcctcatgcttatatcgaaaggcgagaacatgttctagcaagcaaagttccacatatcttttaggagtttttggctggtacatcatttctattgttgggagctggaatagtatccatgttttcattttctcttacgtcgcgtatgtacttaccggctgtcatgtgcataattaaactttacttccttattttagtctggagaagattttggatgtaacatatatttgagggaccaattggacactggttgcctcgatattgtgaaatagtt

SEQ ID NO: 17509 - DNA, 1525 bp, Zea Mays
aaaagccggcttagccgttcgctgcagctagtttgcagctgctttcacagcggcctggctggccgaaagggccgtgcgggaagccaaccaggccaccgccgccaaagcgcggggaagtccgacgaacgaagcagtacaagcgaacgaacctaggcaggaccggttcgctgtctcgtcccgacctcgccgcccgccctcccgcacgcctgcccatggaggcgctgtggaagcaggcctccaggctcaaggaccaggtcgctcggcagggtgtgttcaagcagtttggctatgggaattctgataatgcatttacagatgaatcagaggttaaaatgcatcagagattggaaaagctttacttatcgactcgtgctgctaaacattttcaaagagacattgttcggggcatggagggctatatagtcacaggatccaaacaagtcgaaatagggaataaattgtctgacgacagccaaaaatatggtgctgaaaacacatgtacaagtggtgatactttatccaaagctgctacatacttcgggaaggcacgctcacagatggaaaaggagcgcggcaacatgttgaatgcatttggcacacaggtggcagagccactgcgggcaatggtaatgggtgtgcacctttagaggatgcaagacatctggcccagagatatgacagaacgaggcaagaagctgaagcacaggctgtcgaagtatcaagacggcagaatagggtgagggagtcagctgggaatggagatatgatatcgaaattggaagccgctgagtacaagcttgaagaactgaagtcaaacatggtggcattagggaaggaagctatctcagcaatgtcagcagttgagactcagcagcaatggttgaccttacaacgtctcattgcactggttgaggctgagagaggttaccatcagagagttctggagatacttgaccagttggaaaaagaaatggtgtctgagcgccaaaaaattgaagcacccctgactccagcagctgacaattacatgccaccaccaccaccatcttatgatgaagttaacggagcgtttgcatccacttctgttaatgaatcagtccaatctgtcaatttcttccttggagaggcccttgattccttcaaagctgaaagtgagtttgagcttaccttgtcagctggtgacattgtaattgtccgaaagatttcaagcaatggttgggcagaaggtgaatgcaagggcaaagcaggatggtttcctcatgcttatatcgaaaggcgagaacatgttctagcaagcaaagttccacatatcttttaggagtttttggctggtacatcatttctattgttgggagctggaatagtatccatgttttcattttctcttacgtcgcgtatgtacttaccggctgtcatgtgcataattaaactttacttccttattttagtctggagaagattttggatgtaacatatatttgagggaccaattggacactggttgcctcgatattgtgaaatagtt

SEQ ID NO: 17510 - DNA, 2077 bp, Zea Mays
gtcatcaaatcattctcagactgtggggggcgattcccgtcccgtccttccagtcggctgtctaatttgaaggttcaggcgttcagtgggcacatgcctgcgcgagagcagtagcagaggcagacagtggcttcaatgcggagcttgaactggagtggctactactcgtccttgcatagcataataacaagattagcataagatttactttaatcaggggaaccaaacacccggcaccgcaggcagtcggtagtaccgggctgtaaattaattgttcgagtactgaatcacgtgcgtgcaggcctgtcgctggagccgctgatcggggcgatagcggccgggaacgcggtggctctgaagccgtccgagctctcgccgtgcaccgccaggttcctgggcgacaacatcgggaggtacatggactcctcggcggtgaaggtcgtccagggcggccccgacgtcggagtgcagctcatggagcaccgctgggacaaggtcctcttcaccgggagcccccgcatcgcgcgcgccgtgatggccgcggcgtccaggcacctgacgcccgtcgcgctggagctgggcggcaagtgcccctgcatcttcgacgccatgggcagcgcccgggacctgcagatctcggttaaccgcatgatcgcgggcaagtggtcgtcctgcgccggacaggcctgcatcgccatcgactacgtgctcgtcgaggagcgcttcgcgcccatcctgatcaaggtgctcaagtcgacgctgaagaggttcttcccggaagcggaccacatggcacggatcgtgaacgagcgccacttcgagaggctgagtaaccttctcaaagacaggtccgtggcgccgtccgtcctgcacggcggctccatggacagcaagaacttgtacattgagcccacgatactgctgaacccgccgctggactccgcgatcatgaccgaggagatattcgggcccctgctcccgatcatcacggtcaagaacatcgaggacagcatcgccttcgtgaaggccatgccgaagcctctcgccatctacgcgttcacccgggacgccgccctgcggcggcgaatcgtggacgagacgtcgtccgggagcgtcaccttcaacgacgcgtacgcgatagacgggctcccgttcggcggcgtcggccagagcgggttcgggcagtaccatgggaagtactcgttcgagatgttcagccacaagaaggcggtcatgaagcggggctacctcgtggagctgacactcaggtacccgccgtgggacgagagcaaagtcaccctcatgcgctacctctaccgcttcaactacttcgccttcgtcctctctttcctcgggctcaggcgatgaacttcactccagcatcaacgcaaggatcgcacagggattgggcccaatataggcgatgaactggcattgacagtggatggaggaacaagccaatatagacaatatgcagtagatgtcttgtttgtgaggaacatgtgtcatgccgcacttcaaaaccagtaatatgctaacctgcatcctatctatgattgcctctagtgagacaaacagtgaaatgcctttcaatctttagtagtacattggtcgagaccatcatctatcctctgcataaaagtatcaagtgcaaaggaccaaaaatagatgccttgcaatctttagtagtacatttgtttgttacttggtaattatacgacctgtttggttgtatgcataaggtgacttagattgtcacatattttctggcacaattatttaaggttagatgttcttttacccgatacgaaggtggatacgggattatttctctacccgcggtatgttaatgggtaagaacctctacccgttgggtagacggtacggatacgggttggtactaaccatacctgtctacccgtgggtaaaatatacccgcatcaataccactataaccatctaatagagcagatcttagctaaaataaaacccgtatctagcttttatttgtctagctaccaagttatgtaatcatatgatttgttatatgtgaagttgaacttgttttttatgttta

SEQ ID NO: 17511 - DNA, 2569 bp, Zea Mays
tttttcttttttaaaaagcagtgtagtgacgacactaagctctaaattttagagctataaaatttaaagaacagatcagattaaaattagaccttatttataattatttttaaaataaaaattatttagaaccctattattttgtaataatcatttggatcagtatacgttgtcaccctagctacgacgcctaccgctggagaaaacattgaagcgtcatgtcagcacgcagctgcgcatgcgccagttgcaataaataggccacccaacccaacccaaacccaaggccggccgatgctctcaggcagcctctcgctgtgtcagttcttccgctttgtaattgtagaaggagagtgagctcatcatcaagtcgagacgatgggccgcaccgaggcggcggacgacggcgccgagtccggcgggctgggcctgggggtgggggtgggggtgggggagacagtgcgcgagctgcgggaggcgtacgagagcggcaggacgcggagcctagcgtggcggcaggcgcagctgcggggcctcctccggctcctcgaggagaaggaggtggaggcgttccaggcgctccacaaggacctcggcaagcaccacgccgaggcgtacagggacgaggtcggggtgctcatcaagtccgccaacggcgcgctgcagcagctcggcaaatggatggccccggagaaggtgcgggtcccgctgatcgcttggccggcgaccgcgcaggtggtgccggagccgctcggggtcgtcctcgtcttctcctgctggaacgtccccttgggcctgtcgctggagccgctgatcggggcgatagcggccgggaacgcggtggctctgaagccgtccgagctctcgccgtgcaccgccaggttcctgggcgacaacatcgggaggtacatggactcctcggcggtgaaggtcgtccagggcggccccgacgtcggagtgcagctcatggagcaccgctgggacaaggtcctcttcaccgggagcccccgcatcgcgcgcgccgtgatggccgcggcgtccaggcacctgacgcccgtcgcgctggagctgggcggcaagtgcccctgcatcttcgacgccatgggcagcgcccgggacctgcagatctcggttaaccgcatgatcgcgggcaagtggtcgtcctgcgccggacaggcctgcatcgccatcgactacgtgctcgtcgaggagcgcttcgcgcccatcctgatcaaggtgctcaagtcgacgctgaagaggttcttcccggaagcggaccacatggcacggatcgtgaacgagcgccacttcgagaggctgagtaaccttctcaaagacaggtccgtggcgccgtccgtcctgcacggcggctccatggacagcaagaacttgtacattgagcccacgatactgctgaacccgccgctggactccgcgatcatgaccgaggagatattcgggcccctgctcccgatcatcacggtcaagaacatcgaggacagcatcgccttcgtgaaggccatgccgaagcctctcgccatctacgcgttcacccgggacgccgccctgcggcggcgaatcgtggacgagacgtcgtccgggagcgtcaccttcaacgacgcgtacgcgatagacgggctcccgttcggcggcgtcggccagagcgggttcgggcagtaccatgggaagtactcgttcgagatgttcagccacaagaaggcggtcatgaagcggggctacctcgtggagctgacactcaggtacccgccgtgggacgagagcaaagtcaccctcatgcgctacctctaccgcttcaactacttcgccttcgtcctctctttcctcgggctcaggcgatgaacttcactccagcatcaacgcaaggatcgcacagggattgggcccaatataggcgatgaactggcattgacagtggatggaggaacaagccaatatagacaatatgcagtagatgtcttgtttgtgaggaacatgtgtcatgccgcacttcaaaaccagtaatatgctaacctgcatcctatctatgattgcctctagtgagacaaacagtgaaatgcctttcaatctttagtagtacattggtcgagaccatcatctatcctctgcataaaagtatcaagtgcaaaggaccaaaaatagatgccttgcaatctttagtagtacatttgtttgttacttggtaattatacgacctgtttggttgtatgcataaggtgacttagattgtcacatattttctggcacaattatttaaggttagatgttcttttacccgatacgaaggtggatacgggattatttctctacccgcggtatgttaatgggtaagaacctctacccgttgggtagacggtacggatacgggttggtactaaccatacctgtctacccgtgggtaaaatatacccgcatcaataccactataaccatctaatagagcagatcttagctaaaataaaacccgtatctagcttttatttgtctagctaccaagttatgtaatcatatgatttgttatatgtgaagttgaacttgttttttatgttta

SEQ ID NO: 17512 - DNA, 2051 bp, Zea Mays
ctgatgatctgctacagacctgcatacgatacgtacaggtgtacgcatggcaggattcgtggatcgtgtaaaccggcggagtagagtgttagagagaggtggatcgatcgagtctttagaggtcgtagctctcgcgccgttgcgtttcgtgctgggagaaggaaaggtgtcagcagatcggccagggggtagatggatcgtagatacacacatgcgtacgacatggcagtacatgcgccaccagcccttccttttgtaggctcccctcgcttgctttctctccctgatctctttctgcatctgccgccagtcagccagggcgtcctccctctccgccgggccccgtccctccctccagcctccaccccagtaccccaccacaaaggcacacacactcggccggcctctttgtttttgttacaatattttgtgaccaatccactccaaagagcgcgacggtttctccccaagggacacatcccttggggatgcacctttgcttgtatataaacagaatctcctctgcaataaaggacatcgctgtcatttgtctctctcaatctcgttaccacggagtagattacaacacgttatcagcactgctcgcgagatcagagaagaaaagaagaaagaagctactcttagcggaagattttttttccggcgatgctcccagtgcgcaccggtgattgaccgaggaagcatgaaggctttcaatcataatgcaaaagaacaactaagtgggatgacgccaggcaggaacaaaggatgccgctacacacgccaaaaagaaaaggagaagcatacagcgacgctttattgtccacatctagcactatgaatctacagcaagtctgtaaggatttattatgtgtcaatcgtctcgatgatttcattcatgcaaacaatggaattgctggctacggggcttcgcacgggtgcaagcattggcgtcagggccgctggacgctgggccacgcccgcgcagcgcgctggaaggcctcgcccgcgccatggtcggaggaacactcgccctggccggcagagcccgcgccgggccgccgtgcccgcctggacggggtcgtgcgccggttgccgcgcgctgccggggccgctgccgccgggccgccgtgcccgcctggccggggctgtgcgcccgcgccgaggccgcctgccgtcgacccgagactgcggtcgcgcccacgcctagccaaaagaggacgccgaggccgtgagcaattgggtcgcgcccgcgctcgcgcgtaccatggccgggcggccgcgcccgcgctgcgccatgcgcagccgccacgcccgctcccgcaccggggtcggatccgcagtaccagcgtcgtggctagggccggggacggcgcacctgcgctgtcgaggggctgcgcccgcgcgcccgaggggcctcgcctgctgccgaggccgggggccgccgcgccgggcagcgcgcagggccgctgccgcgccgggacgcctgtgccgccgagagtgccacggggccgcgccagtctgcaccgtgccgccgaggggccgcacgccggtgccgcccgcaccgccaccgggggctgcacccacgagccgtccagggagcctcgcgccgccgcatggggccgcgcgcccgcgcgccgaggcggtccgcgcgccgccgtgagccagggccggcggcggctgtaggaagggaggagcagttagggtttttaccctaactgccacccttaaatggtcggctgggccacccctggccgcctgggccggctgatgggccggctggggaagctgtctagaggactgcctgggctggattcgacctgcatgggctgtcggccgaagcatttaccacttattattttatttactgcaatttcaatcaaaagaacaatgtgttcgttcaattactgttttaaagtatgtctaaattcgaatatttagacagctgatgatatatgtaattgtaaatacttgtctgttttattataaaataatacagacttgatagtgaattatattttatttacatttataatccacatatattcgac

SEQ ID NO: 17513 - DNA, 622 bp, Zea Mays
accgcacctaacacgaagattccgccgtaaggaaagcaccgggcggatcggaagggaacgtaccggattgaaccgagccggcgggcgatcggatccggagatggagcctggcggggggcgggggcgcgggcgcctgcctccctgcggcggatcgaaggggcgtcctcctggacttgtggttgggagcaggccggcggcggcggcggtggtgggaggtcgggtggtaggatagctgtggggtgccgcggccgcgagatggcgagagaggcctctgcccgcgcgcgacgcggtggcgacaggggagcaggagtgtcaggacgtgcgtcggtcgattcgatgggttttagcgaggggaaggagcggggacgggagggaacggcgtgccggacacgaggcggcgtcccgtctgttggggttggggggttggagacttggaggtagctgccctgccctgccctgcttgagggccggtgcggtgggacacgggtgtgggacttgagaggaaggaccggagccgaaggggaggcagaaggcagccaggcagaaggtgggttgggaggggtggtgtggtggcggcgcccgtccgttttgctttcttctcctttttctcgtttgctctgta

SEQ ID NO: 17514 - DNA, 1209 bp, Zea Mays
ctatgttttttcagttcagatatgcacaaaaattgaaattatagaagatatccaacaagttgcaacaaagccatgaacaagtatatgctaagcttagaaacttcaagttggaaaaggaaaatcattagaagttcaagaagaaactgtatcagaaaatagttaaatgtagctactcaaaccactagttgtttatactttacaattttgcatacatagacatcaaaattaccttaaatataggttcagctttctcatggaaaactttacttgatctaccatgtccagatcgagggttcaatataacaagtactctttgcggagatttgcatttaatcggtggctggtcaaataaagactcactgaggggattttctgagtcttgattgatactagatgctccaaggcgaggtagtaagttaacatatatactttgttcagcaaagcatgtcacccacaaaatggcctcgtcaagggtagaggctataaagcagaaatctttctgaactctgcatgtctttttaaataaagactttttagttgagtatgcatgcaatgtaaaatgtttgactccagaattatatgatacctgccaaaatataagcagagacaaaatatcagtaaagtgatgaaaaagatctaattaataatacagacacatgttattatctgacttacagagacaacatcctccagtaggagtacagagctgccccagatcagagctttacttgtgagtctagcatcaattgcatcagcttttccgtttgacggtaactgattattatcactcgcacttctatttttcttttgaagaatcagctttccagcatacacttcataacctagaaaattggacctctcatctgccacgtcaattttgtggtcatgttttttcccttttttagcctctttgtcgtcaataaccaagtgtttctgccttgaagatttcgatttgcttcttttctcttgagcaccggtcaaagaatgctgtccagctgacttttgagaacgcctactactcgaacgtcggctagatttctgggatgagcttctagaagtaggattttcaagctcggatccatccatttctgactgttagatagcacttcagaacactgattcaggcaatgaattccaaatagcttcaggaatggaggaggcatcacggatccaacgccatatgagaaggtcagtataattaagtaaact

SEQ ID NO: 17515 - DNA, 50 bp, Zea Mays
agattttgcatgcccagcatgagtagttttaacaacttccatctgaaaac

SEQ ID NO: 17516 - DNA, 1054 bp, Zea Mays
ggccgcggccggccctagaggtggctgctccgacggctgtacaagtgagctcgtccggctcgagtgaggaagggagcgatgaggaggggaacgagggatccggtgacggtgcgagtagcccgggcggctctgccagcaagtataaggcggcggagagtgaaggcgaggcggagggcccatgccttcctagttgccccatttgtatggtcgcgtggaccgccgatggtgcgcatcgcgtgaggtgaggaggaattgtatatgtcagcgattttgtgggtttgcggaccaacttgttgtctcgcgtggttcacaacttctaatgatcagctgatctagtaaagtgtataggttgaatacctcaaaagatatgcagaacgcacaagatattgaagggtacacgttgcacgggtactggcgaaaccacgcaagaactgaagggcaatcaaaaccagacttcccgccacgccgaagtgggactaaattactctattgaatatatataagcaaaatcaacataattaaacagaatcagcatatcatcctataaccgctcaaatatacagaaacctcacaacattgcttctggttcaaactctcaacatttgcaacaccaacccaagcttaatcccatcagaaagtatagttatataaacatttgttagaagtggaaagaaccccaggatccatgaaattcaacacagcgcttaaatagattgtctacatcgccggccaatcagtctgcattgctccggaagcagggagcagagtacctgtcccttgacacggcaaagctcgccatctatgccacagccattgtgagtgtttgcaccaggtttaagcttaactgacttcacctgtgtcagtgttaaggtcgaatcagcatcattataggaaaaccagctttcgggaaaaacaaacaaacaggacagcttcattcagaaactaacgctcttatttaacgaagctcagtggcggtccatgactagagcggatgtaaatactactaaacagacctcacagcatagcctaagaaggaaaacagagtggaaatatg

SEQ ID NO: 17517 - DNA, 690 bp, Zea Mays
attttttttactcgacgatattattctcgacaaaaagactatctagactacattaagaatcgtacagaatcacaaagtttcctctttgcaagcagccatacatacgtacacgccattagattgtttaacctcgaaacacaactaaaaaaaaggcctcaacaagccgcgcaactctctaccatcgcgggcgcctatgaacaaataccatcgatttctgcagtatcgaaagcagtattggcactgggtgatttgcctccaaactcagaaagttgcctttacttcgatcgcgctccgaatcccgtactgcctgcctgcctgcctgcctgctggcccatcccgccgttggcgcacagcgccccgtacgttctctccatcaattccgttgagagcaccatggcatggcagcgtgcacgtacgtttcacacacacaagccttaagcctatgtgctggcatctccatttcaggccaccgcgttccactccacaagcggccaggactcccacagctccggcatggcgcagtaggagtccgggaacccgtcgccgtagtcaaggcggtggtcgtcgcactcggactccaccgaaacgtccgccggcgtcgcgcacgacccgacgagcccacagctctcttgcggctcatgtgacggcgacgcaccccaggccgagggcggcgacgttcccttgtcgttc

SEQ ID NO: 17518 - DNA, 388 bp, Zea Mays
cgacttcgtccatcttgtcgcccaacagcctctcacactctgaaggaggtgcttagcatcttcaacttctacagtttggctttcctctgtccaggtgataggggctaacagacagcagttggattaggaacggcgttggcgttgtgtccggagtcttacgtaaaggaagtaaaatgcacatatccaacaatggcaatggataggcacctgcaagggccagttcctttgcttctgcatactcccttgacaatttcttgatgctgtcaagctcgaactcatcagtcatcaccctacaggaagatgaataaatcagtaacagaagcgtaccctgcatgatgtttgtagtatactagaattgaacagcgccctatcggaggctataattttt

SEQ ID NO: 17519 - DNA, 2995 bp, Zea Mays
cccacctcaacctcacctgccactgccatcctttctcacactcgcgcaccggcgcgcgtccgctgcccgcaccccgtcccgttgtactgcagggcggagcctcgctcgccttttgtactgcacgcccacgcgtccacacgcgcgcgcggcccggacctggctacgaagcgcaggcagtacagacagcaccgcctggtttgagcggctgccgccgctgcatatactccctccctgccttccagtgccaggggtgaccggcgtgcgtgccattccacgctctcgcggctcgtgtgccagcggtgaccagcgctcgtgctcgtccagtccaccaggcgctgctgttccggcaagccagccagcagcagccgccgccgccgccgtctcggagctcgagctcctagtcccccggggccgaggcgccggcgccatggaccagctccggcccgagccggccgcgggcgcgcacgagatcgagaagacggcggcgccggacgtggagtcggagcccgcggcggcggtgccggagccggagcgcgtgccgccgtggcgcgagcaggtcaccgcgcgcgggatggtggcggcgctgctcatcggcttcgtctacacggtgatcgtcatgaagctgagcctcaccacggggctcacccccaccatgaacgtctccgccgcgctgctcgccttcctggcgctccgcggatggacgcgcgccctcggccgcctaggcattgcatgccgccccttcacccgccaggagaacaccgtcgtgcagacctgcgtcgtcgcctgctacaccatagggttcggcggtgggttcgggtcgttcctgctgggcctggacaagaagacgtacgagctctccggggtgagcacgccgggcaacgtgccggggagctacagggagcctgccatcggctggatgaccggattcctcctcgccgtcagcttcgtggggctcctcaccttgcttccactcagaaaggtgctcgtcatcgactacaaactcacttatccaagtggaacagccaccgcggttctcataaacggattccacacacctcaaggagataagaatgcaaagtccgtggattcctcaagtacttcgggatcagcttcctgtggagcttcttccagtggttctacaccgccggcgaccactgcggattcgcccagttccctactttcgggctccaggcttttaaccagacgtagtcattgttgcctttctcgttgttgttgtttttttcttctttatgtttcagcgtagtacaaaggcagcaaaaaggttcacctttctgggccctttgaaccgtcaggttttccttcgacttcagcctgacgtacgttggtgctgggatgatctgctcgcacctcgtcaacctctcgttgctgttcggtgccgtcgtttcctggggcgtcatgtggccactcatcggcaagcagaagggcaactggtatccggcagatgcatctcagaatagcatgacaggcatctacgggtacaaggtaaactggtgggttcaccagtgcttactacagctagcgtagcttcaattctcaaccccgatccccattcgatcaggccttcctttgcattgcccttctcgtgggagacggtctctacaacttcgtcaaagtcatagctatcactgtcaagaacatacgcgagagatcacgtcgcaagaacctgaacagaggtaattgggaaattacccttccccttcttccaaccaagcccttactatatcgggagttggaatttatactgcgcagtggcggacgcggacacgatggcgctggacgacatgcagcgcgacgaggtgttcaacagggacaacatcccgacgtggctgtcctacgcggggtacgcggcgctgagcctgatcgcggtgatcgccatcccgatcatgttccgggaggtgaggtggtactacgtggtggtggcgtacgcgctggcgccggcgctggggttctgcaacgcgtacgggaccgggctgacggacatgaacatggggtacaactacgggaaggtcgcgctgttcgtgctggcggcgtgggcggggaaggacagcggcgtggtggccgggctggtggggtgcgggctggtgaagcagctggtgctcgtgtcggccgacctgatgcacgacttcaagacggggcacctgacgctgacgtcgccgcggtcgatgctggtggggcaggccgtgggcacgctgatggggtgcgtcctggcgccgctcaccttcatgctcttctacagggcgttcgacgtgggcgagccggacgggtactggaaggccccctacgcgctcatctaccgcaacatggccatcctcggcgtggagggcttctcggcgctgcccaggcactgcctgcagctgtgcgcggggttcttcgcgttcgcggtgctggcgaacctggcgcgggacctgctgccgcgccggctcgcgcggctcgtgccgctgcccatggccatggccgtgccgttcctcgtgggcgccagcttcgccgtcgacatgtgcgtggggagcctcgtggtgttcgcgtggcacaagctcgacggcaagaaggccgcgctgctggtgccggccgtcgcctcggggctcatctgcggcgacgggatctggacgttcccgtcgtctctgctcgcgctggccaaggtcaagccgcccatctgcatgaagttcacgccagggagctagagggcgcgctgacgatgcgtacagaacagagggcatcgttcgtcgtttgtggggtggaatccgtgtagtagaattacataccaaccaggcctgttctaatgtccatatgagcttaatgtacggtgtatatatatgtaaaaatggaaatctgaaggatgacaggatgaattgcctgttgtctagtagcacgcatattattattattatagcatagcactaagagcaagtccaatagactcggtaaacagtctctgctcggtaaaaaaatgaaaatcgtcgtgaaaacaaattccaag

SEQ ID NO: 17520 - DNA, 2551 bp, Zea Mays
cccacctcaacctcacctgccactgccatcctttctcacactcgcgcaccggcgcgcgtccgctgcccgcaccccgtcccgttgtactgcagggcggagcctcgctcgccttttgtactgcacgcccacgcgtccacacgcgcgcgcggcccggacctggctacgaagcgcaggcagtacagacagcaccgcctggtttgagcggctgccgccgctgcatatactccctccctgccttccagtgccaggggtgaccggcgtgcgtgccattccacgctctcgcggctcgtgtgccagcggtgaccagcgctcgtgctcgtccagtccaccaggcgctgctgttccggcaagccagccaggattggatattttccgccaatcggattctggtgacatatacgttagcgtttgaggatccccatttgggaaatttcggtttccattgcaaaactgaataaaaaatatatccaagagaagaaagaaggccaaaggttatggatttttaataatccgagatccatccgacaactcacgcgcctctgcatctgtccaagtccaatgcacgagcacatggatggcgtagtggcatggtctggttctttttttttttgtgtgaacaaacaaatgaactcacatctacgcctccatactgcagcagcagccgccgccgccgccgtctcggagctcgagctcctagtcccccggggccgaggcgccggcgccatggaccagctccggcccgagccggccgcgggcgcgcacgagatcgagaagacggcggcgccggacgtggagtcggagcccgcggcggcggtgccggagccggagcgcgtgccgccgtggcgcgagcaggtcaccgcgcgcgggatggtggcggcgctgctcatcggcttcgtctacacggtgatcgtcatgaagctgagcctcaccacggggctcacccccaccatgaacgtctccgccgcgctgctcgccttcctggcgctccgcggatggacgcgcgccctcggccgcctaggcattgcatgccgccccttcacccgccaggagaacaccgtcgtgcagacctgcgtcgtcgcctgctacaccatagggttcggcggtgggttcgggtcgttcctgctgggcctggacaagaagacgtacgagctctccggggtgagcacgccgggcaacgtgccggggagctacagggagcctgccatcggctggatgaccggattcctcctcgccgtcagcttcgtggggctcctcaccttgcttccactcagaaaggtgctcgtcatcgactacaaactcacttatccaagtggaacagccaccgcggttctcataaacggattccacacacctcaaggagataagaatgcaaaaattcaggtccgtggattcctcaagtacttcgggatcagcttcctgtggagcttcttccagtggttctacaccgccggcgaccactgcggattcgcccagttccctactttcgggctccaggcttttaaccagacgttttccttcgacttcagcctgacgtacgttggtgctgggatgatctgctcgcacctcgtcaacctctcgttgctgttcggtgccgtcgtttcctggggcgtcatgtggccactcatcggcaagcagaagggcaactggtatccggcagatgcatctcagaatagcatgacaggcatctacgggtacaaggccttcctttgcattgcccttctcgtgggagacggtctctacaacttcgtcaaagtcatagctatcactgtcaagaacatacgcgagagatcacgtcgcaagaacctgaacagagggcgttcgacgtgggcgagccggacgggtactggaaggccccctacgcgctcatctaccgcaacatggccatcctcggcgtggagggcttctcggcgctgcccaggcactgcctgcagctgtgcgcggggttcttcgcgttcgcggtgctggcgaacctggcgcgggacctgctgccgcgccggctcgcgcggctcgtgccgctgcccatggccatggccgtgccgttcctcgtgggcgccagcttcgccgtcgacatgtgcgtggggagcctcgtggtgttcgcgtggcacaagctcgacggcaagaaggccgcgctgctggtgccggccgtcgcctcggggctcatctgcggcgacgggatctggacgttcccgtcgtctctgctcgcgctggccaaggtcaagccgcccatctgcatgaagttcacgccagggagctagagggcgcgctgacgatgcgtacagaacagagggcatcgttcgtcgtttgtggggtggaatccgtgtagtagaattacataccaaccaggcctgttctaatgtccatatgagcttaatgtacggtgtatatatatgtaaaaatggaaatctgaaggatgacaggatgaattgcctgttgtctagtagcacgcatattattattattatagcatagcactaagagcaagtccaatagactcggtaaacagtctctgctcggtaaaaaaatgaaaatcgtcgtgaaaacaaattccaag

SEQ ID NO: 17521 - DNA, 2255 bp, Zea Mays
cccacctcaacctcacctgccactgccatcctttctcacactcgcgcaccggcgcgcgtccgctgcccgcaccccgtcccgttgtactgcagggcggagcctcgctcgccttttgtactgcacgcccacgcgtccacacgcgcgcgcggcccggacctggctacgaagcgcaggcagtacagacagcaccgcctggtttgagcggctgccgccgctgcatatactccctccctgccttccagtgccaggggtgaccggcgtgcgtgccattccacgctctcgcggctcgtgtgccagcggtgaccagcgctcgtgctcgtccagtccaccaggcgctgctgttccggcaagccagccagcagcagccgccgccgccgccgtctcggagctcgagctcctagtcccccggggccgaggcgccggcgccatggaccagctccggcccgagccggccgcgggcgcgcacgagatcgagaagacggcggcgccggacgtggagtcggagcccgcggcggcggtgccggagccggagcgcgtgccgccgtggcgcgagcaggtcaccgcgcgcgggatggtggcggcgctgctcatcggcttcgtctacacggtgatcgtcatgaagctgagcctcaccacggggctcacccccaccatgaacgtctccgccgcgctgctcgccttcctggcgctccgcggatggacgcgcgccctcggccgcctaggcattgcatgccgccccttcacccgccaggagaacaccgtcgtgcagacctgcgtcgtcgcctgctacaccatagggttcggcggtgggttcgggtcgttcctgctgggcctggacaagaagacgtacgagctctccggggtgagcacgccgggcaacgtgccggggagctacagggagcctgccatcggctggatgaccggattcctcctcgccgtcagcttcgtggggctcctcaccttgcttccactcagaaaggtgctcgtcatcgactacaaactcacttatccaagtggaacagccaccgcggttctcataaacggattccacacacctcaaggagataagaatgcaaaaattcaggtccgtggattcctcaagtacttcgggatcagcttcctgtggagcttcttccagtggttctacaccgccggcgaccactgcggattcgcccagttccctactttcgggctccaggcttttaaccagacgttttccttcgacttcagcctgacgtacgttggtgctgggatgatctgctcgcacctcgtcaacctctcgttgctgttcggtgccgtcgtttcctggggcgtcatgtggccactcatcggcaagcagaagggcaactggtatccggcagatgcatctcagaatagcatgacaggcatctacgggtacaaggccttcctttgcattgcccttctcgtgggagacggtctctacaacttcgtcaaagtcatagctatcactgtcaagaacatacgcgagagatcacgtcgcaagaacctgaacagagggcgttcgacgtgggcgagccggacgggtactggaaggccccctacgcgctcatctaccgcaacatggccatcctcggcgtggagggcttctcggcgctgcccaggcactgcctgcagctgtgcgcggggttcttcgcgttcgcggtgctggcgaacctggcgcgggacctgctgccgcgccggctcgcgcggctcgtgccgctgcccatggccatggccgtgccgttcctcgtgggcgccagcttcgccgtcgacatgtgcgtggggagcctcgtggtgttcgcgtggcacaagctcgacggcaagaaggccgcgctgctggtgccggccgtcgcctcggggctcatctgcggcgacgggatctggacgttcccgtcgtctctgctcgcgctggccaaggtcaagccgcccatctgcatgaagttcacgccagggagctagagggcgcgctgacgatgcgtacagaacagagggcatcgttcgtcgtttgtggggtggaatccgtgtagtagaattacataccaaccaggcctgttctaatgtccatatgagcttaatgtacggtgtatatatatgtaaaaatggaaatctgaaggatgacaggatgaattgcctgttgtctagtagcacgcatattattattattatagcatagcactaagagcaagtccaatagactcggtaaacagtctctgctcggtaaaaaaatgaaaatcgtcgtgaaaacaaattccaag

SEQ ID NO: 17522 - DNA, 2936 bp, Zea Mays
cccacctcaacctcacctgccactgccatcctttctcacactcgcgcaccggcgcgcgtccgctgcccgcaccccgtcccgttgtactgcagggcggagcctcgctcgccttttgtactgcacgcccacgcgtccacacgcgcgcgcggcccggacctggctacgaagcgcaggcagtacagacagcaccgcctggtttgagcggctgccgccgctgcatatactccctccctgccttccagtgccaggggtgaccggcgtgcgtgccattccacgctctcgcggctcgtgtgccagcggtgaccagcgctcgtgctcgtccagtccaccaggcgctgctgttccggcaagccagccaggtgagggatccagatcggcctctgcgtgccatgcgtggtctccgctctccagcccgcgtcgagaaattcgatcctttttggctcggttctggctgtcctgtgcgtcagttctgcgtttccgtgtctgttatcgtcatagtccgttctgttttttttttccttctgtttcccacacctgtgttcctgttcctgtcctgctggagtgatttatggcatcgtttgcgtggttttcaattcaggattggatattttccgccaatcggattctggtgacatatacgttagcgtttgaggatccccatttgggaaatttcggtttccattgcaaaactgaataaaaaatatatccaagagaagaaagaaggccaaaggttatggatttttaataatccgagatccatccgacaactcacgcgcctctgcatctgtccaagtccaatgcacgagcacatggatggcgtagtggcatggtctggttctttttttttttgtgtgaacaaacaaatgaactcacatctacgcctccatactgcagcagcagccgccgccgccgccgtctcggagctcgagctcctagtcccccggggccgaggcgccggcgccatggaccagctccggcccgagccggccgcgggcgcgcacgagatcgagaagacggcggcgccggacgtggagtcggagcccgcggcggcggtgccggagccggagcgcgtgccgccgtggcgcgagcaggtcaccgcgcgcgggatggtggcggcgctgctcatcggcttcgtctacacggtgatcgtcatgaagctgagcctcaccacggggctcacccccaccatgaacgtctccgccgcgctgctcgccttcctggcgctccgcggatggacgcgcgccctcggccgcctaggcattgcatgccgccccttcacccgccaggagaacaccgtcgtgcagacctgcgtcgtcgcctgctacaccatagggttcggcggtgggttcgggtcgttcctgctgggcctggacaagaagacgtacgagctctccggggtgagcacgccgggcaacgtgccggggagctacagggagcctgccatcggctggatgaccggattcctcctcgccgtcagcttcgtggggctcctcaccttgcttccactcagaaaggtgctcgtcatcgactacaaactcacttatccaagtggaacagccaccgcggttctcataaacggattccacacacctcaaggagataagaatgcaaaaattcaggtccgtggattcctcaagtacttcgggatcagcttcctgtggagcttcttccagtggttctacaccgccggcgaccactgcggattcgcccagttccctactttcgggctccaggcttttaaccagacgttttccttcgacttcagcctgacgtacgttggtgctgggatgatctgctcgcacctcgtcaacctctcgttgctgttcggtgccgtcgtttcctggggcgtcatgtggccactcatcggcaagcagaagggcaactggtatccggcagatgcatctcagaatagcatgacaggcatctacgggtacaaggccttcctttgcattgcccttctcgtgggagacggtctctacaacttcgtcaaagtcatagctatcactgtcaagaacatacgcgagagatcacgtcgcaagaacctgaacagagtggcggacgcggacacgatggcgctggacgacatgcagcgcgacgaggtgttcaacagggacaacatcccgacgtggctgtcctacgcggggtacgcggcgctgagcctgatcgcggtgatcgccatcccgatcatgttccgggagggcgttcgacgtgggcgagccggacgggtactggaaggccccctacgcgctcatctaccgcaacatggccatcctcggcgtggagggcttctcggcgctgcccaggcactgcctgcagctgtgcgcggggttcttcgcgttcgcggtgctggcgaacctggcgcgggacctgctgccgcgccggctcgcgcggctcgtgccgctgcccatggccatggccgtgccgttcctcgtgggcgccagcttcgccgtcgacatgtgcgtggggagcctcgtggtgttcgcgtggcacaagctcgacggcaagaaggccgcgctgctggtgccggccgtcgcctcggggctcatctgcggcgacgggatctggacgttcccgtcgtctctgctcgcgctggccaaggtcaagccgcccatctgcatgaagttcacgccagggagctagagggcgcgctgacgatgcgtacagaacagagggcatcgttcgtcgtttgtggggtggaatccgtgtagtagaattacataccaaccaggcctgttctaatgtccatatgagcttaatgtacggtgtatatatatgtaaaaatggaaatctgaaggatgacaggatgaattgcctgttgtctagtagcacgcatattattattattatagcatagcactaagagcaagtccaatagactcggtaaacagtctctgctcggtaaaaaaatgaaaatcgtcgtgaaaacaaattccaag

SEQ ID NO: 17523 - DNA, 3884 bp, Zea Mays
cagaaaaggaacaaacaaaaagataaaggtctatagaccataaacaaaaatggctacaaccaagcaaaaagtatggctcactagaccacatacttcactataatctatagacaatgcactaagaaattcactgtcaagttgaatagtggtgagtgcacataattttaagtcgatactcgatacttaagacttttgtatgatcaatgaacgacagggcatgtttctttgatagtagtacaaaagataaaggtataagctttctgtaatttgacaaagttattacatagactgtataccgggcttgtttggatacaggggctcattgttttcagatcggctgactaatcgcgattagtcgggctgattgtttctctgtgctcgattagggtgttggactcgattagtgtaactgatcgtccatatcatccgatttctcgaagacctcttgtacttttctttgcttatatgactcttcagtcatcatacttgagagcttattgtgttctgaaaatgaaaagtgatgtgactaggatatatccaaatgtcactctctcccttaccagagatttaggactctggtaattattttatgaaaccatacgcaatatgccttactgccatgatgactttctttatccctttgggtttctctctgaaattatgtcctggttgtgaaacaagaaaatgcagacataccgtttcttgttactactaacaccagctggtatgttctttcaaaaaaaagtggtacatagttttactttgaaaagtgagctgcacaatcattattgtaaataggacatatagaagagaacgaaaaacagctctgaaattcaccatgccacgccacacttcgcgcgccgcagttgtggcggccgaatcggccgcgacaccttaggcggggtgtggtgctggacgtcagcgtccaaacaggccctcagtcagtcattgatgtgcaccattttgatggcataagtgatttgtttatgtcttgcatcatagtactataaatctgattcttagaattcagtcatatatcagtcatcatggcctcatatgttctcaacggaagccatttaggagcaacagtaagaaccattgcaattggttcattatgtagtacttgaaatccacgatttctattatgaaaaaatacagccaaatttgagggatagttacacatcgaggctttttgaacgctactcttctggcttcctcctggtatgcccctatccacttcctccattccgcctttcagaggaaagcatttgccttttggccctttgattattgtgtggtttcaaattaatttattcattcatagcttcctaggtcgaaggtaaatagaaagtcgttggtttttgttaaacctggattgttatggctatcgatgttacttggacctctggtactaggctcctcatattccgctcactagatttctgatgttgattcaatttccttccattcaataaaatccatgtgtgtgattgttgtcctatgttaatttgaggccaaggaagtgaatgggtgaaaatgattttgtctattatcacatgatttggttttttacagcatactcttatagcccacctgtaattcatcagcatggattgattatgtgcctctctattttgttgtatcagttatgaagtttaaataaacattgaatccatgttcttgcacactttttgtaatgttcaaccaaaaaatctgcttcaaatatgttcagcaagacagaagttaataggttacattcagctttttcagttggtaatgttcacaacaacaaaaaggatgtattcagttttttcagtccttttctgttcagttcttaaccacttgtagttgcctatttggtaatgtttaagttcccatgaccgatctggcagtgcagttaaatttatgggttcttttagagccatggattagattaatgtacgttgtccacaaactcttaacaccgacaaactatccttcaagaggcgctaggcaaggaggtgagtaatacctattacctcgtgctccatccaaatcccaaaagtgtaactcctctacagctagcaccaacacatgattgttttgtgcaaatgtttaggtgtgttaaatgattatgagcaatagtctgatttgatggttgagttattttcagatattaagatagtttaccttttaacgttatcaacacattgatatgctacatgatctctgtccgtgcaatcttttgatatgttacagaatgcactattcctaattgcttagttgaagcatcctgcagatcaaggtagaggatatggatgcgtatgcccctaaagatcttttggttgtcactacaggttcacaaggagagccacgtgcagctttgaatcttgcatcttatgggggaagtcacactcttaaactatcaaaagaggatgtccttctttattcagctaaggttattcctggaaatgagacacgggtaatgaagatgatgaatcgtctcactgatcttggcccaaaaattatcatgggtaaagattctggcctgcatacctctgggcatgcctaccgagaggagctggaggaagttcttcggattgttaaaccacaacatttcttgcctgttcatggagaactcctatttctcaaagaacatgaatcacttggaagatcaactggcatacggcacacaactgtaataaaaaatggagaaatgcttggtgtatcgcatctaagaaacagaagagttttgtccaatgggtttgtttcattagggaaggaggatctttagcatggagatcttccgacctcagaaggaacatggtttagcgcagactggtttgaaaggaaaatttaagattactacaagatgtctatggcttgataatggaagattgttggacgcactctacaaagcagctcatgctgcattgttaagttgtcctatgaattgtccacttagtcacatggagaggatggtagctgaaatcttgaggaaaatggtacggaagtatagtgagaagaggcctgatgtcattgcggttgctatggagaacaccacagcaagtttctcagaacacctcgatgctaaatcatctggaaattttgaaccttcctcagctactagccatctgagcaggagtccagctatgagtcttgaaggcagttataaaacacacccagacaacccagaggtggatgctgaagaagcccttcctgaggccacgagaacagcactggatgatgcaaccacactgttatgcatctatcatgcataatggataatatccgatgttatgtttctttcaccagtggaaatttgctcatgttacattcagtaagccggaatacctccaagatttagatattgtaatgaacagattccatagacctgtttatggaggttgggaacaacaccttggattggagcatacaaccactaccccaaaaaggtcctacttaggcaacaaccagagcaattacagaaccaccattcttttgagaagcctatgaagatttacaactaaagctgggaatactttttacaagtgatgaatggatatgaaggcagccttgttccaaaagcagtcttttggtgatgtacatagagcttttgcatagagtagtttatgtggcagttatctcaagaattttcatctggtggatgtacagggttcgtatagcaacatttccttgtagaaagttgaagttgtatatcgagggtggatttacctgtgtttatcttttcgaccctaagcctctgggaagctgtgaaccatagcctcatgaaatatgcctgttgttgattcagtgtttgtgtttttcttgtttgtcattattttgtactcgcttttaatataacacacattttgtatataagttactgtggtattatatgttct

SEQ ID NO: 17524 - DNA, 4229 bp, Zea Mays
cagaaaaggaacaaacaaaaagataaaggtctatagaccataaacaaaaatggctacaaccaagcaaaaagtatggctcactagaccacatacttcactataatctatagacaatgcactaagaaattcactgtcaagttgaatagtggtgagtgcacataattttaagtcgatactcgatacttaagacttttgtatgatcaatgaacgacagggcatgtttctttgatagtagtacaaaagataaaggtataagctttctgtaatttgacaaagttattacatagactgtataccgggcttgtttggatacaggggctcattgttttcagatcggctgactaatcgcgattagtcgggctgattgtttctctgtgctcgattagggtgttggactcgattagtgtaactgatcgtccatatcatccgatttctcgaagacctcttgtacttttctttgcttatatgactcttcagtcatcatacttgagagcttattgtgttctgaaaatgaaaagtgatgtgactaggatatatccaaatgtcactctctcccttaccagagatttaggactctggtaattattttatgaaaccatacgcaatatgccttactgccatgatgactttctttatccctttgggtttctctctgaaattatgtcctggttgtgaaacaagaaaatgcagacataccgtttcttgttactactaacaccagctggtatgttctttcaaaaaaaagtggtacatagttttactttgaaaagtgagctgcacaatcattattgtaaataggacatatagaagagaacgaaaaacagctctgaaattcaccatgccacgccacacttcgcgcgccgcagttgtggcggccgaatcggccgcgacaccttaggcggggtgtggtgctggacgtcagcgtccaaacaggccctcagtcagtcattgatgtgcaccattttgatggcataagtgatttgtttatgtcttgcatcatagtactataaatctgattcttagaattcagtcatatatcagtcatcatggcctcatatgttctcaacggaagccatttaggagcaacagtaagaaccattgcaattggttcattatgtagtacttgaaatccacgatttctattatgaaaaaatacagccaaatttgagggatagttacacatcgaggctttttgaacgctactcttctggcttcctcctggtatgcccctatccacttcctccattccgcctttcagaggaaagcatttgccttttggccctttgattattgtgtggtttcaaattaatttattcattcatagcttcctaggtcgaaggtaaatagaaagtcgttggtttttgttaaacctggattgttatggctatcgatgttacttggacctctggtactaggctcctcatattccgctcactagatttctgatgttgattcaatttccttccattcaataaaatccatgtgtgtgattgttgtcctatgttaatttgaggccaaggaagtgaatgggtgaaaatgattttgtctattatcacatgatttggttttttacagcatactcttatagcccacctgtaattcatcagcatggattgattatgtgcctctctattttgttgtatcagttatgaagtttaaataaacattgaatccatgttcttgcacactttttgtaatgttcaaccaaaaaatctgcttcaaatatgttcagcaagacagaagttaataggttacattcagctttttcagttggtaatgttcacaacaacaaaaaggatgtattcagttttttcagtccttttctgttcagttcttaaccacttgtagttgcctatttggtaatgtttaagttcccatgaccgatctggcagtgcagttaaatttatgggttcttttagagccatggattagattaatgtacgttgtccacaaactcttaacaccgacaaactatccttcaagaggcgctaggcaaggaggtgagtaatacctattacctcgtgctccatccaaatcccaaaagtgtaactcctctacagctagcaccaacacatgattgttttgtgcaaatgtttaggtgtgttaaatgattatgagcaatagtctgatttgatggttgagttattttcagatattaagatagtttaccttttaacgttatcaacacattgatatgctacatgatctctgtccgtgcaatcttttgatatgttacagaatgcactattcctaattgcttagttgaagcatcctgcagatcaaggtagaggatatggatgcgtatgcccctaaagatcttttggttgtcactacaggttcacaaggagagccacgtgcagctttgaatcttgcatcttatgggggaagtcacactcttaaactatcaaaagaggatgtccttctttattcagctaaggttattcctggaaatgagacacgggtaatgaagatgatgaatcgtctcactgatcttggcccaaaaattatcatgggtaaagattctggcctgcatacctctgggcatgcctaccgagaggagctggaggaagttcttcggattgttaaaccacaacatttcttgcctgttcatggagaactcctatttctcaaagaacatgaatcacttggaagatcaactggcatacggcacacaactgtaataaaaaatggagaaatgcttggtgtatcgcatctaagaaacagaagagttttgtccaatgggtttgtttcattagggaaggaggatctttaggtgaaccatttattttacacgtcgtttttttatgtcttttgcagttatgatatctaacatgatatatgatattacagctcatgtatagtgatggtgataaggcttttggtacatccactgatctctgcattgacgagagactaagaatcgcatctgatggcattatttttgtcaagtagcttcttgtacagttttggagtattttctaggtttatcttcagcaaaaatttctcctcgcatgtgaaatgatagtgatttatgtcgaaccttgtgatagtcaaaatggtaaaccatatatagtattgttcggtgcacctaaacattttacatgttactcctttgcagcatggagatcttccgacctcagaaggaacatggtttagcgcagactggtttgaaaggaaaatttaagattactacaagatgtctatggcttgataatggaagattgttggacgcactctacaaagcagctcatgctgcattgttaagttgtcctatgaattgtccacttagtcacatggagaggatggtagctgaaatcttgaggaaaatggtacggaagtatagtgagaagaggcctgatgtcattgcggttgctatggagaacaccacagcaagtttctcagaacacctcgatgctaaatcatctggaaattttgaaccttcctcagctactagccatctgagcaggagtccagctatgagtcttgaaggcagttataaaacacacccagacaacccagaggtggatgctgaagaagcccttcctgaggccacgagaacagcactggatgatgcaaccacactgttatgcatctatcatgcataatggataatatccgatgttatgtttctttcaccagtggaaatttgctcatgttacattcagtaagccggaatacctccaagatttagatattgtaatgaacagattccatagacctgtttatggaggttgggaacaacaccttggattggagcatacaaccactaccccaaaaaggtcctacttaggcaacaaccagagcaattacagaaccaccattcttttgagaagcctatgaagatttacaactaaagctgggaatactttttacaagtgatgaatggatatgaaggcagccttgttccaaaagcagtcttttggtgatgtacatagagcttttgcatagagtagtttatgtggcagttatctcaagaattttcatctggtggatgtacagggttcgtatagcaacatttccttgtagaaagttgaagttgtatatcgagggtggatttacctgtgtttatcttttcgaccctaagcctctgggaagctgtgaaccatagcctcatgaaatatgcctgttgttgattcagtgtttgtgtttttcttgtttgtcattattttgtactcgcttttaatataacacacattttgtatataagttactgtggtattatatgttct

SEQ ID NO: 17525 - DNA, 1996 bp, Zea Mays
gttcatggactttgatgagaccaaaagtatgtgcatcgctgaagcaaaagatcaaggtagaggatatggatgcgtatgcccctaaagatcttttggttgtcactacaggttcacaaggagagccacgtgcagctttgaatcttgcatcttatgggggaagtcacactcttaaactatcaaaagaggatgtccttctttattcagctaaggttattcctggaaatgagacacgggtaatgaagatgatgaatcgtctcactgatcttggcccaaaaattatcatgggtaaagattctggcctgcatacctctgggcatgcctaccgagaggagctggaggaagttcttcggattgttaaaccacaacatttcttgcctgttcatggagaactcctatttctcaaagaacatgaatcacttggaagatcaactggcatacggcacacaactgtaataaaaaatggagaaatgcttggtgtatcgcatctaagaaacagaagagttttgtccaatgggtttgtttcattagggaaggaggatctttaggtgaaccatttattttacacgtcgtttttttatgtcttttgcagttatgatatctaacatgatatatgatattacagctcatgtatagtgatggtgataaggcttttggtacatccactgatctctgcattgacgagagactaagaatcgcatctgatggcattatttttgtcaagtagcttcttgtacagttttggagtattttctaggtttatcttcagcaaaaatttctcctcgcatgtgaaatgatagtgatttatgtcgaaccttgtgatagtcaaaatggtaaaccatatatagtattgttcggtgcacctaaacattttacatgttactcctttgcagcatggagatcttccgacctcagaaggaacatggtttagcgcagactggtttgaaaggaaaatttaagattactacaagatgtctatggcttgataatggaagattgttggacgcactctacaaagcagctcatgctgcattgttaagttgtcctatgaattgtccacttagtcacatggagaggatggtagctgaaatcttgaggaaaatggtacggaagtatagtgagaagaggcctgatgtcattgcggttgctatggagaacaccacagcaagtttctcagaacacctcgatgctaaatcatctggaaattttgaaccttcctcagctactagccatctgagcaggagtccagctatgagtcttgaaggcagttataaaacacacccagacaacccagaggtggatgctgaagaagcccttcctgaggccacgagaacagcactggatgatgcaaccacactgttatgcatctatcatgcataatggataatatccgatgttatgtttctttcaccagtggaaatttgctcatgttacattcagtaagccggaatacctccaagatttagatattgtaatgaacagattccataaacagagacctgtttatggaggttgggaacaacaccttggattggagcatacaaccactaccccaaaaaggtcctacttaggcaacaaccagaaccaccattcttttgagaagcctatgaagatttacaactaaagctgggaatactttttacaagtgatgaatggatatgaaggcagccttgttccaaaagcagtcttttggtgatgtacatagagcttttgcatagagtagtttatgtggcagttatctcaagaattttcatctggtggatgtacagggttcgtatagcaacatttccttgtagaaagttgaagttgtatatcgagggtggatttacctgtgtttatcttttcgaccctaagcctctgggaagctgtgaaccatagcctcatgaaatatgcctgttgttgattcagtgtttgtgtttttcttgtttgtcattattttgtactcgcttttaatataacacacattttgtatataagttactgtggtattatatgttct

SEQ ID NO: 17526 - DNA, 4716 bp, Zea Mays
aaaaaggctattgaggaaaatcatctgtggtatgaattgatacctgaagaatgtgcacagttaaagcactgcaatttctctctattttggctgtatcggaagagaagatacaaggaatatacaacaccttatgtcaagagcatttccatgatatcgtgcatcaaaataactcaatacaatccccaggttcatctgggcaacacccattagtatagacatcttcatctttaatgaatttagaaagggtagctcagaccgacttccacgccagcttgggtccaccccaaaaggatagggttcatggactttgatgagaccaaaagtatgtgcatcgctgaagcaaaaggttagctgttaaatcttggcggagaaacatgcatggctatctgaaattaaagtgattacacgcaaaaagtgcttccttgacgtactgctgctaacttgctatatgttaatagagaaggtcaaaaattacattaactaccagccattcagaaaaggaacaaacaaaaagataaaggtctatagaccataaacaaaaatggctacaaccaagcaaaaagtatggctcactagaccacatacttcactataatctatagacaatgcactaagaaattcactgtcaagttgaatagtggtgagtgcacataattttaagtcgatactcgatacttaagacttttgtatgatcaatgaacgacagggcatgtttctttgatagtagtacaaaagataaaggtataagctttctgtaatttgacaaagttattacatagactgtataccgggcttgtttggatacaggggctcattgttttcagatcggctgactaatcgcgattagtcgggctgattgtttctctgtgctcgattagggtgttggactcgattagtgtaactgatcgtccatatcatccgatttctcgaagacctcttgtacttttctttgcttatatgactcttcagtcatcatacttgagagcttattgtgttctgaaaatgaaaagtgatgtgactaggatatatccaaatgtcactctctcccttaccagagatttaggactctggtaattattttatgaaaccatacgcaatatgccttactgccatgatgactttctttatccctttgggtttctctctgaaattatgtcctggttgtgaaacaagaaaatgcagacataccgtttcttgttactactaacaccagctggtatgttctttcaaaaaaaagtggtacatagttttactttgaaaagtgagctgcacaatcattattgtaaataggacatatagaagagaacgaaaaacagctctgaaattcaccatgccacgccacacttcgcgcgccgcagttgtggcggccgaatcggccgcgacaccttaggcggggtgtggtgctggacgtcagcgtccaaacaggccctcagtcagtcattgatgtgcaccattttgatggcataagtgatttgtttatgtcttgcatcatagtactataaatctgattcttagaattcagtcatatatcagtcatcatggcctcatatgttctcaacggaagccatttaggagcaacagtaagaaccattgcaattggttcattatgtagtacttgaaatccacgatttctattatgaaaaaatacagccaaatttgagggatagttacacatcgaggctttttgaacgctactcttctggcttcctcctggtatgcccctatccacttcctccattccgcctttcagaggaaagcatttgccttttggccctttgattattgtgtggtttcaaattaatttattcattcatagcttcctaggtcgaaggtaaatagaaagtcgttggtttttgttaaacctggattgttatggctatcgatgttacttggacctctggtactaggctcctcatattccgctcactagatttctgatgttgattcaatttccttccattcaataaaatccatgtgtgtgattgttgtcctatgttaatttgaggccaaggaagtgaatgggtgaaaatgattttgtctattatcacatgatttggttttttacagcatactcttatagcccacctgtaattcatcagcatggattgattatgtgcctctctattttgttgtatcagttatgaagtttaaataaacattgaatccatgttcttgcacactttttgtaatgttcaaccaaaaaatctgcttcaaatatgttcagcaagacagaagttaataggttacattcagctttttcagttggtaatgttcacaacaacaaaaaggatgtattcagttttttcagtccttttctgttcagttcttaaccacttgtagttgcctatttggtaatgtttaagttcccatgaccgatctggcagtgcagttaaatttatgggttcttttagagccatggattagattaatgtacgttgtccacaaactcttaacaccgacaaactatccttcaagaggcgctaggcaaggaggtgagtaatacctattacctcgtgctccatccaaatcccaaaagtgtaactcctctacagctagcaccaacacatgattgttttgtgcaaatgtttaggtgtgttaaatgattatgagcaatagtctgatttgatggttgagttattttcagatattaagatagtttaccttttaacgttatcaacacattgatatgctacatgatctctgtccgtgcaatcttttgatatgttacagaatgcactattcctaattgcttagttgaagcatcctgcagatcaaggtagaggatatggatgcgtatgcccctaaagatcttttggttgtcactacaggttcacaaggagagccacgtgcagctttgaatcttgcatcttatgggggaagtcacactcttaaactatcaaaagaggatgtccttctttattcagctaaggttattcctggaaatgagacacgggtaatgaagatgatgaatcgtctcactgatcttggcccaaaaattatcatgggtaaagattctggcctgcatacctctgggcatgcctaccgagaggagctggaggaagttcttcggattgttaaaccacaacatttcttgcctgttcatggagaactcctatttctcaaagaacatgaatcacttggaagatcaactggcatacggcacacaactgtaataaaaaatggagaaatgcttggtgtatcgcatctaagaaacagaagagttttgtccaatgggtttgtttcattagggaaggaggatctttaggtgaaccatttattttacacgtcgtttttttatgtcttttgcagttatgatatctaacatgatatatgatattacagctcatgtatagtgatggtgataaggcttttggtacatccactgatctctgcattgacgagagactaagaatcgcatctgatggcattatttttgtcaagtagcttcttgtacagttttggagtattttctaggtttatcttcagcaaaaatttctcctcgcatgtgaaatgatagtgatttatgtcgaaccttgtgatagtcaaaatggtaaaccatatatagtattgttcggtgcacctaaacattttacatgttactcctttgcagcatggagatcttccgacctcagaaggaacatggtttagcgcagactggtttgaaaggaaaatttaagattactacaagatgtctatggcttgataatggaagattgttggacgcactctacaaagcagctcatgctgcattgttaagttgtcctatgaattgtccacttagtcacatggagaggatggtagctgaaatcttgaggaaaatggtacggaagtatagtgagaagaggcctgatgtcattgcggttgctatggagaacaccacagcaagtttctcagaacacctcgatgctaaatcatctggaaattttgaaccttcctcagctactagccatctgagcaggagtccagctatgagtcttgaaggcagttataaaacacacccagacaacccagaggtggatgctgaagaagcccttcctgaggccacgagaacagcactggatgatgcaaccacactgttatgcatctatcatgcataatggataatatccgatgttatgtttctttcaccagtggaaatttgctcatgttacattcagtaagccggaatacctccaagatttagatattgtaatgaacagattccataaacagagacctgtttatggaggttgggaacaacaccttggattggagcatacaaccactaccccaaaaaggtcctacttaggcaacaaccagaaccaccattcttttgagaagcctatgaagatttacaactaaagctgggaatactttttacaagtgatgaatggatatgaaggcagccttgttccaaaagcagtcttttggtgatgtacatagagcttttgcatagagtagtttatgtggcagttatctcaagaattttcatctggtggatgtacagggttcgtatagcaacatttccttgtagaaagttgaagttgtatatcgagggtggatttacctgtgtttatcttttcgaccctaagcctctgggaagctgtgaaccatagcctcatgaaatatgcctgttgttgattcagtgtttgtgtttttcttgtttgtcattattttgtactcgcttttaatataacacacattttgtatataagttactgtggtattatatgttct

SEQ ID NO: 17527 - DNA, 4710 bp, Zea Mays
aaaaaggctattgaggaaaatcatctgtggtatgaattgatacctgaagaatgtgcacagttaaagcactgcaatttctctctattttggctgtatcggaagagaagatacaaggaatatacaacaccttatgtcaagagcatttccatgatatcgtgcatcaaaataactcaatacaatccccaggttcatctgggcaacacccattagtatagacatcttcatctttaatgaatttagaaagggtagctcagaccgacttccacgccagcttgggtccaccccaaaaggatagggttcatggactttgatgagaccaaaagtatgtgcatcgctgaagcaaaaggttagctgttaaatcttggcggagaaacatgcatggctatctgaaattaaagtgattacacgcaaaaagtgcttccttgacgtactgctgctaacttgctatatgttaatagagaaggtcaaaaattacattaactaccagccattcagaaaaggaacaaacaaaaagataaaggtctatagaccataaacaaaaatggctacaaccaagcaaaaagtatggctcactagaccacatacttcactataatctatagacaatgcactaagaaattcactgtcaagttgaatagtggtgagtgcacataattttaagtcgatactcgatacttaagacttttgtatgatcaatgaacgacagggcatgtttctttgatagtagtacaaaagataaaggtataagctttctgtaatttgacaaagttattacatagactgtataccgggcttgtttggatacaggggctcattgttttcagatcggctgactaatcgcgattagtcgggctgattgtttctctgtgctcgattagggtgttggactcgattagtgtaactgatcgtccatatcatccgatttctcgaagacctcttgtacttttctttgcttatatgactcttcagtcatcatacttgagagcttattgtgttctgaaaatgaaaagtgatgtgactaggatatatccaaatgtcactctctcccttaccagagatttaggactctggtaattattttatgaaaccatacgcaatatgccttactgccatgatgactttctttatccctttgggtttctctctgaaattatgtcctggttgtgaaacaagaaaatgcagacataccgtttcttgttactactaacaccagctggtatgttctttcaaaaaaaagtggtacatagttttactttgaaaagtgagctgcacaatcattattgtaaataggacatatagaagagaacgaaaaacagctctgaaattcaccatgccacgccacacttcgcgcgccgcagttgtggcggccgaatcggccgcgacaccttaggcggggtgtggtgctggacgtcagcgtccaaacaggccctcagtcagtcattgatgtgcaccattttgatggcataagtgatttgtttatgtcttgcatcatagtactataaatctgattcttagaattcagtcatatatcagtcatcatggcctcatatgttctcaacggaagccatttaggagcaacagtaagaaccattgcaattggttcattatgtagtacttgaaatccacgatttctattatgaaaaaatacagccaaatttgagggatagttacacatcgaggctttttgaacgctactcttctggcttcctcctggtatgcccctatccacttcctccattccgcctttcagaggaaagcatttgccttttggccctttgattattgtgtggtttcaaattaatttattcattcatagcttcctaggtcgaaggtaaatagaaagtcgttggtttttgttaaacctggattgttatggctatcgatgttacttggacctctggtactaggctcctcatattccgctcactagatttctgatgttgattcaatttccttccattcaataaaatccatgtgtgtgattgttgtcctatgttaatttgaggccaaggaagtgaatgggtgaaaatgattttgtctattatcacatgatttggttttttacagcatactcttatagcccacctgtaattcatcagcatggattgattatgtgcctctctattttgttgtatcagttatgaagtttaaataaacattgaatccatgttcttgcacactttttgtaatgttcaaccaaaaaatctgcttcaaatatgttcagcaagacagaagttaataggttacattcagctttttcagttggtaatgttcacaacaacaaaaaggatgtattcagttttttcagtccttttctgttcagttcttaaccacttgtagttgcctatttggtaatgtttaagttcccatgaccgatctggcagtgcagttaaatttatgggttcttttagagccatggattagattaatgtacgttgtccacaaactcttaacaccgacaaactatccttcaagaggcgctaggcaaggaggtgagtaatacctattacctcgtgctccatccaaatcccaaaagtgtaactcctctacagctagcaccaacacatgattgttttgtgcaaatgtttaggtgtgttaaatgattatgagcaatagtctgatttgatggttgagttattttcagatattaagatagtttaccttttaacgttatcaacacattgatatgctacatgatctctgtccgtgcaatcttttgatatgttacagaatgcactattcctaattgcttagttgaagcatcctgcagatcaaggtagaggatatggatgcgtatgcccctaaagatcttttggttgtcactacaggttcacaaggagagccacgtgcagctttgaatcttgcatcttatgggggaagtcacactcttaaactatcaaaagaggatgtccttctttattcagctaaggttattcctggaaatgagacacgggtaatgaagatgatgaatcgtctcactgatcttggcccaaaaattatcatgggtaaagattctggcctgcatacctctgggcatgcctaccgagaggagctggaggaagttcttcggattgttaaaccacaacatttcttgcctgttcatggagaactcctatttctcaaagaacatgaatcacttggaagatcaactggcatacggcacacaactgtaataaaaaatggagaaatgcttggtgtatcgcatctaagaaacagaagagttttgtccaatgggtttgtttcattagggaaggaggatctttaggtgaaccatttattttacacgtcgtttttttatgtcttttgcagttatgatatctaacatgatatatgatattacagctcatgtatagtgatggtgataaggcttttggtacatccactgatctctgcattgacgagagactaagaatcgcatctgatggcattatttttgtcaagtagcttcttgtacagttttggagtattttctaggtttatcttcagcaaaaatttctcctcgcatgtgaaatgatagtgatttatgtcgaaccttgtgatagtcaaaatggtaaaccatatatagtattgttcggtgcacctaaacattttacatgttactcctttgcagcatggagatcttccgacctcagaaggaacatggtttagcgcagactggtttgaaaggaaaatttaagattactacaagatgtctatggcttgataatggaagattgttggacgcactctacaaagcagctcatgctgcattgttaagttgtcctatgaattgtccacttagtcacatggagaggatggtagctgaaatcttgaggaaaatggtacggaagtatagtgagaagaggcctgatgtcattgcggttgctatggagaacaccacagcaagtttctcagaacacctcgatgctaaatcatctggaaattttgaaccttcctcagctactagccatctgagcaggagtccagctatgagtcttgaaggcagttataaaacacacccagacaacccagaggtggatgctgaagaagcccttcctgaggccacgagaacagcactggatgatgcaaccacactgttatgcatctatcatgcataatggataatatccgatgttatgtttctttcaccagtggaaatttgctcatgttacattcagtaagccggaatacctccaagatttagatattgtaatgaacagattccatagacctgtttatggaggttgggaacaacaccttggattggagcatacaaccactaccccaaaaaggtcctacttaggcaacaaccagaaccaccattcttttgagaagcctatgaagatttacaactaaagctgggaatactttttacaagtgatgaatggatatgaaggcagccttgttccaaaagcagtcttttggtgatgtacatagagcttttgcatagagtagtttatgtggcagttatctcaagaattttcatctggtggatgtacagggttcgtatagcaacatttccttgtagaaagttgaagttgtatatcgagggtggatttacctgtgtttatcttttcgaccctaagcctctgggaagctgtgaaccatagcctcatgaaatatgcctgttgttgattcagtgtttgtgtttttcttgtttgtcattattttgtactcgcttttaatataacacacattttgtatataagttactgtggtattatatgttct

SEQ ID NO: 17528 - DNA, 4383 bp, Zea Mays
caaaaaggctattgaggaaaatcatctgtggtatgaattgatacctgaagaatgtgcacagttaaagcactgcaatttctctctattttggctgtatcggaagagaagatacaaggaatatacaacaccttatgtcaagagcatttccatgatatcgtgcatcaaaataactcaatacaatccccaggttcatctgggcaacacccattagtatagacatcttcatctttaatgaatttagaaagggtagctcagaccgacttccacgccagcttgggtccaccccaaaaggatagggttcatggactttgatgagaccaaaagtatgtgcatcgctgaagcaaaaggttagctgttaaatcttggcggagaaacatgcatggctatctgaaattaaagtgattacacgcaaaaagtgcttccttgacgtactgctgctaacttgctatatgttaatagagaaggtcaaaaattacattaactaccagccattcagaaaaggaacaaacaaaaagataaaggtctatagaccataaacaaaaatggctacaaccaagcaaaaagtatggctcactagaccacatacttcactataatctatagacaatgcactaagaaattcactgtcaagttgaatagtggtgagtgcacataattttaagtcgatactcgatacttaagacttttgtatgatcaatgaacgacagggcatgtttctttgatagtagtacaaaagataaaggtataagctttctgtaatttgacaaagttattacatagactgtataccgggcttgtttggatacaggggctcattgttttcagatcggctgactaatcgcgattagtcgggctgattgtttctctgtgctcgattagggtgttggactcgattagtgtaactgatcgtccatatcatccgatttctcgaagacctcttgtacttttctttgcttatatgactcttcagtcatcatacttgagagcttattgtgttctgaaaatgaaaagtgatgtgactaggatatatccaaatgtcactctctcccttaccagagatttaggactctggtaattattttatgaaaccatacgcaatatgccttactgccatgatgactttctttatccctttgggtttctctctgaaattatgtcctggttgtgaaacaagaaaatgcagacataccgtttcttgttactactaacaccagctggtatgttctttcaaaaaaaagtggtacatagttttactttgaaaagtgagctgcacaatcattattgtaaataggacatatagaagagaacgaaaaacagctctgaaattcaccatgccacgccacacttcgcgcgccgcagttgtggcggccgaatcggccgcgacaccttaggcggggtgtggtgctggacgtcagcgtccaaacaggccctcagtcagtcattgatgtgcaccattttgatggcataagtgatttgtttatgtcttgcatcatagtactataaatctgattcttagaattcagtcatatatcagtcatcatggcctcatatgttctcaacggaagccatttaggagcaacagtaagaaccattgcaattggttcattatgtagtacttgaaatccacgatttctattatgaaaaaatacagccaaatttgagggatagttacacatcgaggctttttgaacgctactcttctggcttcctcctggtatgcccctatccacttcctccattccgcctttcagaggaaagcatttgccttttggccctttgattattgtgtggtttcaaattaatttattcattcatagcttcctaggtcgaaggtaaatagaaagtcgttggtttttgttaaacctggattgttatggctatcgatgttacttggacctctggtactaggctcctcatattccgctcactagatttctgatgttgattcaatttccttccattcaataaaatccatgtgtgtgattgttgtcctatgttaatttgaggccaaggaagtgaatgggtgaaaatgattttgtctattatcacatgatttggttttttacagcatactcttatagcccacctgtaattcatcagcatggattgattatgtgcctctctattttgttgtatcagttatgaagtttaaataaacattgaatccatgttcttgcacactttttgtaatgttcaaccaaaaaatctgcttcaaatatgttcagcaagacagaagttaataggttacattcagctttttcagttggtaatgttcacaacaacaaaaaggatgtattcagttttttcagtccttttctgttcagttcttaaccacttgtagttgcctatttggtaatgtttaagttcccatgaccgatctggcagtgcagttaaatttatgggttcttttagagccatggattagattaatgtacgttgtccacaaactcttaacaccgacaaactatccttcaagaggcgctaggcaaggaggtgagtaatacctattacctcgtgctccatccaaatcccaaaagtgtaactcctctacagctagcaccaacacatgattgttttgtgcaaatgtttaggtgtgttaaatgattatgagcaatagtctgatttgatggttgagttattttcagatattaagatagtttaccttttaacgttatcaacacattgatatgctacatgatctctgtccgtgcaatcttttgatatgttacagaatgcactattcctaattgcttagttgaagcatcctgcagatcaaggtagaggatatggatgcgtatgcccctaaagatcttttggttgtcactacaggttcacaaggagagccacgtgcagctttgaatcttgcatcttatgggggaagtcacactcttaaactatcaaaagaggatgtccttctttattcagctaaggttattcctggaaatgagacacgggtaatgaagatgatgaatcgtctcactgatcttggcccaaaaattatcatgggtaaagattctggcctgcatacctctgggcatgcctaccgagaggagctggaggaagttcttcggattgttaaaccacaacatttcttgcctgttcatggagaactcctatttctcaaagaacatgaatcacttggaagatcaactggcatacggcacacaactgtaataaaaaatggagaaatgcttggtgtatcgcatctaagaaacagaagagttttgtccaatgggtttgtttcattagggaaggaggatctttagcatggagatcttccgacctcagaaggaacatggtttagcgcagactggtttgaaaggaaaatttaagattactacaagatgtctatggcttgataatggaagattgttggacgcactctacaaagcagctcatgctgcattgttaagttgtcctatgaattgtccacttagtcacatggagaggatggtagctgaaatcttgaggaaaatggtacggaagtatagtgagaagaggcctgatgtcattgcggttgctatggagaacaccacagcaagtttctcagaacacctcgatgctaaatcatctggaaattttgaaccttcctcagctactagccatctgagcaggagtccagctatgagtcttgaaggcagttataaaacacacccagacaacccagaggtggatgctgaagaagcccttcctgaggccacgagaacagcactggatgatgcaaccacactgttatgcatctatcatgcataatggataatatccgatgttatgtttctttcaccagtggaaatttgctcatgttacattcagtaagccggaatacctccaagatttagatattgtaatgaacagattccataaacagagacctgtttatggaggttgggaacaacaccttggattggagcatacaaccactaccccaaaaaggtcctacttaggcaacaaccagagcaattacagaaccaccattcttttgagaagcctatgaagatttacaactaaagctgggaatactttttacaagtgatgaatggatatgaaggcagccttgttccaaaagcagtcttttggtgatgtacatagagcttttgcatagagtagtttatgtggcagttatctcaagaattttcatctggtggatgtacagggttcgtatagcaacatttccttgtagaaagttgaagttgtatatcgagggtggatttacctgtgtttatcttttcgaccctaagcctctgggaagctgtgaaccatagcctcatgaaatatgcctgttgttgattcagtgtttgtgtttttcttgtttgtcattattttgtactcgcttttaatataacacacattttgtatataagttactgtggtattatatgttct

SEQ ID NO: 17529 - DNA, 4385 bp, Zea Mays
atcaggagtgctaagtaaccaaaaaggctattgaggaaaatcatctgtggtatgaattgatacctgaagaatgtgcacagttaaagcactgcaatttctctctattttggctgtatcggaagagaagatacaaggaatatacaacaccttatgtcaagagcatttccatgatatcgtgcatcaaaataactcaatacaatccccaggttcatctgggcaacacccattagtatagacatcttcatctttaatgaatttagaaagggtagctcagaccgacttccacgccagcttgggtccaccccaaaaggatagggttcatggactttgatgagaccaaaagtatgtgcatcgctgaagcaaaaggttagctgttaaatcttggcggagaaacatgcatggctatctgaaattaaagtgattacacgcaaaaagtgcttccttgacgtactgctgctaacttgctatatgttaatagagaaggtcaaaaattacattaactaccagccattcagaaaaggaacaaacaaaaagataaaggtctatagaccataaacaaaaatggctacaaccaagcaaaaagtatggctcactagaccacatacttcactataatctatagacaatgcactaagaaattcactgtcaagttgaatagtggtgagtgcacataattttaagtcgatactcgatacttaagacttttgtatgatcaatgaacgacagggcatgtttctttgatagtagtacaaaagataaaggtataagctttctgtaatttgacaaagttattacatagactgtataccgggcttgtttggatacaggggctcattgttttcagatcggctgactaatcgcgattagtcgggctgattgtttctctgtgctcgattagggtgttggactcgattagtgtaactgatcgtccatatcatccgatttctcgaagacctcttgtacttttctttgcttatatgactcttcagtcatcatacttgagagcttattgtgttctgaaaatgaaaagtgatgtgactaggatatatccaaatgtcactctctcccttaccagagatttaggactctggtaattattttatgaaaccatacgcaatatgccttactgccatgatgactttctttatccctttgggtttctctctgaaattatgtcctggttgtgaaacaagaaaatgcagacataccgtttcttgttactactaacaccagctggtatgttctttcaaaaaaaagtggtacatagttttactttgaaaagtgagctgcacaatcattattgtaaataggacatatagaagagaacgaaaaacagctctgaaattcaccatgccacgccacacttcgcgcgccgcagttgtggcggccgaatcggccgcgacaccttaggcggggtgtggtgctggacgtcagcgtccaaacaggccctcagtcagtcattgatgtgcaccattttgatggcataagtgatttgtttatgtcttgcatcatagtactataaatctgattcttagaattcagtcatatatcagtcatcatggcctcatatgttctcaacggaagccatttaggagcaacagtaagaaccattgcaattggttcattatgtagtacttgaaatccacgatttctattatgaaaaaatacagccaaatttgagggatagttacacatcgaggctttttgaacgctactcttctggcttcctcctggtatgcccctatccacttcctccattccgcctttcagaggaaagcatttgccttttggccctttgattattgtgtggtttcaaattaatttattcattcatagcttcctaggtcgaaggtaaatagaaagtcgttggtttttgttaaacctggattgttatggctatcgatgttacttggacctctggtactaggctcctcatattccgctcactagatttctgatgttgattcaatttccttccattcaataaaatccatgtgtgtgattgttgtcctatgttaatttgaggccaaggaagtgaatgggtgaaaatgattttgtctattatcacatgatttggttttttacagcatactcttatagcccacctgtaattcatcagcatggattgattatgtgcctctctattttgttgtatcagttatgaagtttaaataaacattgaatccatgttcttgcacactttttgtaatgttcaaccaaaaaatctgcttcaaatatgttcagcaagacagaagttaataggttacattcagctttttcagttggtaatgttcacaacaacaaaaaggatgtattcagttttttcagtccttttctgttcagttcttaaccacttgtagttgcctatttggtaatgtttaagttcccatgaccgatctggcagtgcagttaaatttatgggttcttttagagccatggattagattaatgtacgttgtccacaaactcttaacaccgacaaactatccttcaagaggcgctaggcaaggaggtgagtaatacctattacctcgtgctccatccaaatcccaaaagtgtaactcctctacagctagcaccaacacatgattgttttgtgcaaatgtttaggtgtgttaaatgattatgagcaatagtctgatttgatggttgagttattttcagatattaagatagtttaccttttaacgttatcaacacattgatatgctacatgatctctgtccgtgcaatcttttgatatgttacagaatgcactattcctaattgcttagttgaagcatcctgcagatcaaggtagaggatatggatgcgtatgcccctaaagatcttttggttgtcactacaggttcacaaggagagccacgtgcagctttgaatcttgcatcttatgggggaagtcacactcttaaactatcaaaagaggatgtccttctttattcagctaaggttattcctggaaatgagacacgggtaatgaagatgatgaatcgtctcactgatcttggcccaaaaattatcatgggtaaagattctggcctgcatacctctgggcatgcctaccgagaggagctggaggaagttcttcggattgttaaaccacaacatttcttgcctgttcatggagaactcctatttctcaaagaacatgaatcacttggaagatcaactggcatacggcacacaactgtaataaaaaatggagaaatgcttggtgtatcgcatctaagaaacagaagagttttgtccaatgggtttgtttcattagggaaggaggatctttagcatggagatcttccgacctcagaaggaacatggtttagcgcagactggtttgaaaggaaaatttaagattactacaagatgtctatggcttgataatggaagattgttggacgcactctacaaagcagctcatgctgcattgttaagttgtcctatgaattgtccacttagtcacatggagaggatggtagctgaaatcttgaggaaaatggtacggaagtatagtgagaagaggcctgatgtcattgcggttgctatggagaacaccacagcaagtttctcagaacacctcgatgctaaatcatctggaaattttgaaccttcctcagctactagccatctgagcaggagtccagctatgagtcttgaaggcagttataaaacacacccagacaacccagaggtggatgctgaagaagcccttcctgaggccacgagaacagcactggatgatgcaaccacactgttatgcatctatcatgcataatggataatatccgatgttatgtttctttcaccagtggaaatttgctcatgttacattcagtaagccggaatacctccaagatttagatattgtaatgaacagattccatagacctgtttatggaggttgggaacaacaccttggattggagcatacaaccactaccccaaaaaggtcctacttaggcaacaaccagaaccaccattcttttgagaagcctatgaagatttacaactaaagctgggaatactttttacaagtgatgaatggatatgaaggcagccttgttccaaaagcagtcttttggtgatgtacatagagcttttgcatagagtagtttatgtggcagttatctcaagaattttcatctggtggatgtacagggttcgtatagcaacatttccttgtagaaagttgaagttgtatatcgagggtggatttacctgtgtttatcttttcgaccctaagcctctgggaagctgtgaaccatagcctcatgaaatatgcctgttgttgattcagtgtttgtgtttttcttgtttgtcattattttgtactcgcttttaatataacacacattttgtatataagttactgtggtattatatgttct

SEQ ID NO: 17530 - DNA, 5209 bp, Zea Mays
gttttaaggcattctaaacttagctctggacctcagttttcaaaactgcggtattataaactacggtattgtcataactaaagtatagtatagtatttcaaaaactgtggttttcaaaaactttgttcccaaacagggcctaagaagcaagagtcggctgccacagcgagaggggctgccaagaagcccgctggcaaagcggctgcccctttcgccgtgtactttgtgccatcccgtgaacccattcccgcgctccccttcgctactccagcagcccagcaggtcccccttcttctccccaatctcttcgcgtcccgcatccagtagcgttggtcgcgcaaaacaactgagaagagctgctgcgccagcaggaaagggagaacatggtggggaagaagaggggtattatctccccgctggaccatctcgctgggctgctggaggtgcgcgtggtgaggggagtggacctcgccatctgcgacctccgatccagcgacccctacgtcgtccttcgcatcggcaaggcgctgaaagtgaagacgcgagtggtcaagaagagcatcaatccggaatggaacgaagacctcaccctctcccgtggatgtgcgtccttggttccattgaaattcttttcagcagacattgtcccatatgggtatcctaaatatgcttactggtatcgacacaagcttcactgtcacctctaaggccactgatgaagaagttgattttctccaagatctccagcaggatcaaggaacatatatatcatcacatgataaagatcagcttgagagcccgtgcaccacttgataagaatcaggagtgctaagtaaccaaaaaggctattgaggaaaatcatctgtggtatgaattgatacctgaagaatgtgcacagttaaagcactgcaatttctctctattttggctgtatcggaagagaagatacaaggaatatacaacaccttatgtcaagagcatttccatgatatcgtgcatcaaaataactcaatacaatccccaggttcatctgggcaacacccattagtatagacatcttcatctttaatgaatttagaaagggtagctcagaccgacttccacgccagcttgggtccaccccaaaaggatagggttcatggactttgatgagaccaaaagtatgtgcatcgctgaagcaaaaggttagctgttaaatcttggcggagaaacatgcatggctatctgaaattaaagtgattacacgcaaaaagtgcttccttgacgtactgctgctaacttgctatatgttaatagagaaggtcaaaaattacattaactaccagccattcagaaaaggaacaaacaaaaagataaaggtctatagaccataaacaaaaatggctacaaccaagcaaaaagtatggctcactagaccacatacttcactataatctatagacaatgcactaagaaattcactgtcaagttgaatagtggtgagtgcacataattttaagtcgatactcgatacttaagacttttgtatgatcaatgaacgacagggcatgtttctttgatagtagtacaaaagataaaggtataagctttctgtaatttgacaaagttattacatagactgtataccgggcttgtttggatacaggggctcattgttttcagatcggctgactaatcgcgattagtcgggctgattgtttctctgtgctcgattagggtgttggactcgattagtgtaactgatcgtccatatcatccgatttctcgaagacctcttgtacttttctttgcttatatgactcttcagtcatcatacttgagagcttattgtgttctgaaaatgaaaagtgatgtgactaggatatatccaaatgtcactctctcccttaccagagatttaggactctggtaattattttatgaaaccatacgcaatatgccttactgccatgatgactttctttatccctttgggtttctctctgaaattatgtcctggttgtgaaacaagaaaatgcagacataccgtttcttgttactactaacaccagctggtatgttctttcaaaaaaaagtggtacatagttttactttgaaaagtgagctgcacaatcattattgtaaataggacatatagaagagaacgaaaaacagctctgaaattcaccatgccacgccacacttcgcgcgccgcagttgtggcggccgaatcggccgcgacaccttaggcggggtgtggtgctggacgtcagcgtccaaacaggccctcagtcagtcattgatgtgcaccattttgatggcataagtgatttgtttatgtcttgcatcatagtactataaatctgattcttagaattcagtcatatatcagtcatcatggcctcatatgttctcaacggaagccatttaggagcaacagtaagaaccattgcaattggttcattatgtagtacttgaaatccacgatttctattatgaaaaaatacagccaaatttgagggatagttacacatcgaggctttttgaacgctactcttctggcttcctcctggtatgcccctatccacttcctccattccgcctttcagaggaaagcatttgccttttggccctttgattattgtgtggtttcaaattaatttattcattcatagcttcctaggtcgaaggtaaatagaaagtcgttggtttttgttaaacctggattgttatggctatcgatgttacttggacctctggtactaggctcctcatattccgctcactagatttctgatgttgattcaatttccttccattcaataaaatccatgtgtgtgattgttgtcctatgttaatttgaggccaaggaagtgaatgggtgaaaatgattttgtctattatcacatgatttggttttttacagcatactcttatagcccacctgtaattcatcagcatggattgattatgtgcctctctattttgttgtatcagttatgaagtttaaataaacattgaatccatgttcttgcacactttttgtaatgttcaaccaaaaaatctgcttcaaatatgttcagcaagacagaagttaataggttacattcagctttttcagttggtaatgttcacaacaacaaaaaggatgtattcagttttttcagtccttttctgttcagttcttaaccacttgtagttgcctatttggtaatgtttaagttcccatgaccgatctggcagtgcagttaaatttatgggttcttttagagccatggattagattaatgtacgttgtccacaaactcttaacaccgacaaactatccttcaagaggcgctaggcaaggaggtgagtaatacctattacctcgtgctccatccaaatcccaaaagtgtaactcctctacagctagcaccaacacatgattgttttgtgcaaatgtttaggtgtgttaaatgattatgagcaatagtctgatttgatggttgagttattttcagatattaagatagtttaccttttaacgttatcaacacattgatatgctacatgatctctgtccgtgcaatcttttgatatgttacagaatgcactattcctaattgcttagttgaagcatcctgcagatcaaggtagaggatatggatgcgtatgcccctaaagatcttttggttgtcactacaggttcacaaggagagccacgtgcagctttgaatcttgcatcttatgggggaagtcacactcttaaactatcaaaagaggatgtccttctttattcagctaaggttattcctggaaatgagacacgggtaatgaagatgatgaatcgtctcactgatcttggcccaaaaattatcatgggtaaagattctggcctgcatacctctgggcatgcctaccgagaggagctggaggaagttcttcggattgttaaaccacaacatttcttgcctgttcatggagaactcctatttctcaaagaacatgaatcacttggaagatcaactggcatacggcacacaactgtaataaaaaatggagaaatgcttggtgtatcgcatctaagaaacagaagagttttgtccaatgggtttgtttcattagggaaggaggatctttagcatggagatcttccgacctcagaaggaacatggtttagcgcagactggtttgaaaggaaaatttaagattactacaagatgtctatggcttgataatggaagattgttggacgcactctacaaagcagctcatgctgcattgttaagttgtcctatgaattgtccacttagtcacatggagaggatggtagctgaaatcttgaggaaaatggtacggaagtatagtgagaagaggcctgatgtcattgcggttgctatggagaacaccacagcaagtttctcagaacacctcgatgctaaatcatctggaaattttgaaccttcctcagctactagccatctgagcaggagtccagctatgagtcttgaaggcagttataaaacacacccagacaacccagaggtggatgctgaagaagcccttcctgaggccacgagaacagcactggatgatgcaaccacactgttatgcatctatcatgcataatggataatatccgatgttatgtttctttcaccagtggaaatttgctcatgttacattcagtaagccggaatacctccaagatttagatattgtaatgaacagattccataaacagagacctgtttatggaggttgggaacaacaccttggattggagcatacaaccactaccccaaaaaggtcctacttaggcaacaaccagaaccaccattcttttgagaagcctatgaagatttacaactaaagctgggaatactttttacaagtgatgaatggatatgaaggcagccttgttccaaaagcagtcttttggtgatgtacatagagcttttgcatagagtagtttatgtggcagttatctcaagaattttcatctggtggatgtacagggttcgtatagcaacatttccttgtagaaagttgaagttgtatatcgagggtggatttacctgtgtttatcttttcgaccctaagcctctgggaagctgtgaaccatagcctcatgaaatatgcctgttgttgattcagtgtttgtgtttttcttgtttgtcattattttgtactcgcttttaatataacacacattttgtatataagttactgtggtattatatgttct

SEQ ID NO: 17531 - DNA, 1166 bp, Zea Mays
gttttaaggcattctaaacttagctctggacctcagttttcaaaactgcggtattataaactacggtattgtcataactaaagtatagtatagtatttcaaaaactgtggttttcaaaaactttgttcccaaacagggcctaagaagcaagagtcggctgccacagcgagaggggctgccaagaagcccgctggcaaagcggctgcccctttcgccgtgtactttgtgccatcccgtgaacccattcccgcgctccccttcgctactccagcagcccagcaggtcccccttcttctccccaatctcttcgcgtcccgcatccagtagcgttggtcgcgcaaaacaactgagaagagctgctgcgccagcaggaaagggagaacatggtggggaagaagaggggtattatctccccgctggaccatctcgctgggctgctggaggtgcgcgtggtgaggggagtggacctcgccatctgcgacctccgatccagcgacccctacgtcgtccttcgcatcggcaaggcgctgaaagtgaagacgcgagtggtcaagaagagcatcaatccggaatggaacgaagacctcaccctctcccgtggatgtgcgtccttggttccattgaaattcttttcagcagacattgtcccatatgggtatcctaaatatgcttactggtatcgacacaagcttcactgtcacctctaaggccactgatgaagaaggaagtatttaggggatcgtcgcagcagcgtgagctggaactacaagtaacaactcttaaacaacagctccaagaagctgagatccattataagcaagacatgattcttctcccaagttttcattttgcgctctatgctaattcacatgtttgacactgctgatttttgtttatgttacttgaaagtttaaagatctcttgtgtcatataatttatgctatagacatgaatcaactagacaatgtaaaacattaaaggcactataaaacataatgagcactatgtatcaggttttgatccagagtagaaattgatcactatgcaacttcaaaatataagcttaaatccaatgagatacatgagttcagaggaattttcatgtagtttggcagataataaggtctcacaaatgcattatatttatgtttggcccaatgaagcag

SEQ ID NO: 17532 - DNA, 1368 bp, Zea Mays
gttttaaggcattctaaacttagctctggacctcagttttcaaaactgcggtattataaactacggtattgtcataactaaagtatagtatagtatttcaaaaactgtggttttcaaaaactttgttcccaaacagggcctaagaagcaagagtcggctgccacagcgagaggggctgccaagaagcccgctggcaaagcggctgcccctttcgccgtgtactttgtgccatcccgtgaacccattcccgcgctccccttcgctactccagcagcccagcaggtcccccttcttctccccaatctcttcgcgtcccgcatccagtagcgttggtcgcgcaaaacaactgagaagagctgctgcgccagcaggaaagggagaacatggtggggaagaagaggggtattatctccccgctggaccatctcgctgggctgctggaggtgcgcgtggtgaggggagtggacctcgccatctgcgacctccgatccagcgacccctacgtcgtccttcgcatcggcaaggcgctggtccgcttctcctcccctcccttttggtttgctttgctgctggtaggttttatcggcaagagttccggcgaattccgttcgaatcgatccccggtctacaacacaaatgacgactaatatgctatatagctgtttggattttttttaaaattttattttccctgttcagagttgcctgccctattgagttgtctgtctcttctcacacttgcgtgcgccggctaaccgtgattgtttttccaatgtttcacagaaagtgaagacgcgagtggtcaagaagagcatcaatccggaatggaacgaagacctcaccctctcccgtggatggtatcctaaatatgcttactggtatcgacacaagcttcactgtcacctctaaggccactgatgaagaaggaagtatttaggggatcgtcgcagcagcgtgagctggaactacaagtaacaactcttaaacaacagctccaagaagctgagatccattataagcaagacatgattcttctcccaagttttcattttgcgctctatgctaattcacatgtttgacactgctgatttttgtttatgttacttgaaagtttaaagatctcttgtgtcatataatttatgctatagacatgaatcaactagacaatgtaaaacattaaaggcactataaaacataatgagcactatgtatcaggttttgatccagagtagaaattgatcactatgcaacttcaaaatataagcttaaatccaatgagatacatgagttcagaggaattttcatgtagtttggcagataataaggtctcacaaatgcattatatttatgtttggcccaatgaagcag

SEQ ID NO: 17533 - DNA, 2158 bp, Zea Mays
gttttcaagaaaaatatttccacgccatgctgctttcagatctaccgtccttgccccatcaaggaaaaataatctccttccccttgtttttcaaatgagcaccaacccagccagcaccagcaggtgctgattcccacgtactgccccccagtaaccaagcccattgatgccattgcatatagtatttcttctgtgcacatttggcaatcaacagttctgctagatctcctaattccatcatcaaattccctcttgaagacaaattccaacaagaaataacacataagtaacaaacaaatggccctcaagtacatcgataatcacagaaaagtgtgtttctgaatactgcaaaagtcatctgagtagccttttcatgaaattacatattgatctttcatcctacccagtggcatcattaggtcatctgcaaaaaccaaattcaagggcaaaattgcctctggcggtctgacctcaggatccgagttattatccctagcccaattgatcagatccaaagttaatgcatgagatttccatgttaaaactcacagaagaaagacaccatcacttaaaagttaagcttaggtttcagctctctgcggcctctatagctggggtgttggtattactactcatctttcagctactttgcaggatgccatacataagtagtcactgtcaaaacacaaacacagcacgccttgtttcttcaacttatataaaaggtaaattcttggcaaagttatcatttggtgaaaatggtccacgcaacacaaattagaccaatgaaatatatcacgcatatggtgggtttaaagcctaagatagcagacccagtgctagaggctttcaccaacatgatgactcaagtgagacaactctcaccaccacatcaagcctgccctttttgggtttaaagcctaagtgtggcgatattgagctaaatgattggtccatattcacaagaaacacgtatggtggtagagaccctcgacccagaaacgtcgtccccgacccagatatgtagggtcatttccattcccaccatgtaagtctctcacaagtagtgtaccatgttccttgaccccgttcctcgtccctaccgatctggaaactttgtgactatggtttggtcccaaacttagaaatcggggtgttccgggaatgtgggaacaacctcgtccccgtagtgttaaaatcttttttcaagtaccgcaccatgtaccatgttcctattcctcgatcccatcaatccaggaacctggttactaagaccgtgtccagcaattcacctatatcatcaccaaaaacatcggtttgcactgtagactgcactgttcgcagaatggagtttgaatatgggtatagggatgggtaagctgctagagatagcctaaggtcccaaactatgttacgatactttttctggaacttgatcagttagtgtgttatgcctccagcaaggttcttgaaagattgtgatcgtcccagtgcagtggtgaaagtcgtctcactgaatcaccaggtcacgaattcgaggcagcctctccacatttgcggggagaaagcttgcctctgtttgtcccttccccagaccccactaaagctggagccacctgtacagggtctgccctgtttaatccatactccacaaagcacttcaaggaatttcataaatgagggaaccagggtggtgttcaatactggcactgcttgttaaatttacctgatgccttgtgctctatatagtcatcgtactgcaaggctatactcaaatttcaaatgtccttttgcttcaagttctgttatcctaaacttgggagaagtccaaatgaggttggggaaatttttgccacacaagcagtttctctcaacttttggcaaccgatagaaccatttgtacagatgtccagaatttaagtctgatcaatcaactatctgtcttgacgattattggtcctctagaggacagaagggaaggttttcagaaactattagccttacaagaagcactgcttgtaaagcttcttttgtaagcctgatctttggcagcacatcaaagatgtaatctcaaataccttgaattgcagaaactacctcaaagtacactccattctgtctcaataacgttatagaaacactggaagtaaacatgtcg

SEQ ID NO: 17534 - DNA, 3354 bp, Zea Mays
gtccacccaggcccagccacagatgaagaaagcgcaagccaccaggaggagctagcaaaagaaggaggaacgaagagaagagagaaattaacagctcgagagaaacggagctagatagtagcaggggcgctgctcgctagaggccgttgatatggcgcttcgcgacgtgctgctgtccatagcgcagacgccgcaccggctgcgcaggagggcgctggtgacgtggacgccgacgcaggagctgaacgaggtgcgggaccggtccggggcgcgcatgaagcggcggctggagtggtacgacctcgtggggctcggcgtgggcggcatgctcggcgcgggcgtcttcgtcaccacggggagggtggcgcgcgacaccgcggggcccgccgtcttcgcgtcctacgtcgtcgccggcgtctccgcgctgctgtcgtccttgtgctacgccgagttctccgtgcgcgtccccgtcgccggcggcgccttcagctacctcagagtaacgttcggcgagttcgtggggttcttcggcggagcgaacattctgatggagtacgtgctgtcaaacgcggcggtggcgaggagcttcacggactacctggcatcgacgttcggggtcacggagcgcaacgcgtggaggatcgtcgtcgacggcatcgccgacgggtacaatgagctggacgtgccggccgtcgcgctcatccttctcataaccgtatgcctgtgctatagcaccaaggagagctcgatgctgaacatggtgctcacggtgttccacctgctcttcttcgccttcatcgtcgctgccggcctgtggaacggcagcgcgaggaacctcgtgcggccgcacgggctggccccctacggcgtccgcggcgtcctggacggcgccgccgtcgtctacttcagctacataggctacgactcggcgtgcaccatggccgaagagatccgggacccctcccgcgcgctccccgtcggcatcgccggctcggtgctcgtcgtgtccgggctctactgcctcatgtccgtcgccctctgcgtaatgctgccctacaccgagatatcggaagccgccccgttctcgtcggcgttcagggagaaggtggggtggaggtgggcgagcagcgtggttggcgccggcgcgagcatcggcatcgtggcgtcgctgatggtggcgatgctggggcaggccaggtacctgtgcgtcatcgccagagcgcgtctcgtgccgttgtggttcgccaaggtccacccttccacaggcacccccatgaacgccaccatctttctagggttctgcactgcatcattagcactcttcacggagctgcaaatagtgttcgagatgatatccatcggaaccctgctggtcttctacttggtcgccaatgcactaatctaccaccggtacgtgaaggtcggcacaaaccggcccctgcatgtcctcctcttcctgctgctcctcaccctgagctctctcggcttctccctctcgaggaagatcgatgggtggtgccagtgggggatgacactgttcggcgcagtctccatagcaatcaccaccatcttccactgcacagcacggcaggacatcgccggaccctcgttggagtggtcggttcctctgatgccatggcctgccgctgcatctgtcttcctgaatgtgttcctgataaccactctcaaggtgagatcataccagaggttcggcatctggagccttgtgaccatagttttctatgtctgctatggggtgcactccacatactctgcagaagaaaatgagattgtcaatgcaatgatccatcatgcaaatttggacatatcttagcagtggcaggttaattatatgccagaagttacattagagctcaatagattggcaattaggccatcttggagatggtcctaggcctaaagatggtgcaaaagagtattttgctttaggttaatccctctttttttttcctgcttttgtgctttctgattggcccaaaactattggcatgtgcttactttttgctcgaggtacatatgcaggattgtgcaaggcatgtgtccgtttggccagtgatttgaaaatctatctattttcaccacaacaaatgacaatgccctagaatgcaggaaactatcaaacatcagcatgatgactgatctgttccagctagaaattactttcacctgcaactagccattcctgcagatagagcaggagtgagcatacaaaaaaaatgtatcaaagtttactggaaagcatatcctaaaaaatgtaaaagcactggtgtacttcataaaaatcattgtaattgaaccatgagaagctgaagttaatgattttgcttttctgtgtaactcatacatggagagaaataaacagaggaaaccaaaacgaaaactgtgtttagacttcagaataattactgatactatttcaatcacactatttccattagtatggagcaagagttcgctcagatagctttaacacatgaacacattgataccattcatctttcatgccatagagtttgatgcctaaaggcacacaattcacttgtgtgtttgagaaaagaatgacagttcctcgccaagaaaaaatagatcatacaagcacatcctctaaccttactggtccaggaaataactaggcgtgaatttcacaagaagcatagaagacatttttagttctgagaactaaataatctgtattcatgttataataaaaggaggctccatacaaatttcaaaagttacatcaagtccattcctaaagaagaacgtatttacaatttatcaagacatgtagactaatgaggtgcaaatattcaatagactaggctttgatacatgataagcctaaacaatggctgtcatacataattgtattgaaagttcaaggaccacgcatgatggaatgcgggagtaaagccgaacatcatggagcgaatccatgctttcaactcagcatgcctcatcgagtcaaggtacatacctcagttttatttcttaatgcacacctcaaatggtagcccaattgtcgaacagcacagtgagccaaggattggatgccagcatactaaggaccacactctgatggtgagtccgagatagtactaagtggatagtggtgccttcatctgcaccaaatccgctgagaaaaaacaaaactattagattgcagttctgaaccaataaataatgaactacatggaaaacttaagtacccatgtatttttctcaccagataagaagattctgaagaataacaaaactgtagaaggccatggaatacctatagttccaaaattgtcattcaaagtagctaaacttgcagatttgcagaaagct

SEQ ID NO: 17535 - DNA, 3279 bp, Zea Mays
cgtccacccaggcccagccacagatgaagaaagcgcaagccaccaggaggagctagcaaaagaaggaggaacgaagagaagagagaaattaacagctcgagagaaacggagctagatagtagcaggggcgctgctcgctagaggccgttgatatggcgcttcgcgacgtgctgctgtccatagcgcagacgccgcaccggctgcgcaggagggcgctggtgacgtggacgccgacgcaggagctgaacgaggtgcgggaccggtccggggcgcgcatgaagcggcggctggagtggtacgacctcgtggggctcggcgtgggcggcatgctcggcgcgggcgtcttcgtcaccacggggagggtggcgcgcgacaccgcggggcccgccgtcttcgcgtcctacgtcgtcgccggcgtctccgcgctgctgtcgtccttgtgctacgccgagttctccgtgcgcgtccccgtcgccggcggcgccttcagctacctcagagtaacgttcgctagctacatcttgtcaggcgagttcgtggggttcttcggcggagcgaacattctgatggagtacgtgctgtcaaacgcggcggtggcgaggagcttcacggactacctggcatcgacgttcggggtcacggagcgcaacgcgtggaggatcgtcgtcgacggcatcgccgacgggtacaatgagctggacgtgccggccgtcgcgctcatccttctcataaccgtatgcctgtgctatagcaccaaggagagctcgatgctgaacatggtgctcacggtgttccacctgctcttcttcgccttcatcgtcgctgccggcctgtggaacggcagcgcgaggaacctcgtgcggccgcacgggctggccccctacggcgtccgcggcgtcctggacggcgccgccgtcgtctacttcagctacataggctacgactcggcgtgcaccatggccgaagagatccgggacccctcccgcgcgctccccgtcggcatcgccggctcggtgctcgtcgtgtccgggctctactgcctcatgtccgtcgccctctgcgtaatgctgccctacaccgagatatcggaagccgccccgttctcgtcggcgttcagggagaaggtggggtggaggtgggcgagcagcgtggttggcgccggcgcgagcatcggcatcgtggcgtcgctgatggtggcgatgctggggcaggccaggtacctgtgcgtcatcgccagagcgcgtctcgtgccgttgtggttcgccaaggtccacccttccacaggcacccccatgaacgccaccatctttctagggttctgcactgcatcattagcactcttcacggagctgcaaatagtgttcgagatgatatccatcggaaccctgctggtcttctacttggtcgccaatgcactaatctaccaccgatcgatgggtggtgccagtgggggatgacactgttcggcgcagtctccatagcaatcaccaccatcttccactgcacagcacggcaggacatcgccggaccctcgttggagtggtcggttcctctgatgccatggcctgccgctgcatctgtcttcctgaatgtgttcctgataaccactctcaaggtgagatcataccagaggttcggcatctggagccttgtgaccatagttttctatgtctgctatggggtgcactccacatactctgcagaagaaaatgagattgtcaatgcaatgatccatcatgcaaatttggacatatcttagcagtggcaggttaattatatgccagaagttacattagagctcaatagattggcaattaggccatcttggagatggtcctaggcctaaagatggtgcaaaagagtattttgctttaggttaatccctctttttttttcctgcttttgtgctttctgattggcccaaaactattggcatgtgcttactttttgctcgaggtacatatgcaggattgtgcaaggcatgtgtccgtttggccagtgatttgaaaatctatctattttcaccacaacaaatgacaatgccctagaatgcaggaaactatcaaacatcagcatgatgactgatctgttccagctagaaattactttcacctgcaactagccattcctgcagatagagcaggagtgagcatacaaaaaaaatgtatcaaagtttactggaaagcatatcctaaaaaatgtaaaagcactggtgtacttcataaaaatcattgtaattgaaccatgagaagctgaagttaatgattttgcttttctgtgtaactcatacatggagagaaataaacagaggaaaccaaaacgaaaactgtgtttagacttcagaataattactgatactatttcaatcacactatttccattagtatggagcaagagttcgctcagatagctttaacacatgaacacattgataccattcatctttcatgccatagagtttgatgcctaaaggcacacaattcacttgtgtgtttgagaaaagaatgacagttcctcgccaagaaaaaatagatcatacaagcacatcctctaaccttactggtccaggaaataactaggcgtgaatttcacaagaagcatagaagacatttttagttctgagaactaaataatctgtattcatgttataataaaaggaggctccatacaaatttcaaaagttacatcaagtccattcctaaagaagaacgtatttacaatttatcaagacatgtagactaatgaggtgcaaatattcaatagactaggctttgatacatgataagcctaaacaatggctgtcatacataattgtattgaaagttcaaggaccacgcatgatggaatgcgggagtaaagccgaacatcatggagcgaatccatgctttcaactcagcatgcctcatcgagtcaaggtacatacctcagttttatttcttaatgcacacctcaaatggtagcccaattgtcgaacagcacagtgagccaaggattggatgccagcatactaaggaccacactctgatggtgagtccgagatagtactaagtggatagtggtgccttcatctgcaccaaatccgctgagaaaaaacaaaactattagattgcagttctgaaccaataaataatgaactacatggaaaacttaagtacccatgtatttttctcaccagataagaagattctgaagaataacaaaactgtagaaggccatggaatacctatagttccaaaattgtcattcaaagtagctaaacttgcagatttgcagaaagct

SEQ ID NO: 17536 - DNA, 3609 bp, Zea Mays
cgtccacccaggcccagccacagatgaagaaagcgcaagccaccaggaggagctagcaaaagaaggaggaacgaagagaagagagaaattaacagctcgagagaaacggagctagatagtagcaggggcgctgctcgctagaggccgttgatatggcgcttcgcgacgtgctgctgtccatagcgcagacgccgcaccggctgcgcaggagggcgctggtgacgtggacgccgacgcaggagctgaacgaggtgcgggaccggtccggggcgcgcatgaagcggcggctggagtggtacgacctcgtggggctcggcgtgggcggcatgctcggcgcgggcgtcttcgtcaccacggggagggtggcgcgcgacaccgcggggcccgccgtcttcgcgtcctacgtcgtcgccggcgtctccgcgctgctgtcgtccttgtgctacgccgagttctccgtgcgcgtccccgtcgccggcggcgccttcagctacctcagagtaacgttcggtaggttaataattacgactctttcatttcctctcgcgccatggtttcacgctgctactgtacgtttaaaaggaaggaggaatcacttgaatcaattaatgaaacgtaacggtcagatatatgtgtaccgtaaattaaaaaaatgtgttcatgtcctaattaataataaaggacaggtacttaataaaagtggacaatgcaaagcaaaacccttctatgaatatgatccttcctagctagctacatcttgtcaggcgagttcgtggggttcttcggcggagcgaacattctgatggagtacgtgctgtcaaacgcggcggtggcgaggagcttcacggactacctggcatcgacgttcggggtcacggagcgcaacgcgtggaggatcgtcgtcgacggcatcgccgacgggtacaatgagctggacgtgccggccgtcgcgctcatccttctcataaccgtatgcctgtgctatagcaccaaggagagctcgatgctgaacatggtgctcacggtgttccacctgctcttcttcgccttcatcgtcgctgccggcctgtggaacggcagcgcgaggaacctcgtgcggccgcacgggctggccccctacggcgtccgcggcgtcctggacggcgccgccgtcgtctacttcagctacataggctacgactcggcgtgcaccatggccgaagagatccgggacccctcccgcgcgctccccgtcggcatcgccggctcggtgctcgtcgtgtccgggctctactgcctcatgtccgtcgccctctgcgtaatgctgccctacaccgagatatcggaagccgccccgttctcgtcggcgttcagggagaaggtggggtggaggtgggcgagcagcgtggttggcgccggcgcgagcatcggcatcgtggcgtcgctgatggtggcgatgctggggcaggccaggtacctgtgcgtcatcgccagagcgcgtctcgtgccgttgtggttcgccaaggtccacccttccacaggcacccccatgaacgccaccatctttctagggttctgcactgcatcattagcactcttcacggagctgcaaatagtgttcgagatgatatccatcggaaccctgctggtcttctacttggtcgccaatgcactaatctaccaccggtacgtgaaggtcggcacaaaccggcccctgcatgtcctcctcttcctgctgctcctcaccctgagctctctcggcttctccctctcgaggaagatcgatgggtggtgccagtgggggatgacactgttcggcgcagtctccatagcaatcaccaccatcttccactgcacagcacggcaggacatcgccggaccctcgttggagtggtcggttcctctgatgccatggcctgccgctgcatctgtcttcctgaatgtgttcctgataaccactctcaaggtgagatcataccagaggttcggcatctggagccttgtgaccatagttttctatgtctgctatggggtgcactccacatactctgcagaagaaaatgagattgtcaatgcaatgatccatcatgcaaatttggacatatcttagcagtggcaggttaattatatgccagaagttacattagagctcaatagattggcaattaggccatcttggagatggtcctaggcctaaagatggtgcaaaagagtattttgctttaggttaatccctctttttttttcctgcttttgtgctttctgattggcccaaaactattggcatgtgcttactttttgctcgaggtacatatgcaggattgtgcaaggcatgtgtccgtttggccagtgatttgaaaatctatctattttcaccacaacaaatgacaatgccctagaatgcaggaaactatcaaacatcagcatgatgactgatctgttccagctagaaattactttcacctgcaactagccattcctgcagatagagcaggagtgagcatacaaaaaaaatgtatcaaagtttactggaaagcatatcctaaaaaatgtaaaagcactggtgtacttcataaaaatcattgtaattgaaccatgagaagctgaagttaatgattttgcttttctgtgtaactcatacatggagagaaataaacagaggaaaccaaaacgaaaactgtgtttagacttcagaataattactgatactatttcaatcacactatttccattagtatggagcaagagttcgctcagatagctttaacacatgaacacattgataccattcatctttcatgccatagagtttgatgcctaaaggcacacaattcacttgtgtgtttgagaaaagaatgacagttcctcgccaagaaaaaatagatcatacaagcacatcctctaaccttactggtccaggaaataactaggcgtgaatttcacaagaagcatagaagacatttttagttctgagaactaaataatctgtattcatgttataataaaaggaggctccatacaaatttcaaaagttacatcaagtccattcctaaagaagaacgtatttacaatttatcaagacatgtagactaatgaggtgcaaatattcaatagactaggctttgatacatgataagcctaaacaatggctgtcatacataattgtattgaaagttcaaggaccacgcatgatggaatgcgggagtaaagccgaacatcatggagcgaatccatgctttcaactcagcatgcctcatcgagtcaaggtacatacctcagttttatttcttaatgcacacctcaaatggtagcccaattgtcgaacagcacagtgagccaaggattggatgccagcatactaaggaccacactctgatggtgagtccgagatagtactaagtggatagtggtgccttcatctgcaccaaatccgctgagaaaaaacaaaactattagattgcagttctgaaccaataaataatgaactacatggaaaacttaagtacccatgtatttttctcaccagataagaagattctgaagaataacaaaactgtagaaggccatggaatacctatagttccaaaattgtcattcaaagtagctaaacttgcagatttgcagaaagct

SEQ ID NO: 17537 - DNA, 547 bp, Zea Mays
cagctccccaccataaggaaacgctgagggcgctgtgctgctaacaaataaatgctacagattgttggtcaacagccaaggtcttgcattgctgacggcctgaacagaacaactgacactccagccttttggtggcaaggagcagctgtgcgtgcctcgagcaaatcgaggaaaggtgctggcccagatgaaactgaaggaggagcaaatagagagagacttataccattgaccccatcttctagtgcctacatatacaagtagcatggcttagcatacagacagtagctttctctgtagagggtgtatctaagaaccagctggtcgactgcagcaatcacatctcacgtgtacccagaccaccaaagggataggcagatttgtggactgcaagactcaaagcgcaatcaacagagcgtgagattaaatacactgctgtctgcttcccctcttggcttccaagtttcaacatctgaaatgatgaaagggggttgttctttcagtccaactcaccgaaaactcgacctgcctgtgggcagaggcgaag

SEQ ID NO: 17538 - DNA, 1359 bp, Zea Mays
gtcaatccacaaacaaatctattttctattttctcgcccctaagatcacaatacttgattacttccatatatataaagtgggacagggaagacgggcgcaagagcccagcccaaaccacaaccaagaactaccgcccaccgggcaccggccgcagttccccttctcctcgcccccaccacgctaaaccctcctctttccttctcccacccgaacaacagcaggagaccggtattccgcatccctacccagcaatggtggacgcggggcaagcggcgaagcgggggaaggccacggatgagaaggggcagccgtcggcggccgcgcggacgcctcgccaacacacgccggatcacccaccctattgctggatgatcggcgaggcaattgacgagctggctgaggacggcggctcggaggaggactccatctcggccttcatccgcgccaggcaccctggcgtgccccccgcgcacgataggttcctccggcactacctcggcaagcacgtcgccgagggattcttcctgcgaaacgctgcggggcggttcgagcgcaaccccgaggagaacgcagccgaggagctcccggtggagcagactgaggccggctcgtgcaacccggcttccgttgggtctttggtggtagatgccaagcatggccggggcaggccgccgaaggatggctatccttcgacaccgcctgaaggcaggaaggatggcggcgcgggtgctcagtggatgacaccacatgcagacaaggacgaaagccgagcaccatccttgaagcccaagcgccgtcgccggcttcgcaggcaggggatggccacgaccgctgacagctccggcgaagcactcgtcgcaggcaagaaagatagcagggaggagcatgagccaccgcgtgagctggcactggtgatcctcgatgatagctccaacacaccaaccatggacaaggcatgcaccaaggtccctccaaccacgcgacctgtggatggtgggcagcctctcgatctgtcagctacacccaagggacgtcgccggcaacgcaaatcagtcgcggtggctactggtggccgctctgctcttacacctggcaagaagctaggttgtaaggtctcatctgcatcgcccaagtttgcaccggtggttgccgctggctgtcgtactccggcttcagttgctgaccagggcggcaggaaagcatcagcgacgctgaagcggcacgggcggcctcgcaaactgtacccagttagcgctgacgagatttcagatgatccagagattgctttgctcgcgttgccttctccagacactagcggcgtcatacccgtagctccaaaacttggctacctgacctga

SEQ ID NO: 17539 - DNA, 1767 bp, Zea Mays
atgcggtttcttaataatatggttcagcacagtcacatgcttgggagtccctagtgccatcaagaaagaggagctgtgtcacccgtccgaagccttcacctgttgaaaagcttgcaaaagagctgaactatatcatgcatgaagagaagttatattacctttcagaatcatcagaggaagacctactataccatagtgaaactcctatcggttcctttgaaataggctctggaagtgtgcttctaagacatccaaactcgaaatcactggaggaagaatcaaaaacaagctcaattcctgcagataataaatcatatattacaagtgaatcctattcagactctgcctcatttgtcgttcacagtggaaacaaggcagcaattaacttaaatcttccaactgcaaggccgaagaagtcgccgctgcatatggaagacaatgctagaagggataaacttcattatgagaatcagcatgtcctggagagtgttgattcgcctttagtttcagtagatttagaggatgttataaactatactaacttcatgaaatatctaactaaagaggatcgacgtcagttgctcaaatttcttcctcctgtggactccttaacacctcctgaaagccttagaagcatgttcagttgtatccaattctctgatgctattgacagctaccagatgctgcttcgagagggaattctcgacccatccttatgtggtgatgaggaatggaagaaagtgaagacgcttgccttaactaatttaacaaaatgcagttggctggagtgctataaacagaaaaagctaaagaaaccgggggagtggggggcatcagtggaccggaaggctttaccaagtctactatgaaaccactcaaaagaccccgtgacacccactttcagagtgacgcaggttaaatattagttcctctgatcttgatttgcatcaagtttctagttatgacatccaaaaatgtcttacatagtatattcatatttcactatctccttatgtcagtgacacaaagaagggttcttatttgctttgcttgtaaacatgcagaactagatggtaccatgaggagtcctctaagagttctaaaatccggggctttggctcttcagtttgaaagttcatctttgccaaaatctggctatgccaccgaagattcaacctgcactggaggagcacctaatctattcatgttacccctagaaaagctaccattactggtcccttctcagtatgccgtctctgatcaagacttgctgctggaaatacctctcaacgcacgacacccagaggcagaacttctctgtcaaccatctcagctgatgagctctataaccagcagctccacctctatgggtggggttgctgaaggagaagggtacctgaagcaaccatagtcttaggtcacatcagcaagcagcttaggaacagccagtagttgcagtttactttaacctcctggatcgtgtcgcctctctgtgccgatcaccaatgggccttaagtgtccttatttacataacaatgtgcttcgtatgccaacttggcgaattgtcggttcagctaatatttgtagcatgcttttggatcggctttctgctggttttctgtaacatatggcgcatggagaaagcattaacttatctctgtatggaaaaaaaatatcaccatattgtaggaaaatgaaaaaagaggataatggagagttgtttatgtgatattgttgtttgctatggatgttgaagtgttagttag

SEQ ID NO: 17540 - DNA, 1980 bp, Zea Mays
ctgggaagtgggactcagacgaaatctttgaagtactccgctgtggcggaatgggccaccagataagccggtgctctgcaatgcgtgtggctcgaggtggagaacgaagggttcattggcaaactacactccaatgcatcgcaatgacaatattgatgatgatgaacccagagttagcaagctgaagccaccgacgtcaaagttgaagtcacagaagaaaaaaacaaatcacattataatggagaatggaccattctctggtcagaatttccgaaagatgggggatgttgacccaagctatcggtctagttcaggatctgcagtatcatactctgagagttgtgccccatatggtgctgctgatgcaagtgaaatgactggttcagcacagtcacatgcttgggagtccctagtgccatcaagaaagaggagctgtgtcacccgtccgaagccttcacctgttgaaaagcttgcaaaagagctgaactatatcatgcatgaagagaagttatattacctttcagaatcatcagaggaagacctactataccatagtgaaactcctatcggttcctttgaaataggctctggaagtgtgcttctaagacatccaaactcgaaatcactggaggaagaatcaaaaacaagctcaattcctgcagataataaatcatatattacaagtgaatcctattcagactctgcctcatttgtcgttcacagtggaaacaaggcagcaattaacttaaatcttccaactgcaaggccgaagaagtcgccgctgcatatggaagacaatgctagaagggataaacttcattatgagaatcagcatgtcctggagagtgttgattcgcctttagtttcagtagatttagaggatgttataaactatactaacttcatgaaatatctaactaaagaggatcgacgtcagttgctcaaatttcttcctcctgtggactccttaacacctcctgaaagccttagaagcatgttcagttgtatccaattctctgatgctattgacagctaccagatgctgcttcgagagggaattctcgacccatccttatgtggtgatgaggaatggaagaaagtgaagacgcttgccttaactaatttaacaaaatgcagttggctggagtgctataaacagaaaaagggagctaaagaaaccgggggagtggggggcatcagtggaccggaaggctttaccaagtctactatgaaaccactcaaaagaccccgtgacacccactttcagagtgacgcagaactagatggtaccatgaggagtcctctaagagttctaaaatccggggctttggctcttcagtttgaaagttcatctttgccaaaatctggctatgccaccgaagattcaacctgcactggaggagcacctaatctattcatgttacccctagaaaagctaccattactggtcccttctcagtatgccgtctctgatcaagacttgctgctggaaatacctctcaacgcacgacacccagaggcagaacttctctgtcaaccatctcagctgatgagctctataaccagcagctccacctctatgggtggggttgctgaaggagaagggtacctgaagcaaccatagtcttaggtcacatcagcaagcagcttaggaacagccagtagttgcagtttactttaacctcctggatcgtgtcgcctctctgtgccgatcaccaatgggccttaagtgtccttatttacataacaatgtgcttcgtatgccaacttggcgaattgtcggttcagctaatatttgtagcatgcttttggatcggctttctgctggttttctgtaacatatggcgcatggagaaagcattaacttatctctgtatggaaaaaaaatatcaccatattgtaggaaaatgaaaaaagaggataatggagagttgtttatgtgatattgttgtttgctatggatgttgaagtgttagttag

SEQ ID NO: 17541 - DNA, 1449 bp, Zea Mays
aatctaagacctactataccatagtgaaactcctatcggttcctttgaaataggctctggaagtgtgcttctaagacatccaaactcgaaatcactggaggaagaatcaaaaacaagctcaattcctgcagataataaatcatatattacaagtgaatcctattcagactctgcctcatttgtcgttcacagtggaaacaaggcagcaattaacttaaatcttccaactgcaaggccgaagaagtcgccgctgcatatggaagacaatgctagaagggataaacttcattatgagaatcagcatgtcctggagagtgttgattcgcctttagtttcagtagatttagaggatgttataaactatactaacttcatgaaatatctaactaaagaggatcgacgtcagttgctcaaatttcttcctcctgtggactccttaacacctcctgaaagccttagaagcatgttcagttgtatccaattctctgatgctattgacagctaccagatgctgcttcgagagggaattctcgacccatccttatgtggtgatgaggaatggaagaaagtgaagacgcttgccttaactaatttaacaaaatgcagttggctggagtgctataaacagaaaaagggagctaaagaaaccgggggagtggggggcatcagtggaccggaaggctttaccaagtctactatgaaaccactcaaaagaccccgtgacacccactttcagagtgacgcagaactagatggtaccatgaggagtcctctaagagttctaaaatccggggctttggctcttcagtttgaaagttcatctttgccaaaatctggctatgccaccgaagattcaacctgcactggaggagcacctaatctattcatgttacccctagaaaagctaccattactggtcccttctcagtatgccgtctctgatcaagacttgctgctggaaatacctctcaacgcacgacacccagaggcagaacttctctgtcaaccatctcagctgatgagctctataaccagcagctccacctctatgggtggggttgctgaaggagaagggtacctgaagcaaccatagtcttaggtcacatcagcaagcagcttaggaacagccagtagttgcagtttactttaacctcctggatcgtgtcgcctctctgtgccgatcaccaatgggccttaagtgtccttatttacataacaatgtgcttcgtatgccaacttggcgaattgtcggttcagctaatatttgtagcatgcttttggatcggctttctgctggttttctgtaacatatggcgcatggagaaagcattaacttatctctgtatggaaaaaaaatatcaccatattgtaggaaaatgaaaaaagaggataatggagagttgtttatgtgatattgttgtttgctatggatgttgaagtgttagttag

SEQ ID NO: 17542 - DNA, 979 bp, Zea Mays
cccaacaaggcctgccactaactccgcgcacgcaacggcgaggtcgacgccgccggtcggcgatcgcgcactctgtctctgccggagtgccgccgtgctggatcttccgcccggcgctcctcagtcgaccttccgctcccgcccatggcacgaccctaagcccgccgctgtcggtggcggcggctggctctcagagtgggggtgggaccttatgctcggatcgatcgccgcgttctacgccgtcatggcgccctacaccaaggtggaggagagcttcaacgtgcaggccatgcatgatattctttatcacacttatcacatcgagatggtgacttactgagtcaaatgctagcaactctacaaatttgctttagtataatatccttatatttattgtttggtttttactatgtttttttcctggtttttgcagtatgtcatttagaatttcctggagttgttcttcgaacattcatagctagactaacattgagttgtgttactttgacgagtttgagacttctcagagctcagatactctaaggaggagcaaattcccgttgaagaatttgagagaaggaatttcacctatctactgaagacagcgagacacccaggttcctgtcgcaagcaggaccacaaaccgccaacggtgaagatgtgcagtcgtctgtgtgatacggagtagtatgggtcttgccatgaagctacctgcaaatctaggatgggggttcggttctcccccagatctcaacgcagaaaccaaaccacagcttttaagagattgccatttttagttgaaaatttatgtaccgttttagacccggaagaaagtacacgcggcctcatcttgaaatggttttcttttttgggtgggtggggggcataacagtcttatataaccagcttgctcaatttaatttttttcctgtttgagacatctttcggattttatatataacaggagctgtcagacttt

SEQ ID NO: 17543 - DNA, 1018 bp, Zea Mays
cccaacaaggcctgccactaactccgcgcacgcaacggcgaggtcgacgccgccggtcggcgatcgcgcactctgtctctgccggagtgccgccgtgctggatcttccgcccggcgctcctcagtcgaccttccgctcccgcccatggcacgaccctaagcccgccgctgtcggtggcggcggctggctctcagagtgggggtgggaccttatgctcggatcgatcgccgcgttctacgccgtcatggcgccctacaccaaggtggaggagagcttcaacgtgcagtatgtcatttagaatttcctggagttgttcttcgaacattcatagaccttgtagtcttgatgtgaaattatggcagtaacatgatgtaccgactactgtctgcatttttcaggagcatttgttatctctattctctcatcaccgctagactaacattgagttgtgttactttgacgagtttgagacttctcagagctcagatactctaaggaggagcaaattcccgttgaagaatttgagagaaggaatttcacctatctactgaagtgaaagaacccaaggtgtttgcacctgggaacttgagagaccctgacattctttcactgaattggcctggttgtccttgaggacaggacagcgagacacccaggttcctgtcgcaagcaggaccacaaaccgccaacggtgaagatgtgcagtcgtctgtgtgatacggagtagtatgggtcttgccatgaagctacctgcaaatctaggatgggggttcggttctcccccagatctcaacgcagaaaccaaaccacagcttttaagagattgccatttttagttgaaaatttatgtaccgttttagacccggaagaaagtacacgcggcctcatcttgaaatggttttcttttttgggtgggtggggggcataacagtcttatataaccagcttgctcaatttaatttttttcctgtttgagacatctttcggattttatatataacaggagctgtcagacttt

SEQ ID NO: 17544 - DNA, 1060 bp, Zea Mays
cccaacaaggcctgccactaactccgcgcacgcaacggcgaggtcgacgccgccggtcggcgatcgcgcactctgtctctgccggagtgccgccgtgctggatcttccgcccggcgctcctcagtcgaccttccgctcccgcccatggcacgaccctaagcccgccgctgtcggtggcggcggctggctctcagagtgggggtgggaccttatgctcggatcgatcgccgcgttctacgccgtcatggcgccctacaccaaggtggaggagagcttcaacgtgcaggccatgcatgatattctttatcacacttatcacatcgagatgtatgtcatttagaatttcctggagttgttcttcgaacattcatagaccttgtagtcttgatgtgaaattatggcagtaacatgatgtaccgactactgtctgcatttttcaggagcatttgttatctctattctctcatcaccgctagactaacattgagttgtgttactttgacgagtttgagacttctcagagctcagatactctaaggaggagcaaattcccgttgaagaatttgagagaaggaatttcacctatctactgaagtgaaagaacccaaggtgtttgcacctgggaacttgagagaccctgacattctttcactgaattggcctggttgtccttgaggacaggacagcgagacacccaggttcctgtcgcaagcaggaccacaaaccgccaacggtgaagatgtgcagtcgtctgtgtgatacggagtagtatgggtcttgccatgaagctacctgcaaatctaggatgggggttcggttctcccccagatctcaacgcagaaaccaaaccacagcttttaagagattgccatttttagttgaaaatttatgtaccgttttagacccggaagaaagtacacgcggcctcatcttgaaatggttttcttttttgggtgggtggggggcataacagtcttatataaccagcttgctcaatttaatttttttcctgtttgagacatctttcggattttatatataacaggagctgtcagacttt

SEQ ID NO: 17545 - DNA, 1358 bp, Zea Mays
cgcggggacggaagccaggccaaactagagaagcgccaagttgccagccaaacgaacaaagctaaaacagggcgggggcgtcccttcgtggggacagccctcgtggtcgatccgcccgtgggatctcgcgcacgccaggattggagagctgcggcctccctccgccccaaccagccatgggttcccgcgttgattgcggcgcttagacgcggaggaggagagagacacggggagggggggaggccgaggcctaggaggcgtagcgctgtgcagggcgcgagcgcgttcgttcggcatggaacagaacgccggctcgttcctcgccgtgcgtcgcctctccggtggcgccatccaccaccatcgtcaccactcttccccgggaagagtgcttgaataggttgcagaaccggatagaggtgcagtatgatggttcaaatctggagcatcagaaagcactggaagccctttggcgttcttcttttcctggaactgaacttctagggttagtatcagaccagtggaaggagatgggatggcaagggaaagatccatctacagatttcaggggcggtggttttatatctttggagaatttactgtatttctctaggaactatccaaaatccttccaggagctccttcgtaagcagaatggtgatagagcattgtgggaatatccctttgctgtagctggtgtaaatattacattcatgctgattcagatgcttgaccttcaagcagctaagccaacgtcgttggttggagcggttttcctaaatctactcttagaaaatgatcgagcgttcgacattctttactgcataaccttcaaactgatggatcagaaatggcttgaaatgcacgccagttacatggatttcaatacggttattaaatcaacacggcgccagctcgagagggagctgttgctagaagatatccagagaatcgaggacatgccatcgtacaggtttctcgcctgctagcaattgaacctcctggtcgtaccgaacattgccacaagatagtgcagctccatacactcgaagaagaagctgagaggttggaaccacgtacaccgagcgaagggtgaatctaggttcatggactgtggatgtgttgttgctttgaattgcgctgtcgtgtttacctactccgagtccgacaacagcctcgacgccgagtgccttttcgtttcaacgatgtgctatatcttggggccacggaacggcagatcctagctttctttgtaaacaagaggatgtggaaagttggctgcgtatgctttgtggccatgtgcatggataatcttgctgctcgcctgaaagaaaaaaaggccgatcttaagactgattctg

SEQ ID NO: 17546 - DNA, 1464 bp, Zea Mays
cgcggggacggaagccaggccaaactagagaagcgccaagttgccagccaaacgaacaaagctaaaacagggcgggggcgtcccttcgtggggacagccctcgtggtcgatccgcccgtgggatctcgcgcacgccaggattggagagctgcggcctccctccgccccaaccagccatgggttcccgcgttgattgcggcgcttagacgcggaggaggagagagacacggggagggggggaggccgaggcctaggaggcgtagcgctgtgcagggcgcgagcgcgttcgttcggcatggaacagaacgccggctcgttcctcgccgtgcgtcgcctctccggtggcgccatccaccaccatcgtcaccactcttccccggctgaggtcgtgggcgtgtccactgcgtggctcggtaaggggctttcatgcgtctgcgcgcagaggagggagagcgacgtgcgcctgtccttcgatttgagtcccattcagagtgcttgaataggttgcagaaccggatagaggtgcagtatgatggttcaaatctggagcatcagaaagcactggaagccctttggcgttcttcttttcctggaactgaacttctagggttagtatcagaccagtggaaggagatgggatggcaagggaaagatccatctacagatttcaggggcggtggttttatatctttggagaatttactgtatttctctaggaactatccaaaatccttccaggagctccttcgtaagcagaatggtgatagagcattgtgggaatatccctttgctgtagctggtgtaaatattacattcatgctgattcagatgcttgaccttcaagcagctaagccaacgtcgttggttggagcggttttcctaaatctactcttagaaaatgatcgagcgttcgacattctttactgcataaccttcaaactgatggatcagaaatggcttgaaatgcacgccagttacatggatttcaatacggttattaaatcaacacggcgccagctcgagagggagctgttgctagaagatatccagagaatcgaggacatgccatcgtacaggtttctcgcctgctagcaattgaacctcctggtcgtaccgaacattgccacaagatagtgcagctccatacactcgaagaagaagctgagaggttggaaccacgtacaccgagcgaagggtgaatctaggttcatggactgtggatgtgttgttgctttgaattgcgctgtcgtgtttacctactccgagtccgacaacagcctcgacgccgagtgccttttcgtttcaacgatgtgctatatcttggggccacggaacggcagatcctagctttctttgtaaacaagaggatgtggaaagttggctgcgtatgctttgtggccatgtgcatggataatcttgctgctcgcctgaaagaaaaaaaggccgatcttaagactgattctg

SEQ ID NO: 17547 - DNA, 1404 bp, Zea Mays
cgcggggacggaagccaggccaaactagagaagcgccaagttgccagccaaacgaacaaagctaaaacagggcgggggcgtcccttcgtggggacagccctcgtggtcgatccgcccgtgggatctcgcgcacgccaggattggagagctgcggcctccctccgccccaaccagccatgggttcccgcgttgattgcggcgcttagacgcggaggaggagagagacacggggagggggggaggccgaggcctaggaggcgtagcgctgtgcagggcgcgagcgcgttcgttcggcatggaacagaacgccggctcgttcctcgccgtgcgtcgcctctccggtggcgccatccaccaccatcgtcaccactcttccccggctgaggtcgtgggcgtgtccactgcgtggctcggtaaggggctttcatgcgtctgcgcgcagaggagggagagcgacgtgcgcctgtccttcgatttgagtcccattcaggaagagtgcttgaataggttgcagaaccggatagaggtgcagtatgatggttcaaatctggagcatcagaccagtggaaggagatgggatggcaagggaaagatccatctacagatttcaggggcggtggttttatatctttggagaatttactgtatttctctaggaactatccaaaatccttccaggagctccttcgtaagcagaatggtgatagagcattgtgggaatatccctttgctgtagctggtgtaaatattacattcatgctgattcagatgcttgaccttcaagcagctaagccaacgtcgttggttggagcggttttcctaaatctactcttagaaaatgatcgagcgttcgacattctttactgcataaccttcaaactgatggatcagaaatggcttgaaatgcacgccagttacatggatttcaatacggttattaaatcaacacggcgccagctcgagagggagctgttgctagaagatatccagagaatcgaggacatgccatcgtacaggtttctcgcctgctagcaattgaacctcctggtcgtaccgaacattgccacaagatagtgcagctccatacactcgaagaagaagctgagaggttggaaccacgtacaccgagcgaagggtgaatctaggttcatggactgtggatgtgttgttgctttgaattgcgctgtcgtgtttacctactccgagtccgacaacagcctcgacgccgagtgccttttcgtttcaacgatgtgctatatcttggggccacggaacggcagatcctagctttctttgtaaacaagaggatgtggaaagttggctgcgtatgctttgtggccatgtgcatggataatcttgctgctcgcctgaaagaaaaaaaggccgatcttaagactgattctg

SEQ ID NO: 17548 - DNA, 2516 bp, Zea Mays
gagtttggcgcatatgggcccacttgtcagccgcgttcttcgaggtactactatccccaacctcgccgattctccgttctccacagtcctccacactcgccgagcgacaccgcgcgggacgaccgagcaagcagagcatgcaaccgtcgtgcctgggcgcatgcagcggtggaggactagcactttccgcccgccgcctccgcgccccctcctactgccgcgtcgcgccgcatagggcttccgcctcgtgctccgccggtggcggcggcaaggcatcgccgcgggggaaggacaacgtctggagcgtcgataacgaccgtgccgccaaggaggcggtccggggcccgaagcaccgccgcaggaaacgccccagcggtcgccgcctgccgccgccgaggaggaaggggatggatgcggggtcgagggttctagtgtctggagccatgctcgtggaggtcgaaactgtgctccaaactcaggaacctgttataaagccttcttgggatacatttgcaagtagtttaactggtaactggaagggtgttggagctatcttctcgccaatcacagcagagatgggagcctgttggggttgggaacaaagaagagtacctttatgactgctacactcttttctcacatttgagagatcttttgatgggtgggtcatgggctctgagatccgaaggaaaacaaattggggtcccaatcaatccgttttggggaagctgagaagcaaatcacatcatatgatgggtggggagtcaaagcacttccagtggaaagggaattgctgatttaccttcatatgagtctttttgatcttaacagggagtgctgtgcttgacgaagaaactttttctatggagcctaggaattgtattttttgaggacggatcatactctagaggtccagttgatatagcaattggtgaatatgatgaatctaaatacttcctttcaccaacatataagtttgagcaatgccttgttaaaggttgccacaaaagattgcggattgtgcatacaattgagtttaacgaaggaggagctaacatacaaattgtaagggttgctgtgtatgaagaaaaatgggccagcccagcaaatatccatgttgaagatgatacacttgttgaccttaaaccattctctcaaagaagccggaccaaaccgtcagaactgacaggctcctggaaagtatacgaagtcagtgcaacgccaattttcagtgataaagtgcaagaactagagggcggttctccattggtctacttgtgcatggagacggtgaagaagagaaacctgccagagagttcagttttctttggggaggaggagatgctcgacgtgcaggatgtcaccgtgctttggttacctggtggcgtcactgcctatgttgacatcagcgaagacggcatactctgtatcggagttgggtggtactccgaagaaggtatcaacctggtgatggagagagactatggaaccgatgggaggctcagggaggttcggtcgaaaactgaagtaaagcgcaggaagagtgcttgaataggttgcagaaccggatagaggtgcagtatgatggttcaaatctggagcatcagaaagcactggaagccctttggcgttcttcttttcctggaactgaacttctagggttagtatcagaccagtggaaggagatgggatggcaagggaaagatccatctacagatttcaggggcggtggttttatatctttggagaatttactgtatttctctaggaactatccaaaatccttccaggagctccttcgtaagcagaatggtgatagagcattgtgggaatatccctttgctgtagctggtgtaaatattacattcatgctgattcagatgcttgaccttcaagcagctaagccaacgtcgttggttggagcggttttcctaaatctactcttagaaaatgatcgagcgttcgacattctttactgcataaccttcaaactgatggatcagaaatggcttgaaatgcacgccagttacatggatttcaatacggttattaaatcaacacggcgccagctcgagagggagctgttgctagaagatatccagagaatcgaggacatgccatcgtacaggtttctcgcctgctagcaattgaacctcctggtcgtaccgaacattgccacaagatagtgcagctccatacactcgaagaagaagctgagaggttggaaccacgtacaccgagcgaagggtgaatctaggttcatggactgtggatgtgttgttgctttgaattgcgctgtcgtgtttacctactccgagtccgacaacagcctcgacgccgagtgccttttcgtttcaacgatgtgctatatcttggggccacggaacggcagatcctagctttctttgtaaacaagaggatgtggaaagttggctgcgtatgctttgtggccatgtgcatggataatcttgctgctcgcctgaaagaaaaaaaggccgatcttaagactgattctg

SEQ ID NO: 17549 - DNA, 811 bp, Zea Mays
tatgaataatcaagtacttattaaaaaagacgattgtgcttacattttcaggacggatcatactctagaggtccagttgatatagcaattggtgaatatgatgaatctaaatacttcctttcaccaacatataagtttgagcaatgccttgttaaaggttgccacaaaagattgcggattgtgcatacaattgagtttaacgaaggaggagctaacatacaaattgtaagggttgctgtgtatgaagaaaaatgggccagcccagcaaatatccatgttgaagatgatacacttgttgaccttaaaccattctctcaaagaagccggaccaaaccgtcagaactgacaggctcctggaaagtatacgaagtcagtgcaacgccaattttcagtgataaagtgcaagaactagagggcggttctccattggtctacttgtgcatggagacggtgaagaagagaaacctgccagagagttcagttttctttggggaggaggagatgctcgacgtgcaggatgtcaccgtgctttggttacctggtggcgtcactgcctatgttgacatcagcgaagacggcatactctgtatcggagttgggtggtactccgaagaaggtatcaacctggtgatggagagagactatggaaccgatgggaggctcagggaggttcggtcgaaaactgaagtaaagcgcaggggtcgatgtacttcatagctaagctgtaacttttgttgcctatgtagaatgtgaatgttctggtttgaacgataagaaaaatgagcttaaaatccattctcatacgccacaa

SEQ ID NO: 17550 - DNA, 3009 bp, Zea Mays
ctcatcacatcgatcccgtccgcccttttccagctccggcccagcggagcctccgggcgctggcttcttgccctgccccgccccgcgctgcgcgctccacctccgacgcgcgcgcggcggagctcgatccgagcgcggtgggccaatgcgaacaccaaaggcagatgaatcgcttcccctcccctcccgatcggccgtgccgtactgccgtcgtactagccagccgggtcaaatacagtcacacagggagaggagagataagctagaaacagaggggcagatagcagcgcggatagatccccgcctcctctccactctccccagcaaacaaccaaaagcagccagccagtcgccgccgcgcgggaccgcgtcgcatcaaagccaccgcatccaacagggacaggcaggcgcacgctcggaagtggaggcgtcgtccaagacgaagaggaggaggaggaggaggaggccagggcgtagctaggtatggagttcgcgagctcttcgagtaggttttccaaagaggaggaagagcaggaggaggaagaggacgaggaggtgtccccgcgcgagatccccttcatgacagcggcagctacggccggcaccggagccacctcctcctcgccctcgccttccgcggcagcctcggcgtcagcgtcgagttcggctgctgccctccgctcgagcggcggtgggggcgggggcgacgacgacatggaggtggtcgagaaggagcacatgttcgacaaggtggtgacgcccagcgacgtggggaagctcaaccggctggtgatcccgaagcagcacgcggagaagtacttcccgctggacgcggcggccaacgagaagggcctcctgctcagcttcgaggaccgcgccggcaagctctggcgcttccgctactcctactggaacagcagccagagctacgtcatgaccaagggctggagccgattcgtcaaggagaagcgcctcgacgccggggacaccgtctccttctgccgtggcgccgccgacgctgcgcgggaccgcctcttcatcgactggaggaagcgcagcgccgactcctcccgccacccgcaccgcatgctgccacgcctcccgctccacatgccgccactcgcgtcgccctacggctatggcccctggggcggcggcgcgggcggtttcttcgtgccgcccgccacactctacgagcaccaccgcttccgccaggccctcgacttccgcaacgtcagcgccgcggccgcgccggccaggcagctcctcttcttcggctcagccggcatgcccccgcgcgcgtccatcccgcagcagcagcagccgccgccgccatctctgcacagcattatgatggtgcaacccagccccgaggccacggccggcctgcccatgcttctcgactcggtgccgctcgtcaacagcccgacggcagccgcgaagcgagtccgcctgttcggggtcaacctcgacaacccgcagccaggcagcagtgccgagtcaagccatgacaccaacgcattgtcgctgaggatgccgggatggcagaggccggggccattgaggttcttcgagtcgacgcctcagcgcggcgccgccggtgcagcagctggcgctgagtcatctgcagcctcgtcgccgtcgtcaccgtcgtcctccaagagggaagcacattcgtcagtggatctcgatctgtgagcgagatcgacccagcaggcgacttcgatcgatcgggagagtataaaaggaaaattgaaaaattcttccttccgtcgctaccttcttcgccttttgatatttcattataactttttgatgataggatctatagagtagtcttcttcttaacacttgttctccattttttgtttcggccattcaaattcttgtgttggctttacaatatatataggtacgtatatagagaattaagttagacgaattaatcaattgttattgctttcatatatggtttgaaatctgactcagttttaccttcgctactattactttgtccttttttgctcgtgccattatattggactccttaaggtagtttttgttgggcaattccgattgttgtatgtcccaacatatgataacaccccttcaaattcgcactctccacagcatcactgccaagatctgatgcgctgcaatacataatgtgcatttcattgcattatatatgtatgatctgttctcgtcctaagattggagttgcaaccgcagcgttctcagggcatgacaacaacattgacagtccattagcagcagtcaacttacagcaggcggcaaagccaatatggagctagctatagaagcattaatttgcaggcagttatcaggcaccagcacaagcaaaatgaaggcttctcttgtggttttacgcagggtcaactgaaaattaaccatgcgcgacgtgggctaaaatcacgtgtaatttggtttgtctgggccttgagtggtatagactcaagagttctttatgcccctggcagtctgtaaaaggagaggttgagccagaggacgatttattggggaggagccgaagagggccagcctaactgttgctgtagtagaaggaacagtgctgcggtgatgtttgcacctctctcatggagatggagacatggagtagccttggttgcgttctgtgttcttgtcctttgtgtgccagacagggaggagagagagagcctgtacatcaccgtcccttttcctctctcctttcactgcagagtgagtaggtacggcgcgtgtgtgcttgctgggaacaatggtggcaaatgccacgacgccacgtaccggcctagcaataggtatccttaactagtaaggtgtgtagccgtgtagggagggaaggggatctttttgcgctgctgaggctagaatagacatgtgtagatgctgcgtctactgacaaaagtgcctttggttcgttgtaagctggaaaagacaacggggagttatatggggaggtaaagaaaaacagaagagacaggagag

SEQ ID NO: 17551 - DNA, 2181 bp, Zea Mays
acagcagcagcagagccgcgcatctccttcctcgcgaaaccgagtaggtggaggccttatcctcttcgttgccacgacccacgacgcagaccccaacccactcccactccgacaggaaaagaaaagggaggacgacggagtcgctcgccgtagatcggatgagaacagagatggactgctgtagataatgctacacttttccggggttttctctctctctctctcccgcgagctgactgacggctcctttatctcctcccgcgtgcatcccccagctactcgtcattcttatccgcctgcctccgccctccgccaccgctacctttatagctctagcttccttcctccattccctcctcatgccttcgtcttcgtcgtcctgcagccccgcaatagagcatcgtacttcatcgttccacttacatcgtttgttcgttcgttcttccgcgtgatctgcttgggagttgggggcaatggaggcctacgtcctgttcgcgcgcgccaaggagcaggaggaggacatcggctgcccgtccgagtcgtccgcggcgcgttccacgtcctcgtcgtcggacggggtggacctcgccgacgacgccagctcgtccgggtccacctgccacttcgagatggcctccctcatgacgcacctcccgatcaagaggggcctgtccaagttcttcgccggcaagtcgcagtcgttcgcgtcgctggcggcggtgggcggcatcgatgacctgcccaagccgccggcgaagcggctcaagacgtcgtggagctgcggcgtcggcctcgaggacgcgcgccgcggccctccctccgtgacgaccgccaataagcaggcgtccagcagggcacggctgacgccgtcggcgctcggctcgacgccgagaaggctggtgcgagcgcggccgcttgtaacggcgagaccggaggcggcggccgggaagcccctgttatttgcatagggggaagggattcgcctgcctaccaagctaacatgttacaaaggtgtccttttttcatggatttgacccagtttgcaatgcatcatattgaacacgcttgataaatgtgctgccgatagttttagaggtcttagtgatgctacgctgactattgcctaggagtacaagtacacaaaattacaaagacaaggtgagctcccctattctctacttttttttttttgaacaagcaggcactttcttgccgtttttttgctttttgactttttttgaaaaattttcacaactacacactttctagtttgaattcacgaaatgaacctttactcggcgccattatcattgacgtcaaggtcacacgtctcaacgtcaatataaataacgtccagatctagctctggtaagtcgatctggcgcctatatggcaggatgtcagcgccgtggttattggtgccgacctccttttcaagaaacggcggctcggctcatatctcaacaagtggtgcgcgtggctcgtatgtgttatatatatatattagtatatctatgtatttatattaatataacatataatttattaatattataatatatatattataggcagttgttcttgcttcgctacggtatttttctataaattggttagagtaaatttatttggtttctgttgtaacttagcaacatatataatgaaagggaaatatggtcaaaccttttactaaatgattttggtggttgaaatgcccaacacaaataattggactaactagtttgctctagttgatcatttcacaggtgcataagttcatctacaagtattctaaatcgactgtccggaataccgtagattatttcggacaggagaagttttttgggaaaatcacccaagcgcggactgtccgggcccttgcggtggaccgtccgcgacacccaagtggcctcggacaggaacactgcataaacggaagtcaaacactgtggatcgtccgatggaaaagcaagcaccgtccgggaccagcgcgaccgttcggtcggcacaaccaaaaaccccgaaggtgacaggttcggtaaaatgaattatagcgtcctcacggaccatccggggtacacgatcggaccgtccgcgactgcctttatctgacatctgacgacacatttaatgcattatagccgttgatagagtcgttactgctgaccgttgggattcagt

SEQ ID NO: 17552 - DNA, 2023 bp, Zea Mays
tttcgtttctcgccttcgcctgcctccctccctcttctcctccactcgtgcgaaaccggcagccctcaggagctggtggcttggccttggctgcgcacgctctcgccttgtgctgctgctcgattcgtgctcgctgggctgacagactcggtgcttcggccggttcagaaatctcgagatggctcgtattcagccgaggaccgatcaaaggcctgctgtggacgtggaccacgtcggccatggaaacttcacgggtcatctgaagagcactctcagctccggcgatatggacttgccaggaggagcacgagcccctaaggtcacacttttggccacttgccgtttaggcacgcaagccatacacgatatccaagcagagggagaaatggaccgaggacgagcacaggctcttcttggaagccctgcggcagcatggccgtgcctggcgccgtatacaagagcacgtaggcagcaagactgccgtgcagatcaggagccacgctcagaagttcttctccaaggtctcgttgcctctttgcatagaaaaaaaacacacacacacacaccatcaaatccccactctgcctggaaaaaaaaatccatggattgtgttgcttgcaaggcgatgtcatccgagaatcctctggaggggatagcaacggcaacggcaacggcgtagcggctccaccacaaattcagattccgccgccgcggcccaagaggaggccaacgcacccgtacccgcgcaagctgggtagttcggtcggcaaggacgacgcctccgcgatcaagcggcttcaggagccccagctgcaggcacagtccccgtctctgtctgagcaggagacttgctcaccgaagtctgtgttaaccacagctgaaggtagtggatcaccagcttcctcggtttacatgatggaggacagatgcctcacaccaagcacggcagttgcactttccaaggaggccaccacttctgacgaggcggcgtgtgaactacctggaggtccagttctttggctatttggcaagagggttgtggttagtaatttattcgatcagcaaccaagctccaatactgggagcctgcaactacaacgtgtggcagacatggaactggacgcttcagctcctgagtcaccgactagttgtggaactgggaagaagctgtcctcccatgccgcagaggaagcgaagacatggcacccgtggctgaccggtacgcggcagtttatgcactgtcttcctcaaggcgagcagttctccgtgcattctgcttgccgacccctgagctacggtgatggaagcatgccttacacggcgtggaacgcgcagacagttacctcaaacaagcagcaggacaaccaaccgtctcaagccgcagcagactgcgaggtcacgagggcacaaggatcgtggacggagccgtccgtcacaacctcctccagcagcgtggttgaaacagctcagaattcagattctgtagaatccacgaaagtaaacaacgacggagacaaagtggcacctgttccaggttcaaggaaatgcgcgagcgtagttccagactgccttcgaggttttgcaccgtgcaagcgcacgcctcagagcaagatgctgctgcagtcagaggcacctggggaggcagatagagagatgacaaggctgtgcctgtaaaatttttgcgccctcgccagccaccgctgctctggatatatatatttttttgctgatattgaagacgtatgactgtacagtacagcagtgctgatgttttgcaggacggccattcaggcgttctgctgttacttatgagaggcagattgacactggtgaagcagccttccacaaaagggatggaggtgactgactggctgtggttcctgtctgtcatttgtatagttcaagacaatgcagcaagcagtgtaatagttgtagtaggagaccatattgtatgacctatatatgtaaattacgaatgttgttttgtaaaacaatgaaatgacaacagctacacgaccgaatg

SEQ ID NO: 17553 - DNA, 1827 bp, Zea Mays
tttcgtttctcgccttcgcctgcctccctccctcttctcctccactcgtgcgaaaccggcagccctcaggagctggtggcttggccttggctgcgcacgctctcgccttgtgctgctgctcgattcgtgctcgctgggctgacagactcggtgcttcggccggttcagaaatctcgagatggctcgtattcagccgaggaccgatcaaaggcctgctgtggacgtggaccacgtcggccatggaaacttcacgggtcatctgaagagcactctcagctccggcgatatggacttgccaggaggagcacgagcccctaaggcacgcaagccatacacgatatccaagcagagggagaaatggaccgaggacgagcacaggctcttcttggaagccctgcggcagcatggccgtgcctggcgccgtatacaaggtcatccgagaatcctctggaggggatagcaacggcaacggcaacggcgtagcggctccaccacaaattcagattccgccgccgcggcccaagaggaggccaacgcacccgtacccgcgcaagctgggtagttcggtcggcaaggacgacgcctccgcgatcaagcggcttcaggagccccagctgcaggcacagtccccgtctctgtctgagcaggagacttgctcaccgaagtctgtgttaaccacagctgaaggtagtggatcaccagcttcctcggtttacatgatggaggacagatgcctcacaccaagcacggcagttgcactttccaaggaggccaccacttctgacgaggcggcgtgtgaactacctggaggtccagttctttggctatttggcaagagggttgtggttagtaatttattcgatcagcaaccaagctccaatactgggagcctgcaactacaacgtgtggcagacatggaactggacgcttcagctcctgagtcaccgactagttgtggaactgggaagaagctgtcctcccatgccgcagaggaagcgaagacatggcacccgtggctgaccggtacgcggcagtttatgcactgtcttcctcaaggcgagcagttctccgtgcattctgcttgccgacccctgagctacggtgatggaagcatgccttacacggcgtggaacgcgcagacagttacctcaaacaagcagcaggacaaccaaccgtctcaagccgcagcagactgcgaggtcacgagggcacaaggatcgtggacggagccgtccgtcacaacctcctccagcagcgtggttgaaacagctcagaattcagattctgtagaatccacgaaagtaaacaacgacggagacaaagtggcacctgttccaggttcaaggaaatgcgcgagcgtagttccagactgccttcgaggttttgcaccgtgcaagcgcacgcctcagagcaagatgctgctgcagtcagaggcacctggggaggcagatagagagatgacaaggctgtgcctgtaaaatttttgcgccctcgccagccaccgctgctctggatatatatatttttttgctgatattgaagacgtatgactgtacagtacagcagtgctgatgttttgcaggacggccattcaggcgttctgctgttacttatgagaggcagattgacactggtgaagcagccttccacaaaagggatggaggtgactgactggctgtggttcctgtctgtcatttgtatagttcaagacaatgcagcaagcagtgtaatagttgtagtaggagaccatattgtatgacctatatatgtaaattacgaatgttgttttgtaaaacaatgaaatgacaacagctacacgaccgaatg

SEQ ID NO: 17554 - DNA, 1995 bp, Zea Mays
tttcgtttctcgccttcgcctgcctccctccctcttctcctccactcgtgcgaaaccggcagccctcaggagctggtggcttggccttggctgcgcacgctctcgccttgtgctgctgctcgattcgtgctcgctgggctgacagactcggtgcttcggccggttcagaaatctcgagatggctcgtattcagccgaggaccgatcaaaggcctgctgtggacgtggaccacgtcggccatggaaacttcacgggtcatctgaagagcactctcagctccggcgatatggacttgccaggaggagcacgagcccctaaggcacgcaagccatacacgatatccaagcagagggagaaatggaccgaggacgagcacaggctcttcttggaagccctgcggcagcatggccgtgcctggcgccgtatacaagagcacgtaggcagcaagactgccgtgcagatcaggagccacgctcagaagttcttctccaaggtctcgttgcctctttgcatagaaaaaaaacacacacacacacaccatcaaatccccactctgcctggaaaaaaaaatccatggattgtgttgcttgcaaggcgatgtcatccgagaatcctctggaggggatagcaacggcaacggcaacggcgtagcggctccaccacaaattcagattccgccgccgcggcccaagaggaggccaacgcacccgtacccgcgcaagctgggtagttcggtcggcaaggacgacgcctccgcgatcaagcggcttcaggagccccagctgcaggcacagtccccgtctctgtctgagcaggagacttgctcaccgaagtctgtgttaaccacagctgaaggtagtggatcaccagcttcctcggtttacatgatggaggacagatgcctcacaccaagcacggcagttgcactttccaaggaggccaccacttctgacgaggcggcgtgtgaactacctggaggtccagttctttggctatttggcaagagggttgtggttagtaatttattcgatcagcaaccaagctccaatactgggagcctgcaactacaacgtgtggcagacatggaactggacgcttcagctcctgagtcaccgactagttgtggaactgggaagaagctgtcctcccatgccgcagaggaagcgaagacatggcacccgtggctgaccggtacgcggcagtttatgcactgtcttcctcaaggcgagcagttctccgtgcattctgcttgccgacccctgagctacggtgatggaagcatgccttacacggcgtggaacgcgcagacagttacctcaaacaagcagcaggacaaccaaccgtctcaagccgcagcagactgcgaggtcacgagggcacaaggatcgtggacggagccgtccgtcacaacctcctccagcagcgtggttgaaacagctcagaattcagattctgtagaatccacgaaagtaaacaacgacggagacaaagtggcacctgttccaggttcaaggaaatgcgcgagcgtagttccagactgccttcgaggttttgcaccgtgcaagcgcacgcctcagagcaagatgctgctgcagtcagaggcacctggggaggcagatagagagatgacaaggctgtgcctgtaaaatttttgcgccctcgccagccaccgctgctctggatatatatatttttttgctgatattgaagacgtatgactgtacagtacagcagtgctgatgttttgcaggacggccattcaggcgttctgctgttacttatgagaggcagattgacactggtgaagcagccttccacaaaagggatggaggtgactgactggctgtggttcctgtctgtcatttgtatagttcaagacaatgcagcaagcagtgtaatagttgtagtaggagaccatattgtatgacctatatatgtaaattacgaatgttgttttgtaaaacaatgaaatgacaacagctacacgaccgaatg

SEQ ID NO: 17555 - DNA, 1918 bp, Zea Mays
atttcgtttctcgccttcgcctgcctccctccctcttctcctccactcgtgcgaaaccggcagccctcaggagctggtggcttggccttggctgcgcacgctctcgccttgtgctgctgctcgattcgtgctcgctgggctgacagactcggtgcttcggccggttcagaaatctcgagatggctcgtattcagccgaggaccgatcaaaggcctgctgtggacgtggaccacgtcggccatggaaacttcacgggtcatctgaagagcactctcagctccggcgatatggacttgccaggaggagcacgagcccctaaggtcacacttttggccacttgccgtttaggcacgcaagccatacacgatatccaagcagagggagaaatggaccgaggacgagcacaggctcttcttggaagccctgcggcagcatggccgtgcctggcgccgtatacaagagcacgtaggcagcaagactgccgtgcagatcaggagccacgctcagaagttcttctccaaggtcatccgagaatcctctggaggggatagcaacggcaacggcaacggcgtagcggctccaccacaaattcagattccgccgccgcggcccaagaggaggccaacgcacccgtacccgcgcaagctgggtagttcggtcggcaaggacgacgcctccgcgatcaagcggcttcaggagccccagctgcaggcacagtccccgtctctgtctgagcaggagacttgctcaccgaagtctgtgttaaccacagctgaaggtagtggatcaccagcttcctcggtttacatgatggaggacagatgcctcacaccaagcacggcagttgcactttccaaggaggccaccacttctgacgaggcggcgtgtgaactacctggaggtccagttctttggctatttggcaagagggttgtggttagtaatttattcgatcagcaaccaagctccaatactgggagcctgcaactacaacgtgtggcagacatggaactggacgcttcagctcctgagtcaccgactagttgtggaactgggaagaagctgtcctcccatgccgcagaggaagcgaagacatggcacccgtggctgaccggtacgcggcagtttatgcactgtcttcctcaaggcgagcagttctccgtgcattctgcttgccgacccctgagctacggtgatggaagcatgccttacacggcgtggaacgcgcagacagttacctcaaacaagcagcaggacaaccaaccgtctcaagccgcagcagactgcgaggtcacgagggcacaaggatcgtggacggagccgtccgtcacaacctcctccagcagcgtggttgaaacagctcagaattcagattctgtagaatccacgaaagtaaacaacgacggagacaaagtggcacctgttccaggttcaaggaaatgcgcgagcgtagttccagactgccttcgaggttttgcaccgtgcaagcgcacgcctcagagcaagatgctgctgcagtcagaggcacctggggaggcagatagagagatgacaaggctgtgcctgtaaaatttttgcgccctcgccagccaccgctgctctggatatatatatttttttgctgatattgaagacgtatgactgtacagtacagcagtgctgatgttttgcaggacggccattcaggcgttctgctgttacttatgagaggcagattgacactggtgaagcagccttccacaaaagggatggaggtgactgactggctgtggttcctgtctgtcatttgtatagttcaagacaatgcagcaagcagtgtaatagttgtagtaggagaccatattgtatgacctatatatgtaaattacgaatgttgttttgtaaaacaatgaaatgacaacagctacacgaccgaatg

SEQ ID NO: 17556 - DNA, 973 bp, Zea Mays
caactttcaaaaactaattacatggttcgcttgaatgcagacataaatgtgcaaagctccgtacatacgatgatcctttcaataacccgttagtaaagattgatgagggtacatctactgcacaaatgtttggcaaggagtaccgtttggctcctgttaggcttacgaaagagcagcaagaaatgcaccagaacaggagatcgcgtgcatatcagtggaaaaggccaaccgtgtttctcagggaaggtgattccttacctccagatgttgatccggatacagttagatggattccagcaaaccatcccttttctgctgcttcaagtgaagtggatgaggagaccgccaaacaaaatgtctaccaaaaggatggcatcccatcccgtgtcaaggctgagcatgaagctttgcaggcaaggctagaggcctcaaacgatgttaccagactcccttcggatccaaggagtattcagcgtaatgagagaccaatgagattgtcaggcaagccatctgaacatcttcagagctccaagtttgagaaccaagatagacaactggctactgagtctggtaaacatagctctgaatctctgatggatgtttacaatcaaacgagccggaagggcaataaaaattgtgtacttcagctcttcgaagacatttgctttgttacgtagtgttatcagcttttaggctgtagctgtagatagagaagttttggaacagtgagcttatacggcttaccggtttacatagtgagcagttaatatgcgagttgcttgacgtgttgggaccgaatggataattattttgacgagcacatgggtattgttgtattggggaccttcaccaaacgatttccaggactatagggtaggctaggcaaattggcattggacaaacttgacccgggtctcacccacttggcgcgatcaaaagatttgaatgggatgcattatagttatgggcatag

SEQ ID NO: 17557 - DNA, 1249 bp, Zea Mays
ctcgcctccgtctctctccatccccaatctcgggccttgactccttgagcacagcacaccgagtccaagccccgaagcctcctgaccttggttactgggtagcttctgcttggtactccatgcgaggacgacaatggcgatcgccgccgtccccgcctccctccccttcgtcctcctccctccgaggctgttccgcgggagggcggtgaggtggccgcgcccgattagggcttcggcgtcgaccaacgccggtgacgttgcaggcggagagcggaagtttggggctctggtgagcagggtgggagatctgagggcgctcgtagcctccgtgcctcctgctgttgcttcgatgcagaaaaacattggcccaaattttgttgctggtttctgtgttagcatggcatttgtggctgctgctgcaagacagatctccttaagaagtcgagagcatgttagtaaaggttctgttgctgatcttgtaaggcgtggccagttaaaatcagggcaacgagggattgcaaagctccgtacatacgatgatcctttcaataacccgttagtaaagattgatgagggtacatctactgcacaaatgtttggcaaggagtaccgtttggctcctgttaggcttacgaaagagcagcaagaaatgcaccagaacaggagatcgcgtgcatatcagtggaaaaggccaaccgtgtttctcagggaaggttaccagactcccttcggatccaaggagtattcagcgtaatgagagaccaatgagattgtcaggcaagccatctgaacatcttcagagctccaagtttgagaaccaagatagacaactggctactgagtctggtaaacatagctctgaatctctgatggatgtttacaatcaaacgagccggaagggcaataaaaattgtgtacttcagctcttcgaagacatttgctttgttacgtagtgttatcagcttttaggctgtagctgtagatagagaagttttggaacagtgagcttatacggcttaccggtttacatagtgagcagttaatatgcgagttgcttgacgtgttgggaccgaatggataattattttgacgagcacatgggtattgttgtattggggaccttcaccaaacgatttccaggactatagggtaggctaggcaaattggcattggacaaacttgacccgggtctcacccacttggcgcgatcaaaagatttgaatgggatgcattatagttatgggcatag

SEQ ID NO: 17558 - DNA, 1738 bp, Zea Mays
gactgacaaaccgcacctacgtccataaaccccagaagtcgactcctgcccctgcctcgccgccgccgttgcttaccaacctcccgccatggcgacatcgccgttgccgacggcgaccgcctctgcctcgaagaagcggcgttccagaggcgggacgctagccctagatgaggtgaagaagctgggaaccgagctcctttcctctcgctcccacctcaaccacgcccccgccctcctcgctctcctctctcccaccgcgccgctcgacctcgctctcgaggcgctcatttcgctccagtccttcttcgtaccactcatcccctccatcccctccgcctccgcggcagccaacgcgggggatgcgggcagtgaccccgagctcgtgtttggagcctggctgcggcagcggttcgacgagctcgtcgccgcgctggtggagctcagcgtgtctccacacagcgacgacgcaatcagggatgtagcactggatgctctcatggatttcgtgaagctggggaaggatgggaagttccattcggcaatttaccacaagtttctctacgctgtcgttcatgctgctgatcccgtcgatatgttgttagagttgcttgtatcaaagtacttcaaatacactgatattcgttacttcacttacactagcttagacaagattgccaacagtctgggcagtaaaaccactggctctggaaaagatgctttgcaaaatggaagtgacgagtcaaaaaacaggagtagtatttttatacacaacatatacaatcttttggcacatgttcctttgatggattttcaaaaggaatcaacatttgatatgtggagtactgttggtctatcttctaaaggagaaaatgactcttccaaggacacttctacgtacatcaataagaaactaaaattgaagttcaccaaagcatggctgtcttttctcaagttaccactaccacttgatgtgtacaaggaggtccttgcttcaattcatcaaaatgtcattccttcaatgtcaaacccttccatcttatgtgatttcttgactagatcatatgatattggtggtgttatcagtgtgatggccttaagtggccttttcattcttatgacacaacacggtctggagtatccaaaattttatgaaaagctttatgcactactgactccggctgttttcatggcaaaacaccgatcagtgtttttgcaacttcttgacacatgcctgaaatcttcttatcttcctgcctatcttgctgctgcgtttgcaaaaagattgagtagacttgctctttcagttcctccagctggagctcttattattattgctttaattcataatctgctgaggagacacccctcagttaattttttggtccattgggaggttgatgagagtgatagcaatgccacaagagaagctagtcaatctaagaagattggttctgatccttttaaccagaatgatgcagaccctgcgaagtctggtgcaatgcgcagttctttgtgggaaatagacacgcttcgtcatcattactcttctgcagtttctagatttgttgtgtcacttgaggaggatctcactgtccgggccaaaactactgagatgaaaataacggacttcagttcaggttcctatgcaacagttttcagggacgaggggcaataccccaagagggcagatgcatccattatggatggttggagaaactggaatataggagagaacact

SEQ ID NO: 17559 - DNA, 1840 bp, Zea Mays
gactgacaaaccgcacctacgtccataaaccccagaagtcgactcctgcccctgcctcgccgccgccgttgcttaccaacctcccgccatggcgacatcgccgttgccgacggcgaccgcctctgcctcgaagaagcggcgttccagaggcgggacgctagccctagatgaggatgtagcactggatgctctcatggatttcgtgaagctggggaaggatgggaagttccattcggcaatttaccacaagtttctctacgctgtcgttcatgctgctgatcccgtcgatatgttgttagagttgcttgtatcaaagtacttcaaatacactgatattcgttacttcacttacactagcttagacaagattgccaacagtctgggcagtaaaaccactggctctggaaaagatgctttgcaaaatggaagtgacgagtcaaaaaacaggagtagtatttttatacacaacatatacaatcttttggcacatgttcctttgatggattttcaaaaggaatcaacatttgatatgtggagtactgttggtctatcttctaaaggagaaaatgactcttccaaggacacttctacgtacatcaataagaaactaaaattgaagttcaccaaagcatggctgtcttttctcaagttaccactaccacttgatgtgtacaaggaggtccttgcttcaattcatcaaaatgtcattccttcaatgtcaaacccttccatcttatgtgatttcttgactagatcatatgatattggtggtgttatcagtgtgatggccttaagtggccttttcattcttatgacacaacacggtctggagtatccaaaattttatgaaaagctttatgcactactgactccggctgttttcatggcaaaacaccgatcagtgtttttgcaacttcttgacacatgcctgaaatcttcttatcttcctgcctatcttgctgctgcgtttgcaaaaagattgagtagacttgctctttcagttcctccagctggagctcttattattattgctttaattcataatctgctgaggagacacccctcagttaattttttggtccattgggaggttgatgagagtgatagcaatgccacaagagaagctagtcaatctaagaagattggttctgatccttttaaccagaatgatgcagaccctgcgaagtctggtgcaatgcgcagttctttgtgggaaatagacacgcttcgtcatcattactcttctgcagtttctagatttgttgtgtcacttgaggaggatctcactgtccgggccaaaactactgagatgaaaataacggacttcagttcaggttcctatgcaacagttttcagggacgaggtacgtcggcggttaaaacaggtcccccttgcattctacagaaccacaccaacctcgttatttctaggatcagattttcctggatggacctttggggaccaacacaatagcaccgtagaaactactgtagaaggcaacggaaaagtcgaggcagtaggggctagcgacagcacaccttccaaaaggttgcggatggagacctgagaaggaaacaccgcgaatctccaagaattaggccggcttgttggggtagcattgggtggttgtgtgcctctcatttggagtttggtttcccagtgttgtctccaggattgtctgggtgttgtagcttcaattttgagcagaatgggttacgtgaggaaacacttctttcggttacgactaatataagttgtaagcttaattgccaattacagaggaaatgtaccgattttttttttcagtcctttatccaaaacatcatttatgttttgcttt

SEQ ID NO: 17560 - DNA, 2124 bp, Zea Mays
gactgacaaaccgcacctacgtccataaaccccagaagtcgactcctgcccctgcctcgccgccgccgttgcttaccaacctcccgccatggcgacatcgccgttgccgacggcgaccgcctctgcctcgaagaagcggcgttccagaggcgggacgctagccctagatgaggtgaagaagctgggaaccgagctcctttcctctcgctcccacctcaaccacgcccccgccctcctcgctctcctctctcccaccgcgccgctcgacctcgctctcgaggcgctcatttcgctccagtccttcttcgtaccactcatcccctccatcccctccgcctccgcggcagccaacgcgggggatgcgggcagtgaccccgagctcgtgtttggagcctggctgcggcagcggttcgacgagctcgtcgccgcgctggtggagctcagcgtgtctccacacagcgacgacgcaatcagggatgtagcactggatgctctcatggatttcgtgaagctggggaaggatgggaagttccattcggcaatttaccacaagtttctctacgctgtcgttcatgctgctgatcccgtcgatatgttgttagagttgcttgtatcaaagtacttcaaatacactgatattcgttacttcacttacactagcttagacaagattgccaacagtctgggcagtaaaaccactggctctggaaaagatgctttgcaaaatggaagtgacgagtcaaaaaacaggagtagtatttttatacacaacatatacaatcttttggcacatgttcctttgatggattttcaaaaggaatcaacatttgatatgtggagtactgttggtctatcttctaaaggagaaaatgactcttccaaggacacttctacgtacatcaataagaaactaaaattgaagttcaccaaagcatggctgtcttttctcaagttaccactaccacttgatgtgtacaaggaggtccttgcttcaattcatcaaaatgtcattccttcaatgtcaaacccttccatcttatgtgatttcttgactagatcatatgatattggtggtgttatcagtgtgatggccttaagtggccttttcattcttatgacacaacacggtctggagtatccaaaattttatgaaaagctttatgcactactgactccggctgttttcatggcaaaacaccgatcagtgtttttgcaacttcttgacacatgcctgaaatcttcttatcttcctgcctatcttgctgctgcgtttgcaaaaagattgagtagacttgctctttcagttcctccagctggagctcttattattattgctttaattcataatctgctgaggagacacccctcagttaattttttggtccattgggaggttgatgagagtgatagcaatgccacaagagaagctagtcaatctaagaagattggttctgatccttttaaccagaatgatgcagaccctgcgaagtctggtgcaatgcgcagttctttgtgggaaatagacacgcttcgtcatcattactcttctgcagtttctaggaggatctcactgtccgggccaaaactactgagatgaaaataacggacttcagttcaggttcctatgcaacagttttcagggacgaggtacgtcggcggttaaaacaggtcccccttgcattctacagaaccacaccaacctcgttatttctaggatcagattttcctggatggacctttggggaccaacacaatagcaccgtagaaactactgtagaaggcaacggaaaagtcgaggcagtaggggctagcgacagcacaccttccaaaaggttgcggatggagacctgagaaggaaacaccgcgaatctccaagaattaggccggcttgttggggtagcattgggtggttgtgtgcctctcatttggagtttggtttcccagtgttgtctccaggattgtctgggtgttgtagcttcaattttgagcagaatgggttacgtgaggaaacacttctttcggttacgactaatataagttgtaagcttaattgccaattacagaggaaatgtaccgattttttttttcagtcctttatccaaaacatcatttatgttttgcttt

SEQ ID NO: 17561 - DNA, 2070 bp, Zea Mays
gactgacaaaccgcacctacgtccataaaccccagaagtcgactcctgcccctgcctcgccgccgccgttgcttaccaacctcccgccatggcgacatcgccgttgccgacggcgaccgcctctgcctcgaagaagcggcgttccagaggcgggacgctagccctagatgaggtgaagaagctgggaaccgagctcctttcctctcgctcccacctcaaccacgcccccgccctcctcgctctcctctctcccaccgcgccgctcgacctcgctctcgaggcgctcatttcgctccagtccttcttcgtaccactcatcccctccatcccctccgcctccgcggcagccaacgcgggggatgcgggcagtgaccccgagctcgtgtttggagcctggctgcggcagcggttcgacgagctcgtcgccgcgctggtggagctcagcgtgtctccacacagcgacgacgcaatcagggatgtagcactggatgctctcatggatttcgtgaagctggggaaggatgggaagttccattcggcaatttaccacaagtttctctacgctgtcgttcatgctgctgatcccgtcgatatgttgttagagttgcttgtatcaaagtacttcaaatacactgatattcgttacttcacttacactagcttagacaagattgccaacagtctgggcagtaaaaccactggctctggaaaagatgctttgcaaaatggaagtgacgagtcaaaaaacaggagtagtatttttatacacaacatatacaatcttttggcacatgttcctttgatggattttcaaaaggaatcaacatttgatatgtggagtactgttggtctatcttctaaaggagaaaatgactcttccaaggacacttctacgtacatcaataagaaactaaaattgaagttcaccaaagcatggctgtcttttctcaagttaccactaccacttgatgtgtacaaggaggtccttgcttcaattcatcaaaatgtcattccttcaatgtcaaacccttccatcttatgtgatttcttgactagatcatatgatattggtggtgttatcagtgtgatggccttaagtggccttttcattcttatgacacaacacggtctggagtatccaaaattttatgaaaagctttatgcactactgactccggctgttttcatggcaaaacaccgatcagtgtttttgcaacttcttgacacatgcctgaaatcttcttatcttcctgcctatcttgctgctgcgtttgcaaaaagattgagtagacttgctctttcagttcctccagctggagctcttattattattgctttaattcataatctgctgaggagacacccctcagttaattttttggtccattgggaggttgatgagagtgatagcaatgccacaagagaagctagtcaatctaagaagattggttctgatccttttaaccagaatgatgcagaccctgcgaagtctggtgcaatgcgcagttctttgtgggaaatagacacgcttcgtcatcattactcttctgcagtttctagatttgttgtgtcacttgaggaggatctcactgtccgggccaaaactactgagatgaaaataacggacttcagttcaggttcctatgcaacagttttcagggacgagattttcctggatggacctttggggaccaacacaatagcaccgtagaaactactgtagaaggcaacggaaaagtcgaggcagtaggggctagcgacagcacaccttccaaaaggttgcggatggagacctgagaaggaaacaccgcgaatctccaagaattaggccggcttgttggggtagcattgggtggttgtgtgcctctcatttggagtttggtttcccagtgttgtctccaggattgtctgggtgttgtagcttcaattttgagcagaatgggttacgtgaggaaacacttctttcggttacgactaatataagttgtaagcttaattgccaattacagaggaaatgtaccgattttttttttcagtcctttatccaaaacatcatttatgttttgcttt

SEQ ID NO: 17562 - DNA, 1747 bp, Zea Mays
gactgacaaaccgcacctacgtccataaaccccagaagtcgactcctgcccctgcctcgccgccgccgttgcttaccaacctcccgccatggcgacatcgccgttgccgacggcgaccgcctctgcctcgaagaagcggcgttccagaggcgggacgctagccctagatgaggttcatgctgctgatcccgtcgatatgttgttagagttgcttgtatcaaagtacttcaaatacactgatattcgttacttcacttacactagcttagacaagattgccaacagtctgggcagtaaaaccactggctctggaaaagatgctttgcaaaatggaagtgacgagtcaaaaaacaggagtagtatttttatacacaacatatacaatcttttggcacatgttcctttgatggattttcaaaaggaatcaacatttgatatgtggagtactgttggtctatcttctaaaggagaaaatgactcttccaaggacacttctacgtacatcaataagaaactaaaattgaagttcaccaaagcatggctgtcttttctcaagttaccactaccacttgatgtgtacaaggaggtccttgcttcaattcatcaaaatgtcattccttcaatgtcaaacccttccatcttatgtgatttcttgactagatcatatgatattggtggtgttatcagtgtgatggccttaagtggccttttcattcttatgacacaacacggtctggagtatccaaaattttatgaaaagctttatgcactactgactccggctgttttcatggcaaaacaccgatcagtgtttttgcaacttcttgacacatgcctgaaatcttcttatcttcctgcctatcttgctgctgcgtttgcaaaaagattgagtagacttgctctttcagttcctccagctggagctcttattattattgctttaattcataatctgctgaggagacacccctcagttaattttttggtccattgggaggttgatgagagtgatagcaatgccacaagagaagctagtcaatctaagaagattggttctgatccttttaaccagaatgatgcagaccctgcgaagtctggtgcaatgcgcagttctttgtgggaaatagacacgcttcgtcatcattactcttctgcagtttctagatttgttgtgtcacttgaggaggatctcactgtccgggccaaaactactgagatgaaaataacggacttcagttcaggttcctatgcaacagttttcagggacgaggtacgtcggcggttaaaacaggtcccccttgcattctacagaaccacaccaacctcgttatttctaggatcagattttcctggatggacctttggggaccaacacaatagcaccgtagaaactactgtagaaggcaacggaaaagtcgaggcagtaggggctagcgacagcacaccttccaaaaggttgcggatggagacctgagaaggaaacaccgcgaatctccaagaattaggccggcttgttggggtagcattgggtggttgtgtgcctctcatttggagtttggtttcccagtgttgtctccaggattgtctgggtgttgtagcttcaattttgagcagaatgggttacgtgaggaaacacttctttcggttacgactaatataagttgtaagcttaattgccaattacagaggaaatgtaccgattttttttttcagtcctttatccaaaacatcatttatgttttgcttt

SEQ ID NO: 17563 - DNA, 1968 bp, Zea Mays
gactgacaaaccgcacctacgtccataaaccccagaagtcgactcctgcccctgcctcgccgccgccgttgcttaccaacctcccgccatggcgacatcgccgttgccgacggcgaccgcctctgcctcgaagaagcggcgttccagaggcgggacgctagccctagatgaggtgaagaagctgggaaccgagctcctttcctctcgctcccacctcaaccacgcccccgccctcctcgctctcctctctcccaccgcgccgctcgacctcgctctcgaggcgctcatttcgctccagtccttcttcgtaccactcatcccctccatcccctccgcctccgcggcagccaacgcgggggatgcgggcagtgaccccgagctcgtgtttggagcctggctgcggcagcggttcgacgagctcgtcgccgcgctggtggagctcagcgtgtctccacacagcgacgacgcaatcagggatgtagcactggatgctctcatggatttcgtgaagctggggaaggatgggaagttccattcggcaatttaccacaagtttctctacgctgtcgttcatgctgctgatcccgtcgatatgttgttagagttgcttgtatcaaagtacttcaaatacactgatattcgttacttcacttacactagcttagacaagattgccaacagtctgggcagtaaaaccactggctctggaaaagatgctttgcaaaatggaagtgacgagtcaaaaaacaggagtagtatttttatacacaacatatacaatcttttggcacatgttcctttgatggattttcaaaaggaatcaacatttgatatgtggagtactgttggtctatcttctaaaggagaaaatgactcttccaaggacacttctacgtacatcaataagaaactaaaattgaagttcaccaaagcatggctgtcttttctcaagttaccactaccacttgatgtgtacaaggaggtccttgcttcaattcatcaaaatgtcattccttcaatgtcaaacccttccatcttatgcttcttgacacatgcctgaaatcttcttatcttcctgcctatcttgctgctgcgtttgcaaaaagattgagtagacttgctctttcagttcctccagctggagctcttattattattgctttaattcataatctgctgaggagacacccctcagttaattttttggtccattgggaggttgatgagagtgatagcaatgccacaagagaagctagtcaatctaagaagattggttctgatccttttaaccagaatgatgcagaccctgcgaagtctggtgcaatgcgcagttctttgtgggaaatagacacgcttcgtcatcattactcttctgcagtttctagatttgttgtgtcacttgaggaggatctcactgtccgggccaaaactactgagatgaaaataacggacttcagttcaggttcctatgcaacagttttcagggacgaggtacgtcggcggttaaaacaggtcccccttgcattctacagaaccacaccaacctcgttatttctaggatcagattttcctggatggacctttggggaccaacacaatagcaccgtagaaactactgtagaaggcaacggaaaagtcgaggcagtaggggctagcgacagcacaccttccaaaaggttgcggatggagacctgagaaggaaacaccgcgaatctccaagaattaggccggcttgttggggtagcattgggtggttgtgtgcctctcatttggagtttggtttcccagtgttgtctccaggattgtctgggtgttgtagcttcaattttgagcagaatgggttacgtgaggaaacacttctttcggttacgactaatataagttgtaagcttaattgccaattacagaggaaatgtaccgattttttttttcagtcctttatccaaaacatcatttatgttttgcttt

SEQ ID NO: 17564 - DNA, 1794 bp, Zea Mays
gactgacaaaccgcacctacgtccataaaccccagaagtcgactcctgcccctgcctcgccgccgccgttgcttaccaacctcccgccatggcgacatcgccgttgccgacggcgaccgcctctgcctcgaagaagcggcgttccagaggcgggacgctagccctagatgaggtgaagaagctgggaaccgagctcctttcctctcgctcccacctcaaccacgcccccgccctcctcgctctcctctctcccaccgcgccgctcgacctcgctctcgaggcgctcatttcgctccagtccttcttcgtaccactcatcccctccatcccctccgcctccgcggcagccaacgcgggggatgcgggcagtgaccccgagctcgtgtttggagcctggctgcggcagcggttcgacgagctcgtcgccgcgctggtggagctcagcgtgtctccacacagcgacgacgcaatcagggatgtagcactggatgctctcatggatttcgtgaagctggggaaggatgggaagttccattcggcaatttaccacaagtttctctacgctgtcgttcatgctgctgatcccgtcgatatgttgttagagttgcttgtatcaaagtacttcaaatacactgatattcgttacttcacttacactagcttagacaagattgccaacagtctgggcagtaaaaccactggctctggaaaagatgctttgcaaaatggaagtgacgagtcaaaaaacaggagtagtatttttatacacaacatatacaatcttttggcacatgttcctttgatggattttcaaaaggaatcaacatttgatatgtggagtactgttggtctatcttctaaaggagaaaatgactcttccaaggacacttctacgtacatcaataagaaactaaaattgaagttcaccaaagcatggctgtcttttctcaagttaccactaccacttgatgtgtacaaggaggtccttgcttcaattcatcaaaatgtcattccttcaatgtcaaacccttccatcttatggaggttgatgagagtgatagcaatgccacaagagaagctagtcaatctaagaagattggttctgatccttttaaccagaatgatgcagaccctgcgaagtctggtgcaatgcgcagttctttgtgggaaatagacacgcttcgtcatcattactcttctgcagtttctagatttgttgtgtcacttgaggaggatctcactgtccgggccaaaactactgagatgaaaataacggacttcagttcaggttcctatgcaacagttttcagggacgaggtacgtcggcggttaaaacaggtcccccttgcattctacagaaccacaccaacctcgttatttctaggatcagattttcctggatggacctttggggaccaacacaatagcaccgtagaaactactgtagaaggcaacggaaaagtcgaggcagtaggggctagcgacagcacaccttccaaaaggttgcggatggagacctgagaaggaaacaccgcgaatctccaagaattaggccggcttgttggggtagcattgggtggttgtgtgcctctcatttggagtttggtttcccagtgttgtctccaggattgtctgggtgttgtagcttcaattttgagcagaatgggttacgtgaggaaacacttctttcggttacgactaatataagttgtaagcttaattgccaattacagaggaaatgtaccgattttttttttcagtcctttatccaaaacatcatttatgttttgcttt

SEQ ID NO: 17565 - DNA, 717 bp, Zea Mays
gccgcagtgggcaagctctcgagaactaacttatcactgtcacctgatgagagctggttacctgtcgctagcatctttatctgcattctacatattcagctagaagcaagcatcaggagtggtgatatcgagagtttcaagttcatccaaagagcttggaacctcgtctttcctagagctgctaaagagaaggatgcccaccatggaaacaagagagactcaatcggaatgggcgacagacacaataggaggataccgacggcgcatgaatccagggagaggcttcgcaattcagatatcttcaagaggaaacttgatgatcccaacgatgagaagcaaaagaagtcagattggaactgaggctcaaaaggctctttttctcctgcattttcctgaaactacaaaaaatggtatttggggtggggtgaggggtgcatttgtagggagcccacaggtgaaactgaaatggagatgtggctgtctgcggtttcaaatgggtctgaatcgtcagatttttcttctggttccaaacagtagatcttaggtatagctagatttttacattttagtgcgcacaaataacttgtcagccaaagctaatgggacatatcacatatggcgactttgaggcttgtgaagctccgttgtgtactcgtaagaatgaaatcattttgctgtctactcgtatgaatgaaaacatgtttgtttttagtttca

SEQ ID NO: 17566 - DNA, 971 bp, Zea Mays
atttttcaatgacacgtttggtaccgtcagatccatgaatttgtgggcaggttcagttccaagagggtgacatcccgttctgtaccgaggagtgcaggacggagcagatcgaaatggacgaggagatggagcggaaggagagcacccagaagaagaagttggcgccgagagctccctctcccaaggacgtggagtccgcgccgaggcctcccaaggcccgggccgggtcaatccttgccggctaacaccgtgaagacgaaaagctcacaaacgagctagagctcgcgtgtgtgctcctccccctccccgaaaccaagagagatcagaacccccttgataccaccacctggaactaccgctacagttgcgtatatgggtttgtgtttttttgtttacagcccttgcgccattggtggcgccgtgaactcagtgtcagtgcctgcccgcttacctgtattgctgctgatgatgtatagagacgggcggagaggagaggagagcgctggtgtttaggaccgcatgcattcagaagctctctgtgctgctggccagatgtgtcgttcgttgtatcatgtatgggtgtttctggctttcgttctgggagatttttgtgagaatcttctgtgtgttacgtagtactcatagacaaatagctggtgttggtgttagggttaatgtttttcttaatgctcatgagagaaaattgaaaacgtatgcctacagtagaaataggcatgtgaagtgaatggacccttgtgctcataagtcatgacataacttgctcctgtatcatcgtgaatcctgctttcctttctttaaggatcttctgattggcaccagtgtcagtgtgctgcctgtgagaaaccttaaacacatattagtgttgttctttatgggagctaattagtgttggaccagcaataatggtttttatggccggtgacgtgaacagtttcccgtccagcttttaa

SEQ ID NO: 17567 - DNA, 981 bp, Zea Mays
gttctttatgtatggaagttggcaatcgaaaaaagtgcttcgctgctaagcaccggagctgagcttgtgagacggggtgacatcccgttctgtaccgaggagtgcaggacggagcagatcgaaatggacgaggagatggagcggaaggagagcacccagaagaagaagttggcgccgagagctccctctcccaaggacgtggagtccgcgccgaggcctcccaaggcccgggccgggtcaatccttgccggctaacaccgtgaagacgaaaagctcacaaacgagctagagctcgcgtgtgtgctcctccccctccccgaaaccaagagagatcagaacccccttgataccaccacctggaactaccgctacagttgcgtatatgggtttgtgtttttttgtttacagcccttgcgccattggtggcgccgtgaactcagtgtcagtgcctgcccgcttacctgtattgctgctgatgatgtatagagacgggcggagaggagaggagagcgctggtgtttaggaccgcatgcattcagaagctctctgtgctgctggccagatgtgtcgttcgttgtatcatgtatgggtgtttctggctttcgttctgggagatttttgtgagaatcttctgtgtgttacgtagtactcatagacaaatagctggtgttggtgttagggttaatgtttttcttaatgctcatgagagaaaattgaaaacgtatgcctacagtagaaataggcatgtgaagtgaatggacccttgtgctcataagtcatgacataacttgctcctgtatcatcgtgaatcctgctttcctttctttaaggatcttctgattggcaccagtgtcagtgtgctgcctgtgagaaaccttaaacacatattagtgttgttctttatgggagctaattagtgttggaccagcaataatggtttttatggccggtgacgtgaacagtttcccgtccagcttttaa

SEQ ID NO: 17568 - DNA, 1360 bp, Zea Mays
caccgatacaaatacaacgcaccgtccatctctccctccctccctccctccccctcgcaccgccgcgggacacgaacacgcgagccacccaaccggcccgaacccgatcgcaccgacgaggtggatcccaggggaaggctcctctttaccgccgccgatggacgtgggcctcggcggcgcgggtagttccggcagaggagggggagggggccggagcgggagcgggggcggtcgggacagcccgttcgctctcggcgggggcggcgcgtcggcggctgcgtggacccggctcgtcagctccggcgtggaggacgagctggtggctgcgtcgggaggaagaggaggaggtggaggacgcgcgggggcgagagcgggaggcctgccgcagggccactttttggacgcctgcttcctctgccggaagcccctccccagcaaccgcgacatcttcatgggtgacatcccgttctgtaccgaggagtgcaggacggagcagatcgaaatggacgaggagatggagcggaaggagagcacccagaagaagaagttggcgccgagagctccctctcccaaggacgtggagtccgcgccgaggcctcccaaggcccgggccgggtcaatccttgccggctaacaccgtgaagacgaaaagctcacaaacgagctagagctcgcgtgtgtgctcctccccctccccgaaaccaagagagatcagaacccccttgataccaccacctggaactaccgctacagttgcgtatatgggtttgtgtttttttgtttacagcccttgcgccattggtggcgccgtgaactcagtgtcagtgcctgcccgcttacctgtattgctgctgatgatgtatagagacgggcggagaggagaggagagcgctggtgtttaggaccgcatgcattcagaagctctctgtgctgctggccagatgtgtcgttcgttgtatcatgtatgggtgtttctggctttcgttctgggagatttttgtgagaatcttctgtgtgttacgtagtactcatagacaaatagctggtgttggtgttagggttaatgtttttcttaatgctcatgagagaaaattgaaaacgtatgcctacagtagaaataggcatgtgaagtgaatggacccttgtgctcataagtcatgacataacttgctcctgtatcatcgtgaatcctgctttcctttctttaaggatcttctgattggcaccagtgtcagtgtgctgcctgtgagaaaccttaaacacatattagtgttgttctttatgggagctaattagtgttggaccagcaataatggtttttatggccggtgacgtgaacagtttcccgtccagcttttaa

SEQ ID NO: 17569 - DNA, 1253 bp, Zea Mays
caccgatacaaatacaacgcaccgtccatctctccctccctccctccctccccctcgcaccgccgcgggacacgaacacgcgagccacccaaccggcccgaacccgatcgcaccgacgaggtggatcccaggggaaggctcctctttaccgccgccgatggacgtgggcctcggcggcgcgggtagttccggcagaggagggggagggggccggagcgggagcgggggcggtcgggacagcccgttcgctctcggcgggggcggcgcgtcggcggctgcgtggacccggctcgtcagctccggcgtggaggacgagctggtggctgcgtcgggaggaagaggaggaggtggaggacgcgcgggggcgagagcgggaggcctgccgcagggccactttttggacgcctgcttcctctgccggaagcccctccccagcaaccgcgacatcttcatgtacaggggtgacatcccgttctgtaccgaggagtgcaggacggagcagatcgaaatggacgaggagatggagcggaaggagagcacccagaagaagaagttggcgccgagagctccctctcccaaggacgtggagtccgcgccgaggcctcccaaggcccgggccgggtcaatccttgccggctaacaccgtgaagacgaaaagctcacaaacgagctagagctcgcgtgtgtgctcctccccctccccgaaaccaagagagatcagaacccccttgataccaccacctggaactaccgctacaagacgggcggagaggagaggagagcgctggtgtttaggaccgcatgcattcagaagctctctgtgctgctggccagatgtgtcgttcgttgtatcatgtatgggtgtttctggctttcgttctgggagatttttgtgagaatcttctgtgtgttacgtagtactcatagacaaatagctggtgttggtgttagggttaatgtttttcttaatgctcatgagagaaaattgaaaacgtatgcctacagtagaaataggcatgtgaagtgaatggacccttgtgctcataagtcatgacataacttgctcctgtatcatcgtgaatcctgctttcctttctttaaggatcttctgattggcaccagtgtcagtgtgctgcctgtgagaaaccttaaacacatattagtgttgttctttatgggagctaattagtgttggaccagcaataatggtttttatggccggtgacgtgaacagtttcccgtccagcttttaa

SEQ ID NO: 17570 - DNA, 1169 bp, Zea Mays
ctcagccaagctcgtgagagcagaggaactctctttcctcacactccaaagcagcaagaccatctggcaaagctgcgctagaggccagcatcaggccataataggccagagagcagacgaggcatggcgacgtccgtggcctgcgccttcttcttcttcgacgcggcggagccgctgggcgagggcgggcggcggcggcagcggcaagcgctggacgcctgcgcgctctgctccaagccgctggcccgcaacagcgacatcttcatgtacaggggcgacaccccgttctgcagcgaggactgccgctacgagcagatgcaccacgacgcggcggccacggcctacgcgcggcatcaggccagcagccggcggaggcagcagcggagcaggggcggctctgtgtccgccaacgaggcggacgtgtacgtggccagctagagtaagagcaagcgcaagtgcaagcgcggcgaggccgaggatggtgaaggccgtgcgctgcctggttcaagcaagagaatcccgtcggtggaggtggaggcgcaggcgctggcgctcccggttggctgcccgccactgcgccgcacgagctttgtgagcggggggtggatctgaaagagtcgacagtcgaaagctgaagaaggcgagtaggagacagatccagacaacccgcgggttgaaaacttggatatcgacgccatacgtgctctgcgcctctgctcctcttgtttctgttttcccttccctgatgggatcttttgggctgtgagtgggttagaggttgatgaggcctgaggtgtaaatgtacacggcgtttcaggacgtcgttatgatcgatagtcgcgaaattttgatgtccaacgtatctcgaaacagaggttgaggccagccagacgaagcttggcaaatggatgccaggttccctttgagacgaagagatctatctgactgagcgataatcagtttcttttggttttcggaccccatccccaagcccacaggccgacacgttgcgctttggatccggcggaacggaaatctgcgagtgaacgggtacgggtacggctacgtaaagttctggagcgagaaagtgacggagcacgtagtagtagaatgtttcgtcgagctgaaacgtcaagaaaacaaaagatacaaaaaaaaatggcccaaat

SEQ ID NO: 17571 - DNA, 948 bp, Zea Mays
taaagatacgcctccggcccacttcgttgggaggcaaggcaactcagccaagctcgtgagagcagaggaactctctttcctcacactccaaagcagcaagaccatctggcaaagctgcgctagaggccagcatcaggccagcagccggcggaggcagcagcggagcaggggcggctctgtgtccgccaacgaggcggacgtgtacgtggccagctagagtaagagcaagcgcaagtgcaagcgcggcgaggccgaggatggtgaaggccgtgcgctgcctggttcaagcaagagaatcccgtcggtggaggtggaggcgcaggcgctggcgctcccggttggctgcccgccactgcgccgcacgagctttgtgagcggggggtggatctgaaagagtcgacagtcgaaagctgaagaaggcgagtaggagacagatccagacaacccgcgggttgaaaacttggatatcgacgccatacgtgctctgcgcctctgctcctcttgtttctgttttcccttccctgatgggatcttttgggctgtgagtgggttagaggttgatgaggcctgaggtgtaaatgtacacggcgtttcaggacgtcgttatgatcgatagtcgcgaaattttgatgtccaacgtatctcgaaacagaggttgaggccagccagacgaagcttggcaaatggatgccaggttccctttgagacgaagagatctatctgactgagcgataatcagtttcttttggttttcggaccccatccccaagcccacaggccgacacgttgcgctttggatccggcggaacggaaatctgcgagtgaacgggtacgggtacggctacgtaaagttctggagcgagaaagtgacggagcacgtagtagtagaatgtttcgtcgagctgaaacgtcaagaaaacaaaagatacaaaaaaaaatggcccaaat

SEQ ID NO: 17572 - DNA, 4370 bp, Zea Mays
gcttccctcacccgcgtggacgcttgtaacccccctactgcaagcgcacccgacctgggcgcaggacgaacacgaaggtcgcgggacttccacctctctcacgctcggctccggccacctcgcctctccccccttcacgctcgcccacgcgctcgacccatctgggctggggcacgcagcacactcactcgtcggcttagggacccccctgtctcgaaacgccaacaagtatttatctgttttcacaaatcataccttttgtttggaagtctttatctgttttcacgaaaccagcaactaatgcccttggcaatgcagctgaccactcctcatttgtaagatatggaggaatagcagccaagacattgtttaaaaggctctcctttgtgtatatggtagctgcaggcccacaattacggataaaataaaagtggatgtttaaaaggccctcccgcagtcactgataaaataccccagaccaaggcatccattttcatttgaatcccaagaatacagatcacagctatctatcaaaacatcagcgcataattttcaaaattgtacgacaagttaacaactgaaaattttgataattccgcattaacaagatacaaaacaaagactgcacaaacaccaatacctgttacaacaaaaggatggtaacctccacaagcaacttcttttgaaaattgtatctcttcaacaatattaggtctaaattcttcgttcgatcttccaaatccctaaaatggtttgttaaacccaaagaaatggagggagataaaaagtattttgataacatgtgaaggtgccaaggtggtctgattggatacgacctgctcagtgttctgcacaaatatgaacaaagtgcattttctgtaagcttaccatcaatgcaagctgagtgcaacattcagcttgataaagagcacctgagtaagaggagaatgcaagttagcatctagactgattgttcagacaataggaactgtgccagagaacagtttgataaagaataaaattttattacaaattactatggaccaatagctagttcttgaattagttgtctgcattacttacctcatttgctaagcgttcccccatgacgtcaactccatctagagtcaacattgatgcatttttttcactgcccgaaaaaatgcatcaaataagtttgtacactacaggctagataaacaggctattcacttcaaattacaaaattcaagaagggagacttgcattacactatggtaattatatagcagaactcaaagtttgcagatgaactattcagaattaagagcgtcaatgagtagagggagaagatgtagaaaataatactacctccgttctcgaatatttgtcgcacgctagttcatttttgaactaaatcgtgacaaaaaaaaagaagtacggagggagtagttagtataatgagttgaaacaatatacaagctcagagtagtgaaattcagtaacagtcaactacatctccaatcatatacctcttttctcaacaaatggatttgctttatgagagaaaagaaagggctccaaaccaagactgcatcccgttgcaaggatgctgcatgtgtatctgacccaactaacataacatcacaccattctaggtgctactcaataaaacgctacccacactcccacaggtcagaatgtaataaagctggcgtgtagcctgctcgccagggtgagtagggacaatgggcttcaacgtccgcgctggagacagtggcagaggggcggagttcaacgcagacgcgaggtcgagcataaggaatggccggcaacaccagcgcgagcctggagcgtatagaagacggtggaggaagagaaggaggcgacatacctgacctcgtccacgctcacctccacggaaatttagatctaaccaaaaaggggtagggcatggccctcaccttcggctcgagggagtgcctagcaggttggcggtgctagtagctgggaccggtggagctaggcgagcggctttctagcaggtgagcaaggtcgagatccactttctagtaggaggggggctaggagaggggtgagcagcggtggcgagcaggtcagggtgtaagggaggaaggacgcgagcaagggggacggagattaatttactactttaaaatgtgatttttaaattgtctttgcctagtgttggagaaaaaacactcggcaaagagctctttgtcgagtgttgtatttgtgacactcggcaaagaaacgatactcggcaaagaaactctttgccgggtgttaaaaataaaacactcggcaaagagtttattcgccgagtgttttcttttaccgagtgttttttacgtggcactcggcaaagaatgtggcactcggcaaagagcaaaattctggtagtgaacaacgctaaaaataactttttctctacttttttataggtcatttttctctttctttagcagagctaagaaataactcgaaaatggaggttaggttggtcatttgtgtgtgtgtatatatatagtcgactatattagagtaagaaaggtcagaccacaaatatatcgtgtgtcgtatcatgctcggtctgatgaactatttgtatctagcatcgaactaaatgagctaacagtaaatgaatcgtgcatgtgtcaaccaatggcctcttccgccagcctaagcacggtctatcatgagcctcgggtcgacccgagcatggttattgttgtgttgtgttgtattgtgtctgtatggagccaaaataaccatatattgtgtcagtacataatccggtccatccggttagctatgttgaataactacgttatcacggatcaccagatcaactcccttctctttcatcagcagattagacacaagaatttgtagaagatttgtctcccttttcagaagcacgacagagaacacacgagacacatgatgtagtgttggacctctggcatttttctcttcattccatatgaagggtacatactttatatatatagacgtgatacccttagagatatattcgatatgagcccaccaaacgttagggttcacaaagttggttgtggactgcggttggactgcttggctgtttttgggctgttttctacagtttatgtaagcccaataacagcaaacacggtgaaccgctcatgtgcgtctcacaaggctcgaataagtttatttttttattattttgttcttttcttcttacccttttttctattgtatcttttcgctttattccagtttatttttctttgtgttactacgattaatcatttgattacttatttttattatttatgttccactttttcctttttttatattcgatgagatacatatgaattttgtgttgtgtacacatgacattttctatgattattttcccagtactattgagatgtttaggttgttcagatgccgtctatgtgatgtttgttttttatttttcttgattatatattttttcttgttgaagcagtataaatatgaagctagctgtatgatgtatctcaagatattatttacatattctatgatgtgatacacgttacgtatatatatgagcctaatatgaaatccccaccatacgaattcggatcctatttaaacgttggattcacgaaacgttgagcgtttttttttttttttggtctagatgatacgcccgggttttggacttgtcgtgtttagcgacctgtagtctggagctccagtacctgtaccaacaagaccttgtacggaacagttgtgcatcatcgcatggacgctgcactagtgcactctgcctacctaaatgagactggtggtaagctaaaacacgactgcgaagcgtgaaatctagtacgtagtacgcacatcacatgtgtcggggctccgccggaatcgttgcaccgaaccatacgagcggaccgccggccgatggtcgttggctcgcggccaaaagcaacgcccgtgtcgtggctttgattgcaacaacagcgacgctatgcactcctgctaggcgcaatgaactgttgtatcgtgcacgcaaaagatcaagatatgtaggcgctcagcactactacagtaaaaacatacatctccgacggtctccttatatccgtcggacatatatatttgtcgatccgagagcctttgggagccgtctgatataacggcttatctccgacggcttgtctgacagccgtcagatataagtacaaccgtcggagataagcgattttaacacgctagtcaggcagcgccgtttcatttccatcttcaccgcgctcacccctatcgcctgccctgcccgccgccgcgctgccccctgccgccgtggccctgccttccgtcgtcaaccgtcg

SEQ ID NO: 17573 - DNA, 3003 bp, Zea Mays
aagcaacttgcccctataaacatttggaacccaggaaaaagaatggttccaagtggtgctgctgtatttctgaattttcagatggtgaacagtcaactgaactgaattcagtgttttgatagcagttttggagcttgtttgtggctgttctataaggttttatactatggtgcttatagaggaattaaagaccatatattggtgaacaacttccttaaagggtgatggacatgatcccatacaagaattggaataaccactgcttaaagtgggactgtgttgtggctgaaactgaattatattcagtttttgaaaactgaatttcagtgaaagttgctgagtttggagctcttttgtgatcagttcatgaggttttgaacaaataactatatagcaaagttgaataccagagtatactgaacaagtttggttatgaaggattggtctgttgctatataaaaattgtgagaaaatagggcttcaacagagaggcctgcaactgcatgggatcagtggtgtgctagttcagtccattgttgggttggtttattgtttttcttgggattttggagctgttttgtgtctgatccgaggggtataagactaaggtcccaatggcaaattgttagagggttagttggtgaacaaagttcattaaggttggttctcctgttgttgctaggaactgggagagatgaaggggtgaagttgtgaactcagtcaaacagcagcaactcagtgtactccaagaatatctgaaggagatctttttatccctgctggtttctctagtgtgctcgaattgagatgtggttgggctagtcaacaaaagatctagtagcctcacccctgcagaaaaatatcaattttggacccattgctgcctgtaacaggtggagttctcatctgatatttctgtagtatgtcataggatattttggctattaaggctgaccagattcagtgtcccagctgcccctatgatcctgtgctgtgctggtgcatgggagccacatcattgggctcatatgttggtggcactcaaggaaacacccttccctgcatgttgaacatgtgtagggacaccttgccccatattcagctatttatagggcttggttttggacagatttccctccctgccttaagctccagccatagtccactatgggggcgtggggatcctggtgttttgctggtgttaaccttccccacagcgacctagtttgcttcagccagtgcatcatgtgaccatggtgaccatgcaacccgagtgctcttctcaccgtggccagaaaacggagaagagggtgaaatgactgaagaaaagacatcaccacctttggaatctcaggcagagacttggctctacttcgacatctgcgagtccgagcctgactcgcctactaacaaaggcaagccccggtgcatgcaacccctttccttgtgtttttaaatacttttcgcacacttacgtctagtgaaatgtgcattaggttcataggaattgcttgaaaccctttgatgcattgctttccatgatatccatacctttatagatacttctgtgaagtatcaaaattatgatttacaaaaatgcttagccttgcttagatcttgtggataaaggttgtcctcaatttaacccgggagaggatggcttctacctgcaagaatattttcatttggagcaatagtgggatcttactgcaaagttccccgtgatgctctttcatcctaaggaacagacacaatcctaaggatggaaatacttaaatcgagacttgggctaggaacagatgatgctccgcccgggtcaattaaggattggatgcgtatgtaggcctgttgatcaaggactatcttatctagccacatgccctgagaatgggacagggtaagcttgaacccggctattccattcatgaaaagacaatcgcgcactgggcgtggagagatggcgagagtggcacgtaccctcctggcaacggatcgcctaaaaagggtggtgtactctcgggtggcgcggacctgttcatgcagtggaggatccgtgggaatagtagacatcaaggtttatgagaaacatatgtcgtgtggttagagatcctcagctgagtaaatcgattcggatcgccgttatatccccggacagtggagacttgagctccgacctacaacctaagtcaggatgtgaacacgaaggataaaaatgatgttgtcttgatgtgatgtgaaattagactagatgcaaatagagtctattaatacttaacatggcgttaaaagattgaaagtaaggactcactttagtaagctacttctgcaaaagtataagttgatttttgctaaaacctctccttgactcctatttaaccagcatacccttgagagtcttttccttagtcgggtaagacttgctgagtaattccatactcagggtttatccctttgttgtttttaggtgaggaagcgacaaatttttgttgcttttgctccaaggtggtaccaaatgaaggaaaactggaatgaagatgcgggaggacgtggtcctccatataggacttttgtttaatagctatcgggaggagtctgtgcctcccttgatatgtgtaactactcagcactcgtttatagctctggtctgtaataagtaacttgatcttactttctaaataaatgtaagtttatgtaattgctttcgcatttctatatctccgatgttctgtaatgtctgcaagacgggtgagacgttcctggtaaggtaaggaaagataccgaacttgtcaagtgacttaggaacatctacaggatgtctgatgtctgttagacaaggacaactgtaggtgggcctaattactttggaggttccgtcacagttccgacggaagccgcagccttggcgatgagagctgcggcccaagccgcgaatgtttccacatcgagctaggggatccctccgaaggcaaccatctcggcatgccggaggacggtgatcttcct

SEQ ID NO: 17574 - DNA, 1203 bp, Zea Mays
tacaagaaaccattgaggaaacattcagaagacagtctgacgcaattggtaagaaacgttccatggcaaaagcaactgcaaccgcctttgcaaggaagtacaggagaacacgggggagagttagaaccattccccctgatattgcccctactggctcttctgaggaggaaagtggagaaggaaattccaaagagacaatcagagagcaatcttctgctgatgatcattctccagatttaagacagaaaagatgcaggaagaggtctggaccacaaggatcacctgctggaaccattggcagtatcgactacagctttgaggagaatgatgaattagttggtggaaaagaaattttagccacctctccgttgcagggagaaatgcttgcttgggggaaaaatggtgcacggagccaaaatcgacatggcagtgttggttcaaatggcaggactggaaggagtgggcgcattgcaaaattggttgattacctccatactgctgatgaaatggataaagagtttcagttgtttcttcttctccttcctgtcgatggacaaaccatacctaacttggaaaagccttatctaagctgtcgaccaaccttgtccattaaacatcttgcacagttcgttgctcttcagttgtcttgtgaagtcgaagaacttgagatgtacataaggatggaccgccaccgtgtaagtgttggctcgaggccttccagtacaggtgaggcaaaatcacgtccatttgatgacttggaaagactgaacgaagaaaaacttgtttcggagcttcatccttcatttgtctctagcaacggtgatatggtaagatccagtcttaacagatttaatgcgattatccttgcttgcttggtcttgttccgttgatacactgtgttcttgtctttaatgccaggagttacgatatgctttgagaactcgggagtagatcagtttttatcctcagctatcaatttatgaagtcatactgtccttgtgtaaaaaaaatgttcgatgtgaacaatgttgacgctgtttttctcattggtcatgctaagttaatttaccatctttgtaatatacataatgaactgattagcaaatgacctcagtaggtgaacccagttgtatgctatgtactgttcatttatgcgagtcgatggcaggatgggaaatcagaagctgattattattataacat

SEQ ID NO: 17575 - DNA, 1653 bp, Zea Mays
agcgcctctgcctctcgacccacaccaacaccacactttcgcagatcgcgacgacgagcaggtgggtggccgcggcagacgagactgaaccgacacctacatcgagtcgttcctatcatcctatgcgcgccggcaccatggatgagtttatgctagtgaaattagcagagatacggaaggaggttcagtgccctatctgcttaggcattatccggaagacaaggacagttatggaatgtttgcaccggttctgtagagactgcatcgacaaatctatgcgactaggaaataacgaatgcccagcgtgtcgcacccattgtgcaagcagacgttctttgagggatgatcccaattatgatgcactgattgcagccctgtatccagatattgataagtacgaggaagaggaatttgctttcagtgagcaggagaggattcggaataaaaagatacaagaaaccattgaggaaacattcagaagacagtctgacgcaattggtaagaaacgttccatggcaaaagcaactgcaaccgcctttgcaaggaagtacaggagaacacgggggagagttagaaccattccccctgatattgcccctactggctcttctgaggaggaaagtggagaaggaaattccaaagagacaatcagagagcaatcttctgctgatgatcattctccagatttaagacagaaaagatgcaggaagaggtctggaccacaaggatcacctgctggaaccattggcagtatcgactacagctttgaggagaatgatgaattagttggtggaaaagaaattttagccacctctccgttgcagggagaaatgcttgcttgggggaaaaatggtgcacggagccaaaatcgacatggcagtgttggttcaaatggcaggactggaaggagtgggcgcattgcaaaattggttgattacctccatactgctgatgaaatggataaagagtttcagttgtttcttcttctccttcctgtcgatggacaaaccatacctaacttggaaaagccttatctaagctgtcgaccaaccttgtccattaaacatcttgcacagttcgttgctcttcagttgtcttgtgaagtcgaagaacttgagatgtacataaggatggaccgccaccgtgtaagtgttggctcgaggccttccagtacaggtgaggcaaaatcacgtccatttgatgacttggaaagactgaacgaagaaaaacttgtttcggagcttcatccttcatttgtctctagcaacggtgatatggtaagatccagtcttaacagatttaatgcgattatccttgcttgcttggtcttgttccgttgatacactgtgttcttgtctttaatgccaggagttacgatatgctttgagaactcgggagtagatcagtttttatcctcagctatcaatttatgaagtcatactgtccttgtgtaaaaaaaatgttcgatgtgaacaatgttgacgctgtttttctcattggtcatgctaagttaatttaccatctttgtaatatacataatgaactgattagcaaatgacctcagtaggtgaacccagttgtatgctatgtactgttcatttatgcgagtcgatggcaggatgggaaatcagaagctgattattattataacat

SEQ ID NO: 17576 - DNA, 1864 bp, Zea Mays
ctccacttgtgtgtcgttcattctcaaatcaaacctttcgttgttgggaaaattacgtttatgttcgaacgaaattcgaacaagacagggcatttctgtccaagcaccgaccgtcagagaggagagagggggaggcagcgatttattacccgatatatctcgcgttttctcgtcagttaacagatctgatccgacccctgaggccagggagaaaggtcacgtccaaccgccgcgaactgcgcatgtgaactgtgcccgacgaggcgcgctgcggcacgggtgaggggagctgcgccggagcaccagccctagggttttcaccgccctgccgcgagatggacgtccgggacctgcaccagcagccgcagcagcagcaggctccgccgcgcgtgggatccccgccgcaggccggcgccggcggtgtcatgatgcagcatgccgccgcgttcggcgcggcgccgccgccgtccgggttgccgcaggcctcggcggccaacgttatgcacgggatgtcccttgcctttaaccctatggcttcgccggacgcctcgtcacccataagcagcatgaagattgtggacatgccgctggggtctatgtaccgccctgattccggcgcgacgggcttgcagcagcagcagcccggctccggtggcgttggtgccagcggtggtgctatcgtcgccgtcagcggcggggaccttgtgaagaagaagagggggaggccgaggaagtacggcccagatgggagcatcggcttgggactcaagaccgccgcggcgggggtcactgaagcgacgggtgcccagtccggtggaggcgggtctacccctaaccccgacggcaagcgtagagggcgtcctcctgggtcaggcaaaaagaaacagctggatgctttgggatcttcggggacgtcgtttactccccacataataactgtgaagcccaatgaggatgttgcgtccaaaataatggctttttcccaacaaggcccgcgcactacatgcataatttcggcaaatggtgctctgtgcacggcaacactgcggcaaccagcaacctctggtgggatagtgacatatgagaggatggtgacactcgcagcagaacaggtggtttgagcgtggcactggctggaagtgatggacgcatagttggaggttgtgttgctggaatgctgatggcagcgacacctgtgcaggttgtagttggcagtttcattgctgaagctaaaaagccaaaagaagagcaacccaaacgtgagccaacatcggtgccaccgcacacagctgtctttggggcggcctcgactgccagccccccatcggatggcacatcaagtgagcactccgatgatcccgggagccccatgggaccaaacggcagtgcattcaccagcgcggggcttcccctgcactccacatatgctgcagttggttggtcactatcagaggaccaaagccgttatgatccagatctaaagatgatgaccgactgatgggtgccgtttcgcagcttccttgttagcagttgacttagctgagtaggctcaataactaaggaatcctgagagtggtaaaaccttcaggaaggagtagatcacgagtaataattagtaccagtgcatgcctttgtcttgttatatcgtagttagcagtttgtatttgtatggtttcactgtcagaaagtctatgcagcattccttctggtttccatctgtatccacgtagtgcaacaattctcatccatggattggtattgctcaccccacatcatcgtatgcttgtattgcaattctcctcttgggttcacaaaaaagccaatttgcctttgtattagatagactacattaaaccgggtgcaa

SEQ ID NO: 17577 - DNA, 2791 bp, Zea Mays
gtctccacttgtgtgtcgttcattctcaaatcaaacctttcgttgttgggaaaattacgtttatgttcgaacgaaattcgaacaagacagggcatttctgtccaagcaccgaccgtcagagaggagagagggggaggcagcgatttattacccgatatatctcgcgttttctcgtcagttaacagatctgatccgacccctgaggccaggcaaagactctccgccctcccactcccacctcgccacctcctccttcctcgctcccaattttctttttttttccccttccccttcggcgcggcaggattttctccatctgctttccccatttccgccgtattttattcgatttcgaggtcggttttctgttgcacagggagaaaggtcacgtccaaccgccgcgaactgcgcatgtgaactgtgcccgacgaggcgcgctgcggcacgggtgaggggagctgcgccggagcaccagccctagggttttcaccgccctgccgcgagatggacgtccgggacctgcaccagcagccgcagcagcagcaggctccgccgcgcgtgggatccccgccgcaggccggcgccggcggtgtcatgatgcagcatgccgccgcgttcggcgcggcgccgccgccgtccgggttgccgcaggcctcggcggccaacgttatgcacgggatgtcccttgcctttaaccctatggcttcgccggacgcctcgtcacccataagcagcatgaagattgtggacatgccgctggggtctatgtaccgccctgattccggcgcgacgggcttgcagcagcagcagcccggctccggtggcgttggtgccagcggtggtgctatcgtcgccgtcagcggcggggaccttgtgaagaagaagagggggaggccgaggaagtacggcccagatgggagcatcggcttgggactcaagaccgccgcggcgggggtcactgaagcgacgggtgcccagtccggtggaggcgggtctacccctaaccccgacggcaagcgtagagggcgtcctcctgggtcaggcaaaaagaaacagctggatgctttgggtaatatagcctgcagccctgcaccatatctctgccttccgtttatgtttatgtctcaattctttaaagtgtgctcttacttaagagctaagaccaacaaaatctctatatccttgttatgcttttaactagaggactgggcacagaattttgtttttaaaggacccccacattttaaatgaataaaaaataacagagatgccacatgcaaaaaaaaaaatcggaggaaaactctagtttataaagcaaccacagtttgagagtactgctggggaaaccaaacaaatgccaagaacagattgaccaacggcattttaatattttggtgaagtacagtccttgcctttattattatgcactgtataagcattataaagtagcttctatccaaacacgagcgtggtctttgaatattgtatctctcattgtaggttgcttgcataattttttctttttcctaataagggttcataacttcatatatgtacacagaccaaccaaagatggataatttttttccttgtaacctaatcatgcttagatttgtagtaatctctaaccttttacccttgctaaccaataaaggcagtaaatatttgcttttacttggattttttcaccaccatatttcattgccaggatgtcaatgataatgccatttacaggtttctttatttagtgcagcaactctcactgtgtatgtgcttttcaggatcttcggggacgtcgtttactccccacataataactgtgaagcccaatgaggatgttgcgtccaaaataatggctttttcccaacaaggcccgcgcactacatgcataatttcggcaaatggtgctctgtgcacggcaacactgcggcaaccagcaacctctggtgggatagtgacatatgagggccacttcgatatactctctctttcgggctcattcttgcttgcagaggatggtgacactcgcagcagaacaggtggtttgagcgtggcactggctggaagtgatggacgcatagttggaggttgtgttgctggaatgctgatggcagcgacacctgtgcaggttgtagttggcagtttcattgctgaagctaaaaagccaaaagaagagcaacccaaacgtgagccaacatcggtgccaccgcacacagctgtctttggggcggcctcgactgccagccccccatcggatggcacatcaagtgagcactccgatgatcccgggagccccatgggaccaaacggcagtgcattcaccagcgcggggcttcccctgcactccacatatgctgcagttggttggtcactatcagaggaccaaagccgttatgatccagatctaaagatgatgaccgactgatgggtgccgtttcgcagcttccttgttagcagttgacttagctgagtaggctcaataactaaggaatcctgagagtggtaaaaccttcaggaaggagtagatcacgagtaataattagtaccagtgcatgcctttgtcttgttatatcgtagttagcagtttgtatttgtatggtttcactgtcagaaagtctatgcagcattccttctggtttccatctgtatccacgtagtgcaacaattctcatccatggattggtattgctcaccccacatcatcgtatgcttgtattgcaattctcctcttgggttcacaaaaaagccaatttgcctttgtattagatagactacattaaaccgggtgcaa

SEQ ID NO: 17578 - DNA, 2186 bp, Zea Mays
cattggatcgtagaattataaactttataatatgccataaaagctgaaggttgcagtattagtttaaattattctatttgttaatttaaaacgttgtcgcaggctcgcagctgctgttgctgtctgctttcccctcccccggtctacaaagacctcggctttcctttcctacatgctcttcttccttccaaagccttcgcattttcctctcgtcttccccttccccttactccaaattaccccctgctatctacatatcctgtccacactctccctccctgcgctgggccttgcagtttttggttgtgtatcggggaaatggcaatcgacgacgaatcgccgatcagagtcaacagcagaggcggcggcgccatgggaggaggggagtgcgacggggcggagaaccagcggtggccgccgtggctcaagccgctgctggggacgagcttcttcggccaatgcaagctgcacgcggacgcgcacaagagcgagtgcaacatgtactgcctcgcctgcatgaacggcgcgctctgctcccagtgcctcgcctaccaccgcgaccaccacgccatccagatcgtggggacctccggtgacttgcgcatccggaagaagcaggccgttgtcaagaagcatcagaagaagaagaagcagcaggcgcagcagcacaggggcgccgcgttggactcggaggacgactcttcgtccaccagcaccagccgcggcagcgacaggagcagcgtggtgcagagcttcaccccgtcgaccccgccggcgacggccaacagcttccgaaccgggaagcggcgcaagggcgtgccgcaccggtcgccgttcggcagcctcatggtggaggagttctagtcaaaggcgtggtccgaacccgatgccggcccacgcggttgccccctcgccaaaagcagcggtacaccccactgtagcatacgcacttctataccatctactataggtgttgccggatcggccggtctacatagttcatagccacccaagaaaaaaaaaaggagctagtagtagcaagcaataaccaaggccccactgcacgcccgcgcttctggacgacgaggccggtgcaatgtggcacgtacgtcgtacggtacggttacttccattccatagtactgtgctactactactgtagtttacatgcagtcgcagagctgtgctggtagtgagacaacggtttgggttttggtgcctgtaaaaggaaacgaggtagttgtagcagttaccctagtcgtcaccactcatcagcagccagacactactaaattacatagtataataggtgtttcctagtttttaccggcgcttgatatagatgtggatgtacatatatacatatactgtcacagatggggaacggtaggagtgttgttggtactggtgtttgcgtttgttgcctgtaataataaagaggataagaatgctgcatgctcctggcttgtgtgttgcttgtctgattgatggtgggtttatcttctcctgccccctctttttctctgcagtctgtactgtaccatccaccgccagatgctagaaaccgaccatgcaaatgcgtgcatctgcagctgcagctgcagggcggcgggggacgccgggacggtgctaccagcggaacctgattcgtcgctgtgtacggcgagctgagccgtgcccgctgcctaacttggttgacccggcgttcggcatggacagcggcggccggtcgatgccgacgttctcgtcttgctgtgccgaaataactggctccgtcttgctctgccgggtcccatcgtgcccatagtggtcttcgggcgaggcgtggaggcgcgcgcggccgccggcgcatggccgtgtggagaggcgcaagggcgacggagcttcagacgacttcacgcatggccgtgtggtgtggagatgccagccgtgccttgtgcggcgtccgtcccagtcgcgcgcgccggcgcagcgcgggcaagtgtctggaaaatgctcccgcgcccaccaggcaccaggccgccgccgccaccgccaccaccaccgtgccccccgcgcgtgacgcacacgcacacctgtccgatccccatccgtcgcaactggttttccacggcgaaagcaacggggaggggccaccaccaccgtacttgctcggtccctttcccgcgaaacgttcggcgtacaaa

SEQ ID NO: 17579 - DNA, 650 bp, Zea Mays
tgaaggtcaggtttgtctctttcgtagaccccattgttaccgctgtttggccgcaggtggaatgtcatgggctagctgagggtgatggaggcaagtctggttcgatgggcgctgatatactggaatcattgcacagccctgctacaactacgagcaagcttgcgaggcatttctctaggcctctaaccaaggaacaaatggaggcaattatggagctggcaactcaggggaaggaaaaggaagggatcaagaagaagggcagcaaggtgacacccctccaggctcctatcatcgaggcttctgagatgcgctgagttgtaatatgagaggtgtgggtagttctagtgcatcatgttatgtcgccagtgtgcttgcctgtgggtcgcccaggatcttttgttggctgctttgtgtagcaggttgttgcctaggcagtggtgttggtttctttggctggcattatctatgtctctgtctatcttattttctgttgtaagacgctggttattagcttctgaaagtatgttatggacggtggaaggctggttggttcctgtcctcctttcctatcctgtgtacctcatgtgtgacatttatttaagcaggggagctggttttgattaatgaatatcaactgttgtattctgtct

SEQ ID NO: 17580 - DNA, 782 bp, Zea Mays
caaaggcatccactacaactaaaaattggctagttaataagctagttgacagttgctaatttttagctagctagtgagttggctcgggacggacaacccaaggctccaggatggcgcccccgcgggcgattggcgccgccgactcccctggtccccggccttcggcgaggggggtcgtcccttcctcctctgcgtgttcggatcgcgttcccctccacggaggcttcgggtcgtctctccacgcggtgggctcggagttcggctcccagaccaatactcttctggattcgcttgcgaggcatttctctaggcctctaaccaaggaacaaatggaggcaattatggagctggcaactcaggggaaggaaaaggaagggatcaagaagaagggcagcaaggtgacacccctccaggctcctatcatcgaggcttctgagatgcgctgagttgtaatatgagaggtgtgggtagttctagtgcatcatgttatgtcgccagtgtgcttgcctgtgggtcgcccaggatcttttgttggctgctttgtgtagcaggttgttgcctaggcagtggtgttggtttctttggctggcattatctatgtctctgtctatcttattttctgttgtaagacgctggttattagcttctgaaagtatgttatggacggtggaaggctggttggttcctgtcctcctttcctatcctgtgtacctcatgtgtgacatttatttaagcaggggagctggttttgattaatgaatatcaactgttgtattctgtct

SEQ ID NO: 17581 - DNA, 1033 bp, Zea Mays
caatctctgcgcagtgaggagcgaaagggaattaggcttacatctagtccctaattaattttggtggttgaattgcccaacacaaataattggactaactagtttgctctagtgtataagttatacaggtgccaaaggttcacacttagccaataaaaagaccaagtattgggttcaactaaagagcaaagagacaaccgaaggcacctctggtctggcgcaccggactgtccggtgtgccaccgaacatgtccggtgcaccagaggactccagtgcaaactcgtcgtcttcgggaaaatccagaggcaactccactataattcaccggacagtgtccggtgctccaaggaagagcggcctcaggaactcgccagcctcgggaattcgcttcggctgctccgctataattcaccggactgtccggtgtaactgcggggcaacgactacttcgcgccaacggtcacctgcaacagcaattaatgcgcgccagagcacgcagaagtcaggcacgcgcgtagtggcgcaccggacaatcaacagtacatgtccggtgcgccaccggacatccaggcgggcccagaagacagagctccaacgatcgaaacccaatggctttggtgacgtggctggcgcaccggactgtccggtgtgcaccggactgtccggtgcaccattcgacagacagcctccaccaaacgactagtttggtggttggggctataaatacccccaaccaccccacattcaagtcatccaagtttttccacttctcaactacttacaagagctctagcattcaattctagacacaccaaagtgatcaaatcctctccaaactccacacaacgccctagtgattagtgagagagatttgcttgtgttctttcgagctcttgcgcttggattgctttcttctttctttgattcttcattgcgatcaaactcacttgtaattgaggcaagagacaccaaccttgtggtggtccttgtgggaactttgtgttccaagtgattgagaagaaaacctcactc

SEQ ID NO: 17582 - DNA, 434 bp, Zea Mays
cacattccaattccgccaccgccacttctttcttccccgcggacgcgtcgaaaagcgagcctctggggagactcgaggccactctgccttcccctcctatcctcgttccattccattccatctccctcctcgcctacggcttcttccaccgcggcatcgtgcccggcctctgcttcggcgcgggcctggggattacgctgttcggcatggcctacatgttcgtccacgacggcctggtccaccgccgctttccggtcggccccatcgccgacgtgccctacttccgccgagtggctgcctcgcacaagatacaccacatggacaagttcggcggcgtcccgtatgggctcttcctgggaccaaaggagctggaggaggttggtggcctggacgagcttgaaaaggagctcgcgcgaaccagaagggccatctga

SEQ ID NO: 17583 - DNA, 1422 bp, Zea Mays
accgttgtgacactgacttgtgagcaaggggaagcacattccaattccgccaccgccacttctttcttccccgcggacgcgtcgaaaagcgagcctctggggagactcgaggccactctgccttcccctcctatcctcgttccattccattccatcccatctccctcctcgcctacggcttcttccaccgcggcatcgtgcccggcctctgcttcggcgcgggcctggggattacgctgttcggcatggcctacatgttcgtccacgacggcctggtccaccgccgctttccggtcggccccatcgccgacgtgccctacttccgccgagtggctgcctcgcacaagatacaccacatggacaagttcggcggcgtcccgtatgggctcttcctgggaccaaaggagctggaggaggttggtggcctggacgagcttgttagcagtccggtgagtgaagctactgatactgaagacgcaggagaagaaaagacgcgtccagttgtatgcgttgtccgaacaagcgtgttcatgggccagagtgtgccaaatgagttctagctttaggcgagtgggccaaatgagtgtgggctgcgtcccagggtagtataagtactatgagtctgtaataatcaggacaagaagaatttagcttgggtgtggtggattaaatcactggccgtgaatggacccatcctgcaatattcaagtcgtgcttaagaaaaggatgtcatgcttctggttgatcttgaaaagaatatcattgcaggagcagacttgagtgatttagccgtggagcattctttttgtccatctaaagaaaatggtggtcaagacggtcatcttctcagattgggagacatagcttctaaaggtacccaaccaacaactcaaggctgctgagtttctcctgtaaggccagcatcagtactgcccttgtctctcactcacccaaactatggggtaatcagtgctaatccctgaaagctgaagtagagtcatcaatcattgtctacactatcagcggcttgggggcaagccgcatttcaagcggtggggaatgttagcagtccggtgagtgaagctactgatactgaagacgcaggagaagaaaagacgcgtccagttgtatgcgttgtccgaacaagcgtgttcatgggccagagtgtgccaaatgagttctagctttaggcgagtgggccaaatgagtgtgggctgcgtcccagggtagtataagtactatgagtctgtaataatcaggacaagaagaatttaggtaaagtaatacatctatcgccatcttcctttcattctctcctacacgctactctcttctctgatcttctctccctcgaatcccagtagcatccagtagctaacagagctggaaaaggagctcgcgcgaaccagaagggccatctga

SEQ ID NO: 17584 - DNA, 1516 bp, Zea Mays
ctgagtgacaaaccgttgtgacactgacttgtgagcaaggggaagcacattccaattccgccaccgccacttctttcttccccgcggacgcgtcgaaaagcgagcctctggggagactcgaggccactctgccttcccctcctatcctgtgagctgtaacgcttggaggtatgtgaactatccatataagttcctgtgagctgtctcccgctcactcggtccctgtccatccgtagcgttccattccattccatctccctcctcgcctacggcttcttccaccgcggcatcgtgcccggcctctgcttcggcgcgggcctggggattacgctgttcggcatggcctacatgttcgtccacgacggcctggtccaccgccgctttccggtcggccccatcgccgacgtgccctacttccgccgagtggctgcctcgcacaagatacaccacatggacaagttcggcggcgtcccgtatgggctcttcctgggaccaaaggagctggaggaggttggtggcctggacgagcttgttagcagtccggtgagtgaagctactgatactgaagacgcaggagaagaaaagacgcgtccagttgtatgcgttgtccgaacaagcgtgttcatgggccagagtgtgccaaatgagttctagctttaggcgagtgggccaaatgagtgtgggctgcgtcccagggtagtataagtactatgagtctgtaataatcaggacaagaagaatttagcttgggtgtggtggattaaatcactggccgtgaatggacccatcctgcaatattcaagtcgtgcttaagaaaaggatgtcatgcttctggttgatcttgaaaagaatatcattgcaggagcagacttgagtgatttagccgtggagcattctttttgtccatctaaagaaaatggtggtcaagacggtcatcttctcagattgggagacatagcttctaaaggtacccaaccaacaactcaaggctgctgagtttctcctgtaaggccagcatcagtactgcccttgtctctcactcacccaaactatggggtaatcagtgctaatccctgaaagctgaagtagagtcatcaatcattgtctacactatcagcggcttgggggcaagccgcatttcaagcggtggggaatgttagcagtccggtgagtgaagctactgatactgaagacgcaggagaagaaaagacgcgtccagttgtatgcgttgtccgaacaagcgtgttcatgggccagagtgtgccaaatgagttctagctttaggcgagtgggccaaatgagtgtgggctgcgtcccagggtagtataagtactatgagtctgtaataatcaggacaagaagaatttaggtaaagtaatacatctatcgccatcttcctttcattctctcctacacgctactctcttctctgatcttctctccctcgaatcccagtagcatccagtagctaacagagctggaaaaggagctcgcgcgaaccagaagggccatctga

SEQ ID NO: 17585 - DNA, 1123 bp, Zea Mays
aggagctgagccctgagtgacaaaccgttgtgacactgacttgtgagcaaggggaagcacattccaattccgccaccgccacttctttcttccccgcggacgcgtcgaaaagcgagcctctggggagactcgaggccactctgccttcccctcctatcctcgttccattccattccatcccatccccggaaagtgcaaggacgggagggagagcggccggcgcgtcacaaataccaccagcccaggggccatggccgccgcgatgaccagcttcgtcgccaagaacccgctgctcgcggccgcggcgcggcgcagggcgcctcccctcgcggggcgcgccctgccgttctctccgctcgccagcaccagggccccgcgccgcaccgtcacgtgcttcgtgccgcaggacacggcggccccggccgctcccgtgccggcgctggacgaggaggccagggccgcggcggcgcggcgcgtcgcggagaaggaggcgcggaagcggtccgagcggcggacgtacctggtggccgccgtgatgtctagcctcggagtcacgtccatggccgtcgccgccgtgtactatcgcttcagctggcaaatggagggcggcgaggtgccggtgatcgagacgctgggcacgttcgcgctctccgtcggggcggcggtcgggatggagttctgggcgcggtgggcgcaccgggcgctgtggcacgcctccctgtggcacatgcacgagtcgcaccaccggccgcgcgagggccccttcgagctcaacgacgtgttcgccatcgtcaacgccgcgccggccatctccctcctcgcctacggcttcttccaccgcggcatcgtgcccggcctctgcttcggcgcgggcctggggattacgctgttcggcatggcctacatgttcgtccacgacggcctggtccaccgccgctttccggtcggccccatcgccgacgtgccctacttccgccgagtggctgcctcgcacaagatacaccacatggacaagttcggcggcgtcccgtatgggctcttcctgggaccaaaggagctggaggaggttggtggcctggacgagcttgaaaaggagctcgcgcgaaccagaagggccatctga

SEQ ID NO: 17586 - DNA, 1998 bp, Zea Mays
gttaaacttcgcacacatgactgacaacttgagtcttttgttttcgtcccaattaatcctgtcacacgtcctgtacaagccaaacagtgccacgcaggtgtgccccctggcctggcccctgcagccacacaactggccttgcgttgcgccacgcgagtcccgctagctagctcactagctccgcactgaccacccgccaacgtgaccggacctctgcagccgtcgtcccacggcggattcaggactttcgaccgtacttgttcatgggcttggcccttgttagccgcgacacaggacaggggctcctagggtttcttcactcgacgtctttatatgcagaagcaaaatgaatcttggatgcgcgggcattccggcgctgctgggtgcggactgcaagtgcggctgtctctcttcctccttcgcttcgtttctctccaatcaatcgtctcgtctcctctcctctccttggtgcagtgtttatttcgctcttcgcagttttttttccgatcatttttttgcatctctcggctgcaatggtgtgcatggtcagatgattagagaataactgcaacaaaatgatccaggacatgattcctagttttaagtctctgatggcctacgtgctgccatcgcaaatgcttctgctgtcgccgtttcccccctttttgtgttcgtttgtgaatctggatctgcgctggatgtgatgaaggaaagattggtccgtgtttctgatttttttcagtgactgacaaccgtctctgttttccttctgatctcgagcaaaagcccttttttttgcgtcgagtcgatcagtttcctctgttccagtgtttgcctcgttgcaaattgaaattgtggtgatgaattgtgaacaaacttcgcatgtcagacttcggagatgcttctggcatccatgagaagatcattcataatactgagcaatgcagatcttactcgcgaaaggatcgacagtacattttgacgaccttggaacttgctgcctcgtcgcagcacctctgctcgttgcggcggtaggttggtagattggagttcttggactgtcctctagtggtttgtgtaaaatagggttcagaaattatgatgacactcttcacagagataaatttaaaatatgtgacggataatgaatgggatagaggatctgctgaagattgccttgtgcactaggggaggctatctccagtctctggggtgatttgttttgttgtgaatcgtaaaaggccttttctcttcatgctaagatttgaaaatggtcggtacaaatgttgacaaaaggtccggtcaaagttttctgattgctttcgaagtggtttgtattctatataaaaaaaaagtagagtcgataacattatgtttcaaaaattcggaccaagcacgtcgagctggacattcttcctgtcatgggaaacgtcgtttttgatcatttcagggttctgctgataccaaattggctgccgatgttattagcaatggcttgcctaaccgttgttccaagaattcaaagagtttgtctgtattcccatctgttgtaatggctgctgaactcactcgttttcttccatgatgcctacagggttgccctattggtggataagttcaggttgttgtatattaacctccagtggcggagcacgacacaaaaacaagggcagcaggctagcaactagcaagcagcaaaagcaggctagggaagaggccgtctagcaactagcaacaggcttgcaagcagctaagccaagcaagcagccgaagcaggctagtaagcagcaaactgagcaccaagcagtagtcgtctggcgaagcacggccaaccagcaggctagcaagcgcgcgaggctagaacctgcgaggcggtgactccgtaaggcacgggtgcgcagtcgtattcggatagccggcggccagccatacggaggcggtcgcggcgggtgcacgtaacgacgagcaggcggccgggcgggagcggacgtcttgtgc

SEQ ID NO: 17587 - DNA, 2999 bp, Zea Mays
ccagaagcagccagcaagctcatgcccttcaaaagcctccggcagcccagcgccccagccagctagtggtgatctctcatctcagcagcgcgcctgaacgtgtgctccctgctaagctctgcgcctcgataggcaaaggaaaatcaaaccgatcgtcgtcagattaaatggccggtagcagcgcggagcagctcctctccaggatcgccgccggcgacggccacggcgagaactcgtcctacttcgacgggtggaaggcctacgacatgaaccctttcgacctgcgccacaaccgcgacggcgtcatccagatgggcctcgccgagaaccaactgtcgttggacctgatcgagcaatggagcgtggaccacccggaggcgtccatctgcacggcgcagggcgcgccgcagttccggaggatagccaacttccaggactaccacggcctgccggagttcagagaggcgatggccaagttcatggggcaggtgaggggcggcaaggtgacgttcgaccccgaccgcgtcgtcatgtgcggaggagccaccggcgcgcaggacactctcgccttctgcctcgctgacccgggcgacgcctacctcgtgccgacgccttattacccagctttcgaccgcgactgttgctggaggtcaggagtgaagctgctgcccatcgaatgccacagctcgaacaacttcaccctcaccagggaggcgctcgtgtcggcctacgacggcgcgcggaggcagggcgtccgcgtcaggggcatcctcatcaccaacccctccaacccgctgggcaccaccatggaccgcggcacgctggcgatgctcgccgcgttcgccacagagcgccgcgtccacctcatctgcgacgagatctacgcgggctccgtcttcgccaagccgggcttcgtgagcatcgccgaggtcatcgagcgcggcgacgccccgggctgcaacagggacctcgtccacatcgcgtacagcctctccaaggacttcggcctcccgggcttccgcgtcggcatcgtctactcctacaacgacgacgtggtggcctgcgcgcgcaagatgtccagcttcggcctcgtctcgtcgcagacgcagcacttcctggcgatgatgctcgccgacgcggagttcatggcacgcttcctcgcggagagcgcgcggcggctggcggcgcgccacgaccgcttcgtcgcgggcctccgcgaggtcggcatcgcgtgcctgccgggcaacgcgggcctcttctcgtggatggacctgcggggcatgctccgggagaagacgcacgacgcggagctcgagctgtggcgggtcatcgtacacagggtgaagctcaacgtgtcgcccggcacgtcgttccactgcaacgagcccggctggttccgcgtctgctacgccaacatggacgacgacaccatggaggtcgcgctcgaccggatccgccgcttcgtgcgccagcaccagcacagcaaggccaaggccgagcgctgggcggccacgcggccccttcgcctcagcttgccgcgccggggagcaaccaccgcttcgcatctcgccatctccagccccttggcgttgctgtcgccgcagtccccgatggtccacgccagctaggtagtcaccgagcgttcggtaagactggctgtaggttgtgccctcacatgactgcaaacaagtggacaaaaaaaaagacaagactaataaagggcgtacgtagctagcttgacattacacagagtgacagagacgttgcacaggcgtcagcaggcgtcggcggtaagcagctagtcaagtaggacgcatttgtcctcgattttttcgtgttttttttttgacgaaggggcgaagccccctatttcattaagaaataggaaagtatgaaacaaccgcacccacgcggtaggacctccaaaaagaacagccacggccagaaagttatctagactctaaacactatcgctagatcagtgaagagactatgataacagggaaagttttggcctacgaagagctacataagactttcttatatacaaccaaccaagacaggcagaagccacaaaagacctgaacagaatggccaacaaaagacagacaactatcccaacaaggtttcacagcttcagcatctttgtcatccagaaatccgcctgtcaagaggacaccaccccaaggccctcccgaaagcttcacttgccgtctttcggattaacctgcttcctagcaccaccattctttgctccttctttttctgacgaatcgcccaagaatccaaccagaagcagcaaagaaaaatgatgttagatgggtcaagtaaatgactattcccaaaacaccaatcattcctagtgcgccaaatagcccagaataaagcaccacaaccaaataacaccaactgagccatcgtgtcttttggtttacaaaaccaattgtcatacaaatctttgatattttttggaatagatctcaaattcagggccacttgaataactctccacatgtattgagcaatggggcaatagaaaaacaagtgatcaatagactcatccaccccacaaaaacagcagtttaaagaaccaatccagcatctttttctcaaattatctttagtaagaatcttatttcttaccactaaccagaagaaaatcttaattttatgaggcagtttagatttccacaaaaatttatatggaatcaaagattgattttccattttctttctgtataaagaattaacagagaagcttttattccccagtgaccacacaattctatcctcatgatcagatagacaaatctgcttacaataatcaatcagatcatcatataataatttcagattacccacaatccttcttctgaaagtcagggattcaaaatttgaagtgaaaacttcgttaacagagacatctttgttataagtcaagtcaaacaaaacttgaaactgactagacaacggttggtcacccaaccaagtgcttttcc

SEQ ID NO: 17588 - DNA, 4073 bp, Zea Mays
ctttttctggctctctctctccctccgcggtccgcgctgcaaacgcgaacgcgatccttgagagcctaggcgccacagccgccaaatttgacaagacagtgagaaaaagggagcctctcttctctctcctcggccgtcccctcccgggcgcccgcgatgccgctgtcgcggtcgctgttcctgctgctcatgctcgcgctggcgccgcttgcgtccctggccgccccggcgccggcgccgccggtggcgaggacggccggggtgcaggcggagatcgacgcgctcctcgcgttccgccgcggcctgcgcgacccctacggcgccatgtccggatgggacgcggcctccccctccgcgccctgctcctggcgcggcgtcgcgtgcgcgcagggcggcgccggcgggcgcgtcgtcgagctgcagctcccgcggctccgcctctcgggccccatctcgccggcgctcggctcgctgccgtgcctcgagcggctcggcctccggtccaacgacctctccggcgccatcccggcgtcgctggctcgcgtcacctccctgcgtgccgtcttcctccagtccaactcgctctccggacccattcccccgtcgttcctcgccaacctcaccaacctcgacactttcgacgtgtccggcaacctcctgtccggccccgtccccgtctcatttcctcccggcttgaagtacctcgacctctcctccaatgcgttctccggaaccatcccggcgaacattggcgcatccatggcgaacctccagttcttgaacctgtcctttaaccggctccggggtaccgtgccggcgtccctgggcaacttgcagaacctgcattacctctggctggacgggaaccttctcgaggggaccatcccggcggcgctggccaactgctcggcgctgctccacctgagccttcaagggaactcgctccgcggcatcctgccgtctgcggtagccgcgatacccacgctgcagattctctcggtgtcgcggaaccagctcaccggtaccatcccggccgaggcgttcggcggccaggggaactcgtctctgcgcatcgtgcagctcggccgcaacgagttctctcaggtggacgtgccgggaggtctcgccgcggatcttcgggtggtggaccttggcggcaacaagctcgctggtccgttcccgacttggattgctggggcgggagggctgacgctgctcgacctctcgggcaatgcgttcacaggcgagttgccgccagcggtcgggcagctcagtgcgctgcttgagctgcgcctcggcggcaatgctttcgctggcgccgtgcctgcggagattggcagatgcagcgcactccaggtgcttgatctcgaggacaaccacttcaccggcgaggtgccatcagctctaggtggtctcccgaggctcagggaggtctatcttggtgggaacactttctccggccagattccggcgaccttggggaatctggcgtggctagaggcattgtccatacccaggaacagactcactggtcgcctttctcgtgagctcttccagctgggaaacctgacgttcctggacctatccgagaacaacctcaccggagagatccctccggccgtcggcaatttgttggctctccacagtttaaatttgagcggcaatgccctttttggccgcattccaacgaccattggcaacctccagaacctgcgagttcttgatctctccgggcagaagaacctctctggcaatgtcccggcggagcttttcggcctaccgcagctgcagtacgtgtcgttctcggacaactccttctctggcgatgttcctgaaggtttcagcagtctctggagtctgcgcaatctcaatctctccggcaattctttcactgggtcaataccggcgacgtatgggtacttgccgtcacttcaagtgttgtcagccgcacacaaccatatttctggcgagctaccagccgagctcgccaattgttccaacctcactgtgcttgagctcagtggcaaccagctgaccggctccatcccgagggacatctcacgccttggtgaattggaggagcttgacctcagctacaatcagctttcaggcaagataccaccagagatctccaactgctcatcactcacccttctcaagcttgacgacaatcattttggcggagacataccagcctctgttgccagcctctcgaagctacagacgcttgacctgtcgtccaacaatcttaccggcagcatccctgcttcattggctcagattcctggccttttatcattcaacgtgtcacacaacaagctttccggcgagataccggcgatgctcggctcccgctttggctcttcgtcagcatatgcttcgaactcagacttgtgcggtccgccgtcggagagcgagtgcggcgtgtaccggcgacggcggaggcggcagagggtgcagcgcctggctctgcttatcggtgtggtggctgctgcggcgttgctcgttgcgctgttctgctgttgctgcgtgttcagcttgatgggatggaggcgtcggttcgttgagagccgtgacggtgtcaagaagagaagacgcagcccaggacgcggcagcgggtcgagcggcacgagcacggagaacggcgtcagccagccgaagctgatcatgttcaattcaaggatcacttacgctgacacggttgaggcgacccaccagttcgacgaggagaacgtgctcagccgaggccgccacggcctcgtgttcaaggcttgttacagtgacggcaccgtgctggcgattctgcggctcccgtccaggtctgccgatggcgccgtggtgatcgacgagggatcgttcaggaaggaggccgagtctctcgggaaggtgaagcacaggaacctcacggtgctccgtggctactatgccgggcctccgccggacgtccggctgctggtctatgactacatgcccaacggcaacctcgccacgctgctgcaggaagcgtcacaccgggacggccacattctcaactggccgatgaggcacctcatcgcgctcggcgtctcgcgcggtcttgcgttcctgcaccagtccggggtggtgcacggcgacgtcaagccgcagaacattctcttcgacgccgacttcgagccgcacctgtctgatttcggcctcgagccgatggtggtgactgcggccgccgccgccgcgtcgacatcggctgcaactgcaacaccacccgtgggctccctcggctacgtggcccccgacgcggccgctgccgggcaggccacgagggagggcgacgtgtacagcttcggcatcgtgctgctggagctcctcacgggtcggcgccccggcatgttcgccggggagaaggaggaggaggaggaagaggacatcgtgaagtgggtgaagcggcagctgcagcgcggcgccgtggcggaactgctggagccgggcctgctggagctggacccggagtcgtccgagtgggaggagttcctgctgggcatcaaggtcgggctgctgtgcaccgcgtccgacccgctggaccgcccggccatgggcgacgtggtgttcatgctggagggctgccgcgtcggcccggacatcccgtccccgtcctccgccgaccccacctcccagccgtcgccggcctgatctcccggcggctccggcattgccgcccgccagattcatagccgttggttaggggaggccagtcagcagcgggcacggcggagcagggagccatgtgcgcactgctgctcaagcgtgtgcgtgtcgtcgtgctgcgcatgtggggtttccctgcccaagcatcggcaacggctactagaggcaggacatgcctgtcgcctcctggccgttgatctcggccgatctgtacctgtactctctaacgattgatttcgtgtagtggcctgcttggcttcctgggatccttgtcttttaatctcgtttcaccaatgcaacaatcggccgttttgtgccacgtgctgtacatttgtctgtattttgttatcctgattgattggcccagtagggtggatggatggatgatgctc

SEQ ID NO: 17589 - DNA, 2094 bp, Zea Mays
ttaggcactcgactaatcaggttaactccctgccgtcccgcttccagaaagaaccgatctaaaacctccccgccacgcgaagcaaaatcgcgtgccttcccccgacagattcacttccctccttcccactccaagcaccaagctaccaacccgaactgcctcacggccgcgccggtcactgcctccgccgcgccgcgtcgccactcgccaccccgcgcgcactagtctttgccatggcgctgcgtggcagcatccaaatggatacgggaagcgggcccgcgctccagtacctcctgtgcctcgcctgggtcgcggcgaccctccccatcgccgccgccgcgctgccgatccccgcggccgctggcggcaggttcatccacggcctgctctgcgccttctcgtcccgcgggaagacagtcaggccctcgtcctcgtcctcgtccaaggcgaggttcaccgtttcacaaaaatgcttcttgcatttttacgtggtgggtgcggttgtgacgactagcttgctacttgcaatatggttctatgcatacatgaaaatgacacctttgatgccagaacaatcgagttactccacaattgctagtcatcttgttggtggttcaaattcattccatttggcaaatttctggtcatcacgccccatggaacacaagtatcgtgtctggcgtactgtatttgtacttatattgatggaaattcaggtcctgagacgcctatatgagactgaacatgtcttccactacagtccttcagctcaaatgcacatcataggatacctaacgggtattttctactatgtggccgcacctttatcacttgctagttcttgtcttcctgaagcaatacagtatcttcgatatcaaatagctgagttcatagtgaagggtagagcaagaatgccagatctatcaattgacccatcacatctcttgaagcctcttctaaagttggggtggtgccagtggattggtgctgttattttcatctggggctcactccatcagatccgctgccatgcaattcttggatcattgcgtgaacacaaagattctgatgaatatgtaattccgtgcggtgactggtttagtctagtgtcttgccctcattaccttgctgaactagtaatatattttggcatgttggtggctagtggtggatcagacattccggtgtggttcctgtacctttttgtgataacaaatttgtcctttgcagcggtacaaacacataaatggtatcttcagaaatttgaagattaccctcgttctcgctacgcaatcgttccatttgtatgctagatgtccccataaatgccaacagcatttgttgtctgttttcatctgcttgcaccagtcaggcatgcaacagatattgatgtaaatgtgactatgcaatgttgaacttaagtagttccgatcattctgaatgtgcttagaaggttataaggttatgtttgtgtatgtagattataacacacagatatttgatgtaaagtagtattaattaatactttttagcattaatgaaaatgaagtccttcagaaccagaggcttatcaaggactagtgaccatctaactgatagtgaaacaaatggtgttattgttcatcatacttccattgtgtcagtgtttcatgtcatcattgatgcttgtttgatcttaggtttctgctgtttacagcagactcaaacccttactgggaatggagatagatacttcagttggatcatctgttgccaagtgtgcccttctctgctaatcttccgtattgaatcatcacaatttgctggtattactgcttttgttactgaacagttgccaattattttatcgactatcaaagatatcagatttcatagaagcctttagattggaaataacagtaaaaagctaacactacttgttggataattggtaaatgcagttaaaatcgaaggctgttcctttgaccaggttcaccctttgctcatacagaaatccttctacactttgcaagtttgcatatcagatttcatagaagcctttagattggaaataacagtaaaaagctaacactacttgttggataattggtaaat

SEQ ID NO: 17590 - DNA, 2130 bp, Zea Mays
cagacctcaagattaggcactcgactaatcaggttaactccctgccgtcccgcttccagaaagaaccgatctaaaacctccccgccacgcgaagcaaaatcgcgtgccttcccccgacagattcacttccctccttcccactccaagcaccaagctaccaacccgaactgcctcacggccgcgccggtcactgcctccgccgcgccgcgtcgccactcgccaccccgcgcgcactagtctttgccatggcgctgcgtggcagcatccaaatggatacgggaagcgggcccgcgctccagtacctcctgtgcctcgcctgggtcgcggcgaccctccccatcgccgccgccgcgctgccgatccccgcggccgctggcggcaggttcatccacggcctgctctgcgccttctcgtcccgcgggaagacagtcaggccctcgtcctcgtcctcgtccaaggcgaggttcaccgtttcacaaaaatgcttcttgcatttttacgtggtgggtgcggttgtgacgactagcttgctacttgcaatatggttctatgcatacatgaaaatgacacctttgatgccagaacaatcgagttactccacaattgctagtcatcttgttggtggttcaaattcattccatttggcaaatttctggtcatcacgccccatggaacacaagtatcgtgtctggcgtactgtatttgtacttatattgatggaaattcaggtcctgagacgcctatatgagactgaacatgtcttccactacagtccttcagctcaaatgcacatcataggatacctaacgggtattttctactatgtggccgcacctttatcacttgctagttcttgtcttcctgaagcaatacagtatcttcgatatcaaatagctgagttcatagtgaagggtagagcaagaatgccagatctatcaattgacccatcacatctcttgaagcctcttctaaagttggggtggtgccagtggattggtgctgttattttcatctggggctcactccatcagatccgctgccatgcaattcttgtaatatattttggcatgttggtggctagtggtggatcagacattccggtgtggttcctgtacctttttgtgataacaaatttgtcctttgcagcggtacaaacacataaatggtatcttcagaaatttgaagattaccctcgttctcgctacgcaatcgttccatttgtatgctagatgtccccataaatgccaacagcatttgttgtctgttttcatctgcttgcaccagtcaggcatgcaacagatattgatgtaaatgtgactatgcaatgttgaacttaagtagttccgatcattctgaatgtgcttagaaggttataaggttatgtttgtgtatgtagattataacacacagatatttgatgtaaagtagtattaattaatactttttagcattaatgaaaatgaagtccttcagaaccagaggcttatcaaggactagtgaccatctaactgatagtgaaacaaatggtgttattgttcatcatacttccattgtgtcagtgtttcatgtcatcattgatgcttgtttgatcttaggtaagttatgcctggtactcagatctctgctaagcactgtgttgggtcttaaatttcaatcggtgtgtttggatctttgattatgtcaatcccaaatttctaattctgaggttttctcaggtttctgctgtttacagcagactcaaacccttactgggaatggagatagatacttcagttggatcatctgttgccaagtgtgcccttctctgctaatcttccgtattgaatcatcacaatttgctggtattactgcttttgttactgaacagttgccaattattttatcgactatcaaagatatcagatttcatagaagcctttagattggaaataacagtaaaaagctaacactacttgttggataattggtaaatgcagttaaaatcgaaggctgttcctttgaccaggttcaccctttgctcatacagaaatccttctacactttgcaagtttgcatatcagatttcatagaagcctttagattggaaataacagtaaaaagctaacactacttgttggataattggtaaat

SEQ ID NO: 17591 - DNA, 533 bp, Zea Mays
tccgaattgtctaaggcctccagaattataatagagtaatatattttggcatgttggtggctagtggtggatcagacattccggtgtggttcctgtacctttttgtgataacaaatttgtcctttgcagcggtacaaacacataaatggtatcttcagaaatttgaagattaccctcgttctcgctacgcaatcgttccatttgtatgctagatgtccccataaatgccaacagcatttgttgtctgttttcatctgcttgcaccagtcaggcatgcaacagatattgatgtaaatgtgactatgcaatgttgaacttaagtagttccgatcattctgaatgtgcttagaaggttataaggttatgtttgtgtatgtagattataacacacagatatttgatgtaaagtagtattaattaatactttttagcattaatgaaaatgaagtccttcagaaccagaggcttatcaaggactagtgaccatctaactgatagtgaaacaaatggtgttattgttcatcatacttcca

SEQ ID NO: 17592 - DNA, 1605 bp, Zea Mays
cactcgactaatcaggttaactccctgccgtcccgcttccagaaagaaccgatctaaaacctccccgccacgcgaagcaaaatcgcgtgccttcccccgacagattcacttccctccttcccactccaagcaccaagctaccaacccgaactgcctcacggccgcgccggtcactgcctccgccgcgccgcgtcgccactcgccaccccgcgcgcactagtctttgccatggcgctgcgtggcagcatccaaatggatacgggaagcgggcccgcgctccagtacctcctgtgcctcgcctgggtcgcggcgaccctccccatcgccgccgccgcgctgccgatccccgcggccgctggcggcaggttcatccacggcctgctctgcgccttctcgtcccgcgggaagacagtcaggccctcgtcctcgtcctcgtccaaggcgaggttcaccgtttcacaaaaatgcttcttgcatttttacgtggtgggtgcggttgtgacgactagcttgctacttgcaatatggttctatgcatacatgaaaatgacacctttgatgccagaacaatcgagttactccacaattgctagtcatcttgttggtggttcaaattcattccatttggcaaatttctggtcatcacgccccatggaacacaagtatcgtgtctggcgtactgtatttgtacttatattgatggaaattcaggtcctgagacgcctatatgagactgaacatgtcttccactacagtccttcagctcaaatgcacatcataggatacctaacgggtattttctactatgtggccgcacctttatcacttgctagttcttgtcttcctgaagcaatacagtatcttcgatatcaaatagctgagttcatagtgaagggtagagcaagaatgccagatctatcaattgacccatcacatctcttgaagcctcttctaaagttggggtggtgccagtggattggtgctgttattttcatctggggctcactccatcagatccgctgccatgcaattcttggatcattgcgtgaacacaaagattctgatgaatatgtaattccgtgcggtgactggtttagtctagtgtcttgccctcattaccttgctgaactagtaatatattttggcatgttggtggctagtggtggatcagacattccgataacaaatttgtcctttgcagcggtacaaacacataaatggtatcttcagaaatttgaagattaccctcgttctcgctacgcaatcgttccatttgtatgctagatgtccccataaatgccaacagcatttgttgtctgttttcatctgcttgcaccagtcaggcatgcaacagatattgatgtaaatgtgactatgcaatgttgaacttaagtagttccgatcattctgaatgtgcttagaaggttataaggttatgtttgtgtatgtagattataacacacagatatttgatgtaaagtagtattaattaatactttttagcattaatgaaaatgaagtccttcagaaccagaggcttatcaaggactagtgaccatctaactgatagtgaaacaaatggtgttattgttcatcatacttcca

SEQ ID NO: 17593 - DNA, 1526 bp, Zea Mays
cactcgactaatcaggttaactccctgccgtcccgcttccagaaagaaccgatctaaaacctccccgccacgcgaagcaaaatcgcgtgccttcccccgacagattcacttccctccttcccactccaagcaccaagctaccaacccgaactgcctcacggccgcgccggtcactgcctccgccgcgccgcgtcgccactcgccaccccgcgcgcactagtctttgccatggcgctgcgtggcagcatccaaatggatacgggaagcgggcccgcgctccagtacctcctgtgcctcgcctgggtcgcggcgaccctccccatcgccgccgccgcgctgccgatccccgcggccgctggcggcaggttcatccacggcctgctctgcgccttctcgtcccgcgggaagacagtcaggccctcgtcctcgtcctcgtccaaggcgaggttcaccgtttcacaaaaatgcttcttgcatttttacgtggtgggtgcggttgtgacgactagcttgctacttgcaatatggttctatgcatacatgaaaatgacacctttgatgccagaacaatcgagttactccacaattgctagtcatcttgttggtggttcaaattcattccatttggcaaatttctggtcatcacgccccatggaacacaagtatcgtgtctggcgtactgtatttgtacttatattgatggaaattcaggtcctgagacgcctatatgagactgaacatgtcttccactacagtccttcagctcaaatgcacatcataggatacctaacggctactatgtggccgcacctttatcacttgctagttcttgtcttcctgaagcaatacagtatcttcgatatcaaatagctgagttcatagtgaagggtagagcaagaatgccagatctatcaattgacccatcacatctcttgaagcctcttctaaagttggggtggtgccagtggattggtgctgttattttcatctggggctcactccatcagatccgctgccatgcaattcttgtaatatattttggcatgttggtggctagtggtggatcagacattccggtgtggttcctgtacctttttgtgataacaaatttgtcctttgcagcggtacaaacacataaatggtatcttcagaaatttgaagattaccctcgttctcgctacgcaatcgttccatttgtatgctagatgtccccataaatgccaacagcatttgttgtctgttttcatctgcttgcaccagtcaggcatgcaacagatattgatgtaaatgtgactatgcaatgttgaacttaagtagttccgatcattctgaatgtgcttagaaggttataaggttatgtttgtgtatgtagattataacacacagatatttgatgtaaagtagtattaattaatactttttagcattaatgaaaatgaagtccttcagaaccagaggcttatcaaggactagtgaccatctaactgatagtgaaacaaatggtgttattgttcatcatacttcca

SEQ ID NO: 17594 - DNA, 1622 bp, Zea Mays
cactcgactaatcaggttaactccctgccgtcccgcttccagaaagaaccgatctaaaacctccccgccacgcgaagcaaaatcgcgtgccttcccccgacagattcacttccctccttcccactccaagcaccaagctaccaacccgaactgcctcacggccgcgccggtcactgcctccgccgcgccgcgtcgccactcgccaccccgcgcgcactagtctttgccatggcgctgcgtggcagcatccaaatggatacgggaagcgggcccgcgctccagtacctcctgtgcctcgcctgggtcgcggcgaccctccccatcgccgccgccgcgctgccgatccccgcggccgctggcggcaggttcatccacggcctgctctgcgccttctcgtcccgcgggaagacagtcaggccctcgtcctcgtcctcgtccaaggcgaggttcaccgtttcacaaaaatgcttcttgcatttttacgtggtgggtgcggttgtgacgactagcttgctacttgcaatatggttctatgcatacatgaaaatgacacctttgatgccagaacaatcgagttactccacaattgctagtcatcttgttggtggttcaaattcattccatttggcaaatttctggtcatcacgccccatggaacacaagtatcgtgtctggcgtactgtatttgtacttatattgatggaaattcaggtcctgagacgcctatatgagactgaacatgtcttccactacagtccttcagctcaaatgcacatcataggatacctaacggctactatgtggccgcacctttatcacttgctagttcttgtcttcctgaagcaatacagtatcttcgatatcaaatagctgagttcatagtgaagggtagagcaagaatgccagatctatcaattgacccatcacatctcttgaagcctcttctaaagttggggtggtgccagtggattggtgctgttattttcatctggggctcactccatcagatccgctgccatgcaattcttggatcattgcgtgaacacaaagattctgatgaatatgtaattccgtgcggtgactggtttagtctagtgtcttgccctcattaccttgctgaactagtaatatattttggcatgttggtggctagtggtggatcagacattccggtgtggttcctgtacctttttgtgataacaaatttgtcctttgcagcggtacaaacacataaatggtatcttcagaaatttgaagattaccctcgttctcgctacgcaatcgttccatttgtatgctagatgtccccataaatgccaacagcatttgttgtctgttttcatctgcttgcaccagtcaggcatgcaacagatattgatgtaaatgtgactatgcaatgttgaacttaagtagttccgatcattctgaatgtgcttagaaggttataaggttatgtttgtgtatgtagattataacacacagatatttgatgtaaagtagtattaattaatactttttagcattaatgaaaatgaagtccttcagaaccagaggcttatcaaggactagtgaccatctaactgatagtgaaacaaatggtgttattgttcatcatacttcca

SEQ ID NO: 17595 - DNA, 3763 bp, Zea Mays
tacttctctgcctcgtctccttcctcgctgccgtccttacctcttctccacgaaatctgccattgctgcttgtttctcttctgcagcctcgctaggcatctgcagcttcgctaggcatcgctaacatgccctcgatggccaccaccgcagcgcccgcggccgatctctcggcgcccgataagcagcaggactcggctcttccggagctcactacgaaattcatggtggacatgaaatgtgagggatgtgtaacagctgtgaaaaacaagctgcaaactcttgaaggaataaaaaacattgaggtggacttgtctaaccaagttgttagggttctgggatctcgtccagtgaagataatgttagatgtcctttatcaaacaggtcgagaagcacgactgattggacaagggaacccaaatgatttcttagtttctgctgctgtagctgagtttaaagggccagttgtatttggtgttgttcgtctggcccaagtaaacatggagttggctagagtggaagccacgtttagtggtctatcacctggtgaacatggatggtcaataaatcagtttggggatttgacaagaggtgcagaaagcactggcaacatatataatccgccagatcatttatctgatacgcgaaggacaaatcagaccctggcatcgccgcagcggtgattgcaagaagtgccggcgtaggagagaactacaaggaactctgcacttgtgatggtgtcaccatttgggaatcaagctaaacctgctagcagcaaattttccgtactatttgcttccatttcttgtacactcattaatgtagaaacaatcaaactggcaactgaacatttggaataagcatgaatacattgaagaataaaggcggttctcatgtggagctttgacagtatttttccgttggttagtgaacctgttctgccgctgccgctgccgctgcgacacaacggatctctggcttgattacccaggcccagaggttcctgctccattgcttgctctaaacgcacggtaaataaacgaagctcacatcggtggcagccatgtgaggacaagggggctccggacgatgtggacgccgtcgctccaagacagcgctccgaactccggtgtcttctgggcagccttggttgtcatcgtcaccttgtaggttagcttctggttcgaacttgtgaagtgcagggtgcttggttcgacgacaatgtctgcgcctttgaactctgtaaccttgacatggtaagtcgaagacggcgggccgacgttcgtcacggtgcgacgcaccgtcagcgcagcagatggctgctccgcgaagaccgcggagatggccggataattcaagtcacccggcgagctgaaggtgtgcttgcatgtcttgctcgagttcttggtgaaggacctgagctgcaacggcgtcaggttctccacgcagaggaactccaggtagtcgtcctggccgatgtcgtagaccaggccagggttgagggcacgcagcgggtgtatgtgcccagctccgtgatcgaacggcgtggacgccttgccggtggccgcgtccttcagcgaccggtacgtgttgtcgtggacgtacgcggtggtcatcagcgcggacttgatcttcgcggggctccagtccgggtggctggccttgatcagcgcagccacgccggcgacgtgcgggcacgacatggacgtccccgacaggatgttgaagccgacccgccggcggtcgctggacaagctcgacgggctggcgtcgccgctccatgccgccaagatgttcacgccgggcgcgatgacatccggcttgaggatctccagggtcaggaagtttggtccccgggacgagaacgcggctacgactggcgatgggcggatcccgagcttcgtcccgtcgaagctgagcgtggccgttggtttcggggcggttttgctgtacttcttggcggcaatgccttcagactgcccaacggccactgctggcaggaggtggctgtcggcgacaagctcctcgccgtttgccggtgtgttggcgagtatcatgcccgcggcaccggcgttcttgacaacctgacccttctgcacccgaggactaatgccgcggtcgcagatcacaatctttccagcgacctcgtggggctggagtgtcccctccaggcacagggacctggggtcagggatgctcgagttgccgcccatgtagactaacgggtactgctccttggacgaaagacctcgccggcctttgtagagcgaaaccccggtgaggtttgcgccattgccgagcgtcaccgtggccgggaagtcccggtccatggtgctcgcgcccaccgtggttatccacggcgacaggttggtgaggcttatggggtccgggccgccgttgccgcccgagcaggcgacgaacacgcccatctgcatggcaccgaacgacgcgatggccaggctgtcgcggaagtagggggacgagccgccgccgagcgagatggagagcacgtcgacgccgtccgccacggcgcggtcgacggccgccaggatgtcggagctgaagcagccccccgtccagcacaccttgtacgccgcgacgcgggcgcggggcgccatgccacgggcgacgccgctggcgtagccgaagaggctggcgtccggcacgggcgcgcccgcggcggtggccgcggtgtgcgtgccgtggccgtcctggtcccgcggagatttgagctcggccgtctcgttgatggggcccgacgaggcctcgtagccgttgtagaagatgcgcgcgccgatgatcttgcggttgcagctggctacggtgaagccgcggccggtctggcacaggcccttccacctggccgggacagggccgaggcccttgtcgctaaagctggggctctcgggccagatgccggtgtcgagcacgccgacgacgacgtcgtggtcggccaggccggcggaccatatgctgtcgctgatctccgggctgatgcccaggaagtccgggctcctggtggtgtgcagctgcaggaccgtctccgggagcacggccaccacgccgtccgcctcggccatccgctcggcctcgtcctcgtccagcttcgccgcgaagccgtggaacgccgtctcgtagttgtagacgatcctcgcggcgtaatggtcgtccgcgtctccttccagctgcacagagctcacggatttcacagtggatgcgtaccattcgtggtggaaatcgaacgagctcggcatctcagacgcggccatctgaacgatgtaagtcttgggagctgccccgcgagcagggaggcatgcttgcagagccacgagagctaggcacagcggcagagccttccatctgacgccgccagaacccatggaggacgagtctcgaagctgtgatggatggacagaggtggaggagccagctcagctgccgtgccttatgtatgctgctgctgctcgtacagcgtcctcgagtgagctccggtgtccggtgtgggaagcaggggagtggagattggagagtgaacagcaggcgccagacgggaaggtggtggttgccggtgtcctcatttattaagtttattcatcactcggctcagctgtgcggtgggactgtaaatggcgagagccgttgtttggtgcgctcatgccatgccgccattacttcttggagatattttaagtgggccattgacgcttgtgttcttctgcttctcctgcctgcaagctgcaaggttagattcgagcaaagggaaagg

SEQ ID NO: 17596 - DNA, 2107 bp, Zea Mays
aggctatcaaattctttatcttcagtttcagactgttatttgtgacgtcaagatggttaatttcggaaagaaattgatggccgatcaagtggaagaatggaaaggatactacatcaattacaagctgatgaagaaaatgttaaagcaatatgtccaacagacccagcatggtgggaaagatcgtgaacaagttcttaaagagttttcaaggattcttgatgaccagattgaaagaatcgtgctttttctgctacaacaacaaggccatcttgccagtaggattgaggaattgggagaaaaacgctctgctctggaagagtatgacatatcacaagtttatcagctacatgatgcatacagagaagtcgggcttgatcttataaagcttctccgctttgttgacgtgaatgctaccggtatacgcaagatactaaagaaatttgataaacgctttggctacaagttcactgattattatgtcaccactcgcgcaaatcatccttattctcagcttcagcaagtctttaagcaagtgggaattgtagctgttgtaggtgcattatcgcgcaaccttgaatatctgcaacatcatgaaggaagctttgtatccatctatgatcgtccagcagttactttgaaggaccctattatagaccaagtaaaccatgcagtacagaagctcacgcatgccacgaattttatgcaattcttgggacaacactcgcttattgtccaggaagatgcacaaagcgggtcagaggaccttgttgatgatcagagctaccatttcatgtcgctgatgcttaatctagtgaacacattcctttacatggtgaatacatatatcattgtgccgactgcagatgactatgcagtaagccttggggctgctgcaactgtctgtggtataattattggatcgatggcagtcgctcaagttttctcctcagtctacttcagcgcctggtcaaataagtcctacttcaaacctcttgtattcagtagcattgtgctgtctcttggaaacctgctgtatgcattggcatttgatctaaattcactgtcagttctcctaattggacgactgttatgcgggttaggctctgcaagagcagtgaaccgtcgctatatcagtgactgtgtgcctctcaagatgaggctacaagcctctgccgggttcgttagtgctagcgctcttggcatggcatgtgggcctgctctggctggttttctccagactaaattcaagatatactcgatcacttttaatcagagcacattgcctggatgggttatgtgcattgcttggcttatttacttactgtggctatggtttacattcaaggagccggaacacttcactaaaactttggtcaatgaacatccatcagaatcaggcccagctgttgatatacttcatgctcaagtacgcaatggagatactactctcagaatcaagcgttgtcaccacatactattttagctggtctactagttctgtggctatctttctagcgattcttggattaacggttcttccagtaaatgcaatcgttggaagctacattacgaacttgtttgaggataggcaaattttgctggcatctgaagtcatggttctcattggtataatcatgagctttcgtttcacacctcactactccattccgcaatatgtcatttcagctctcatcacatttgtattttctgaggtgcttgaaggagtgaatctgtccttgctttcacgagtgatgtcgtcaaggctttcccgagggacctacaatggtggactcctttcaacagaggccgggacgttggcccgtgtagttgcagacgccaccattactgcagccggttatctaggcacggacctccttctcaatgtcactcttctgccacctcttgtgatctgcatagtctccatcgcagcaacactctacacttacaacaatctctactgaagaagcatgtctcttgtagctgtacaagtgtatagcaatgttcctaagctaaaacgattcctgcccagaatgggtttgtatatctgttcgagcatggtttgtaaacattttgatgaagtatatatgcaatatttcttgtatttagc

SEQ ID NO: 17597 - DNA, 659 bp, Zea Mays
cttcattcttcctcgcctagctagctgagaccctgacctgatcgcgcgagctataaatacccaccactgtcccggcgggccttcctcccgcccgctcgcctcctgtcttggactggacagcagcacgggcgcgcgcacggcagtagctgcgccattgcacgcctccggccggccgctgctgtgctgccgccgcacacccgtcctcgcaccgcactgtgtgtgcctcgtcctccacgcggcagaaggtgctgatccgttgcaggtttggcgcgccaccgcgtatgctcgctcgcgtttgctgatgttcatctaattctatccgcggccgaaagagcaattgtccgcgcgcggaggggcggccggcggccggcggcggcgaagggagagatttctactcaaggtgtgagttgcttgacccaataattcctcgatcggctgtgttggggacttgttctcaaatgctatgaattaagaacaaggtaacataaaatgttaaatgattttgtccttcgtccgtgaagcattaaaccctttgggataatggatcttagacgaaggttgataagcgtcttattacgaagttgaaccttcgtaataaactttcaataaacgttatagaataatgcaaagtaaaaaaggtaagaatggataaatgattc

SEQ ID NO: 17598 - DNA, 1090 bp, Zea Mays
catatatgcataatacagtgaaaaagcatagtacagtgaaaaagcaacaatttttcgaatcaaatccattgtacttcgtgggcttcaggcagcaattattcacgggatttacgcgcctttgggaaaccggagccaggtcacggaaacgtggcaataatatccaagcccgtgttttgtgttataaaatattgtatttgtgatcaatccaaggggtgcgacagattattctcaaggggtacatcccttgagaacgcaacctttcacctgtatataaacagagttctccctgcaataaagaacacaactatcatttgcactattatcttgaatctcgttttcactgagttacaacatgttatcagcactgctcgcgagatcagagaaaaagacttgtgctgagttccttgttctaatgaacatagacttgggtcgctacagcaaccaactgagaaagagaccaagcgataaaaggacacagcatgcaacaacggattttctttgcaggttgcttgcttcgtgcatggccttcccggttcccgctgtacctgtacgctaggccaccgcgcggcaagtagtactacgtttcgatccaggagctgtcgatcgcggaggcgcccggctggcgctctgggcctggcactggcaaaccgatccgcagccgcagtggtgcgtgacctgcagcgagcggattgcactctgcgaacgtacagtgctatgcagggaaaaggcgagggaggaggccggtcggtcgagctagcagatgcggagcagcctggcgtccatcgcgcgcgtcgtcgccgccaccggccgcagccgagcctggttggtggggcatgcagttgcagctttgagggctgaggttgtccagtcaccagtcagtcagtgtgtggccgccggcgcatgttgcattcagcgccagcatgcatgatcagaaattcagaatagtccaatgcgcatccactcggctcgggggcggcgtcgctgattttctgtgacgtccttttggaccggacgtggacagcctgtgattgcatgcagtcagggtttgcaagtccgtccggatgatggccatatatattgtcactgactc

SEQ ID NO: 17599 - DNA, 1085 bp, Zea Mays
catatatgcataatacagtgaaaaagcatagtacagtgaaaaagcaacaatttttcgaatcaaatccattgtacttcgtgggcttcaggcagcaattattcacgggatttacgcgcctttgggaaaccggagccaggtcacggaaacgtggcaataatatccaagcccgtgttttgtgttataaaatattgtatttgtgatcaatccaaggggtgcgacagattattctcaaggggtacatcccttgagaacgcaacctttcacctgtatataaacagagttctccctgcaataaagaacacaactatcatttgcactattatcttgaatctcgttttcactgagttacaacatgttatcagcactgctcgcgagatcagagaaaaagacttgtgctgagttccttgttctaatgaacatagacttgggtcgctacagcaaccaactgagaaagagaccaagcgataaaaggacacagcatgcaacaacggattttcttgttgcttgcttcgtgcatggccttcccggttcccgctgtacctgtacgctaggccaccgcgcggcaagtagtactacgtttcgatccaggagctgtcgatcgcggaggcgcccggctggcgctctgggcctggcactggcaaaccgatccgcagccgcagtggtgcgtgacctgcagcgagcggattgcactctgcgaacgtacagtgctatgcagggaaaaggcgagggaggaggccggtcggtcgagctagcagatgcggagcagcctggcgtccatcgcgcgcgtcgtcgccgccaccggccgcagccgagcctggttggtggggcatgcagttgcagctttgagggctgaggttgtccagtcaccagtcagtcagtgtgtggccgccggcgcatgttgcattcagcgccagcatgcatgatcagaaattcagaatagtccaatgcgcatccactcggctcgggggcggcgtcgctgattttctgtgacgtccttttggaccggacgtggacagcctgtgattgcatgcagtcagggtttgcaagtccgtccggatgatggccatatatattgtcactgactc

SEQ ID NO: 17600 - DNA, 994 bp, Zea Mays
ctcgttctgtgtattctgctggattgaatgacctattcgggtccgagcccacgccacgtgttggcgtgcgctgcctgccgtgcgcgtgaaacgcggagatggcttcaatcgatagtcttttaactaaaggtaatagcttatgtagctactgtcgtcggcacatcctacgtgcagactctatacccgtacgggtacataatgcatatatgcataatacagtgaaaaagcatagtacagtgaaaaagcaacaatttttcgaatcaaatccattgtacttcgtgggcttcaggcagcaattattcacgggatttacgcgcctttgggaaaccggagccaggtcacggaaacgtggcaataatatccaagcccgtgttttgtgttataaaatattgtatttgtgatcaatccaaggggtgcgacagattattctcaaggggtacatcccttgagaacgcaacctttcacctgtatataaacagagttctccctgcaataaagaacacaactatcatttgcactattatcttgaatctcgttttcactgagttacaacatgttatcagcactgctcgcgagatcagagaaaaagacttgtgctgagttccttgttctaatgaacatagacttgggtcgctacagcaaccaactgagaaagagaccaagcgataaaaggacacagcatgcaacaacggattttcttgtaagatattattcttgaatttttgttcatattcaatggcatcgtctccatggacaaagatgagcgaacgggttttccttgtaagacttacgttttgcatatgcgcgggcggttgctccgtatggggctgttggtcgctagaccgcgcacgcgcgccgcgacgtaccgcgcttcggccggaggctgcgttggccgagggccgcacaccagtggcctaccgcgaggccgagcccggggctagccgcactgcagccggcagtgctacccgcgccgccgcggggggggggggggggg

SEQ ID NO: 17601 - DNA, 2855 bp, Zea Mays
cttatattcacatgcatggcaagacatactaataaacatggccatgtgccaaattaaacaagaactcaattgcacacgaaaaaaaatgggccgagacttatccgaaaggtaagagaactcaattcgaagagaagttggcaccaagcattcgtatggcagccggtcgacggacgcatgcggccggccgcacgcacgcgtcacgcgtgtacgctgctccagccttatcacctatcagttccccatggcaaacgatgccgattagcgaccccgtgccgtcgtgatccatccagcggagaagaagaacaagccacttgcggcggacctgcctgcattctccccttccagagcgccacctgcccggcccttgctggccaccctgaacgagcacaagcgtctcgctgtccggaaccgatcgttccaggcctcggcgctagctagctggtggcgttggcatcagaacccctggcgggcctcgtcgctagtctgcagccctgcagatgattgatgcgaaacgcgcgcgacatctcctctctgtgtgtcgacaacgacgcggccagtgaagttttagaatctaccccgtgcaatcagaggcgtctcgctttcgtgctagctcttcttttccgtgacgagatcttgattggtttggtttgggcccttctggttgcaaaagggcagctagatttgctgtggaaggaaagtgcagccgatgagttgttgatcctggcagacatgccgaccggcgtggacacctgcttctgatacgctgttgctttcggtctggccctgcctgccaggaattttcactgctatcgaatcgaattacagtgttgtggcatgcccatctgtggttgtaaggattatccatgatatttttaaggattatccatggtacttggctacttgccaccgcactacgggcactactgtacatacgaagcacttcatgtagccgagatacagataccagagccacaatgacagcaaatccaggcgacgccgaactgattgtcccccaactccctccatcgccacgcacctcgctgctactgatgatctttagccaaaacagcggacgacatggccatgatctcccacagcgacaatatccacttgagccagtttccttgtccagagaggcagaacccatctgatctacctaaaaagcgcgctatttttatacggccaccaccaggtcagagtcagcaaggcatccggcgcatacagcatacttctctcctccgtcgcaactcgcaactcccgtcccacaaagaccctttttttccaagtctcacctccacacctccgcctctctttctcttgagtcgccttcctcttgttctccacccacacgcgtggcaacgggagagcagcccatgcatggtcttggtctcttgcgcttgccccttgctccttggggagcaagtaggttgaattgaagaagaagcggccgaccgacggttatcaaactgtcgctaaccgcatagagaagaaaggcatccatcctacacagctcctctcgcattgcgcgcgtcgaaatcttgcagttccgatgggggtgggcgcgtcgagcgtgggggcggcggaggggtgcggccgggggtgggggccgcggcacacgtcgctgggcgacatgccggagagctgcgtcgcggcggtgctgctctacctcgacccggccgagatctgccaggtggcctgcctcaaccgggcgttccggggcgcggcctccgccgactgcatttgggccgccaagctgcccgccaaccacaggtacctcgccgcgctcgcggccgcggcagacgacgacgactgcagctgcggctgcgacggcgtggcggccgaaggcagctgttccactgtggcgatcaagaaggagctatacgcgcgcctctgccggcccaccccgttcgacggcggtaccaaattattcgagtaggagttctggatcgagaagaagggaggtttctgcatgtccatctcctcaaaggctatgtcgatcacaggaagaaatgatcggaggtattggagcgacctgtccacagaggaatcaagatctggtggctagaggtggatggtgagatcgacttctgcttccccgccggatcatacagcctattcttccggctccacctgggccggccgcgcacgcgccgagctcgccgccgcggtggctccgacaacgacatccacggctgggacatcaggccggcgcggttccggctctcgacctcggaccaccagcagcacaccaccgcgtccgaggctcacgctcgcctagctagccccggaagatgggtcctttaccacgtcggcgacttcgccgtgtcgagcccagacgaggtgacggagctcaggttctccatgatgcagattgactgcacgcacacgaaaggcggcctgtgcgttgattcggtctgtatataccccaagcgtcacggcgggtacgaggaggactgcgtgttctgccagaagatcttgtaagagcgcttggatcccttggccagcctgtttcttcttcttcttcttcctttcgggatgttctctgtccaaaagggtagtgcgcatattctcttttatttttcttcttcttctttctgagagattttgcatgaacattcacttttttttggggggggggggggggggcaaggtcttattctgtatttagttttggtagtgtcagtaagtagggaggtcaggaagtagatagtaggtaataggattatagcgatttatgattggggcgattgagacgtgtgtgttgaaattgaaacaggtgtttcattacatgtacatagatcttgtgtttatacattattggagacgtatgcttccagtccgtttcacttgatttt

SEQ ID NO: 17602 - DNA, 2900 bp, Zea Mays
actctcgcccttgcattcctttacaagcataagctagaattagctgccccaaaaatgcttatattcacatgcatggcaagacatactaataaacatggccatgtgccaaattaaacaagaactcaattgcacacgaaaaaaaatgggccgagacttatccgaaaggtaagagaactcaattcgaagagaagttggcaccaagcattcgtatggcagccggtcgacggacgcatgcggccggccgcacgcacgcgtcacgcgtgtacgctgctccagccttatcacctatcagttccccatggcaaacgatgccgattagcgaccccgtgccgtcgtgatccatccagcggagaagaagaacaagccacttgcggcggacctgcctgcattctccccttccagagcgccacctgcccggcccttgctggccaccctgaacgagcacaagcgtctcgctgtccggaaccgatcgttccaggcctcggcgctagctagctggtggcgttggcatcagaacccctggcgggcctcgtcgctagtctgcagccctgcagatgattgatgcgaaacgcgcgcgacatctcctctctgtgtgtcgacaacgacgcggccagtgaagttttagaatctaccccgtgcaatcagaggcgtctcgctttcgtgctagctcttcttttccgtgacgagatcttgattggtttggtttgggcccttctggttgcaaaagggcagctagatttgctgtggaaggaaagtgcagccgatgagttgttgatcctggcagacatgccgaccggcgtggacacctgcttctgatacgctgttgctttcggtctggccctgcctgccaggaattttcactgctatcgaatcgaattacagtgttgtggcatgcccatctgtggttgtaaggattatccatgatatttttaaggattatccatggtacttggctacttgccaccgcactacgggcactactgtacatacgaagcacttcatgtagccgagatacagataccagagccacaatgacagcaaatccaggcgacgccgaactgattgtcccccaactccctccatcgccacgcacctcgctgctactgatgatctttagccaaaacagcggacgacatggccatgatctcccacagcgacaatatccacttgagccagtttccttgtccagagaggcagaacccatctgatctacctaaaaagcgcgctatttttatacggccaccaccaggtcagagtcagcaaggcatccggcgcatacagcatacttctctcctccgtcgcaactcgcaactcccgtcccacaaagaccctttttttccaagtctcacctccacacctccgcctctctttctcttgagtcgccttcctcttgttctccacccacacgcgtggcaacgggagagcagcccatgcatggtcttggtctcttgcgcttgccccttgctccttggggagcaagtaggttgaattgaagaagaagcggccgaccgacggttatcaaactgtcgctaaccgcatagagaagaaaggcatccatcctacacagctcctctcgcattgcgcgcgtcgaaatcttgcagttccgatgggggtgggcgcgtcgagcgtgggggcggcggaggggtgcggccgggggtgggggccgcggcacacgtcgctgggcgacatgccggagagctgcgtcgcggcggtgctgctctacctcgacccggccgagatctgccaggtggcctgcctcaaccgggcgttccggggcgcggcctccgccgactgcatttgggccgccaagctgcccgccaaccacaggtacctcgccgcgctcgcggccgcggcagacgacgacgactgcagctgcggctgcgacggcgtggcggccgaaggcagctgttccactgtggcgatcaagaaggagctatacgcgcgcctctgccggcccaccccgttcgacggcggtaccaaagagttctggatcgagaagaagggaggtttctgcatgtccatctcctcaaaggctatgtcgatcacaggaagaaatgatcggaggtattggagcgacctgtccacagaggaatcaagatctggtggctagaggtggatggtgagatcgacttctgcttccccgccggatcatacagcctattcttccggctccacctgggccggccgcgcacgcgccgagctcgccgccgcggtggctccgacaacgacatccacggctgggacatcaggccggcgcggttccggctctcgacctcggaccaccagcagcacaccaccgcgtccgaggctcacgctcgcctagctagccccggaagatgggtcctttaccacgtcggcgacttcgccgtgtcgagcccagacgaggtgacggagctcaggttctccatgatgcagattgactgcacgcacacgaaaggcggcctgtgcgttgattcggtctgtatataccccaagcgtcacggcgggtacgaggaggactgcgtgttctgccagaagatcttgtaagagcgcttggatcccttggccagcctgtttcttcttcttcttcttcctttcgggatgttctctgtccaaaagggtagtgcgcatattctcttttatttttcttcttcttctttctgagagattttgcatgaacattcacttttttttggggggggggggggggggcaaggtcttattctgtatttagttttggtagtgtcagtaagtagggaggtcaggaagtagatagtaggtaataggattatagcgatttatgattggggcgattgagacgtgtgtgttgaaattgaaacaggtgtttcattacatgtacatagatcttgtgtttatacattattggagacgtatgcttccagtccgtttcacttgatttt

SEQ ID NO: 17603 - DNA, 705 bp, Zea Mays
accaattccccaatttttttgtttccattccacaaaaccacaaccgcgcggttttctccctcccccgactcccgcggcgcaagcgcagcccacccaagcgccatggcccccgccgcccccgacgccgacgcctatgatatcccgtgggtggagaagtaccgcccctcccgcgtcgctgacgtcgtcggaaactccgatgccgtcgcccgcctggaggtcattgcccgcgacggcaacatgcccaacctcatcctctccgggcctccggggaccgggaagacgacgagcatcctggcgctggcgcatgagctcctcgggcccagctatcgtgatgccgtgctggagctcaatgcctcagatgacaggggtttggatgttgtgcggaacaagatcaagatgtttgcacagaagaaggtcaccctacagccagggcggcacaaaatcgtgatcttggatgaggctgacagcatgacatcaggagcacagcaagctctgcgaagaacaatggagatctattcaaacaccactagatttgcacttgcatgcaacacatcatcaaagataattgaacccattcaaagccgatgtgctatcgtcaggttctcaaggctctctgatcaggagatcctcggtcgcctcatgattgttgtggcagctgagaagggagattgtcccagtgctgaatgaaagcaaaagagaagagat

SEQ ID NO: 17604 - DNA, 413 bp, Zea Mays
gtgggattcttttttttgtcgagctggtgacgtgtggccaataccagagcgtcttcacggcttgggggcttggcgtagacgaggatgacgatcgacgacctcgacgtgtcagcgcaacgatttccatatgacgaagaagacggagtagccacccctgaattaggctttgtggtcgagcgtctgacgagtgtcgcacgagccttgctgttccaccattggatctgactgaaaactgaccgacttcccatctcctcgccacccgacgtcatgacgaattcatagcgcaggatcgcacccgattctgcaacccacgcgtgtgctgtcaacaggcttgggacctccgtcgagcacacgatgcgcgaagagcgacatcaacaataagcggattttgtgacatcacgcagggaaactcc

SEQ ID NO: 17605 - DNA, 1558 bp, Zea Mays
gcgcctcgccttttgaggagggagcgagcgagagagacggaaagagatacggtgcagggcgctgcgacctgcgactgcgaggagaaagggcggcgccagcttggacttgccggtgccgtcgcgcgcgagagagagaaggaagcgacaacctgcttgccggtgcggcagctctgggcagggcttacacatataataacaagggtggtcgatcagagagcgagggaggagctgaggacaggagggaacaaaagggcaagtttggttcgctccttgctagggcccggtgagctgagctccatatcatccagatccaggtaggtgaggtcgtgaggcgatccaagagatgggcggcggcggcaggaatggcactgtggtgaggcggtacatccggtccaaggagcccaggataaagtggagcgccgacctccaccgcagcttcgtacaggccatagactgcctcggcggccaacacacctggctagctaactgccgttcgtcttggcggtgcaaaatcgcagaggccacgccgaagctcatcctccagttcatggccaccagggggctcaccatatctcatgtcaagagccatctccagatgtacagagctgcgaggcttggcgcaggaaggagagggatgcaagcccagctgctgcaaaggaggcactcatgcactggtgatgagcaagaggagttcctgcgcccaccaccacctctgaaaagggcccggatggggtacgagagcatgcagggactgggaagccatggagtcagtgatgcgcggaccgcagccgctgccgggggcctgtactgcatcgatgattacatgcaagccatggcggccatgggctggagaataaaggaggagggactcaccagatggcagtggcagaggagggatgctgctgcgccttccgacctccaagccatgggatgtttggtgcaagaacctgacccctttaagcagatgcgccgaccagaagcacgccgtcttggttcagcgctgaggaatcagcaggacgactccagcgaagaggacggaaacggatgccccctcctctccagcagcagcttcagcaatgcagcgaacgacgacgagccgtctgatgagcagtgctccctctcgctgtcccttggcctggacacaaaaggcgcccgtgccatggcaacctcctcgccgagcggcgagagcagctgcatcctcacggcggcctcgcctgcgaggaggagctctagcgactgctgctgctccggccattcaggctgcttcgtcggcccgggcgttagcctggaactctccctgtccatctctggatcctacctagatcactccgattctgtacatcgacccggtccggccggctgctcgcgttggtgatcgccgcgcttgttttggatgttcctggcgtcatggccgtgttagaaagttacaagtagccaattccaagttggtagtaggataatgaccgtagaacatgttacttctagctaagctgctacggtactagtcagaaaacgtgtacaatgcgcactgttatatctatcacatttaatttagata

SEQ ID NO: 17606 - DNA, 2014 bp, Zea Mays
gcccaactagtcaacctgcgatcgatcacatgcctacacacttcctatatatagcgactcgctaaaccatggcacggcaccggccacgtacgactcacaagttcacactccacagcaagttcaccactgagtagcagctaccgccatgttgatcgccaccaccatgccacgaggtttcgctttcgcggcgccatgccgcagcctccagacgacgacagtcaggtgcaaggctaccggcgccgccgaccgccgcgacgtgctcctcggcctcggcggggcggcggcgtccggcctcctcaggtcgtcgtcctcgtcgagcagcggcggcgcgcccatccaggcgccggacctccggaactgccacccgcccgacctccccgacacggcggaggatgtgaactgctgcccgagcccggggatcgtcgacttcactccttcgccgcggctccgcgtgcgcccggccgctcacctggtggacgcggagtacgtggccaagtacgagaaggccgtggcgctgatgaagcagctgccggacgacgacccgcgtagcttcgcgcagcagtggcgcgtgcactgcgcctactgcgacggcgcgttcgaccaggtcgggttcccggacctggagatccagatacacaactgctggctcttcttccaatggcacaggttctacctctacttccacgaaaggattcttgggaaactcgtcggcgacgacaagtttgcactgccgttctggaactgggatgcgcccggcggcatgtcgctgccggcgatctacgccgacaagtcctccccgttgtacgatgaaaggcgtgaccctgctcaccagccgccattcacgcttgacctcgactacgacgggaccgagccaaccataccaagagctcagcagatcgatcagaatctaatgatcatgtaccgtcagaaggaactcttctttgggatgccttaccgccagggcgaccagccagatccgggcgcgggcaccgtcgagagcatcccgcacaacccagtacacttctggagcggcgacccgaggcagccgaacggcgaggacatgggcaacttctactccgccgcgcgcgacccgctcttcttcgcgcaccacggcaacatcgaccgcatgtggtcggtctggaacggcctccgccccggcaacagcgacttcaccgaccccagctggctggacgccagcttcctcttctacgacgaggaggcccgcctcgtccgcgtgcgcgtccgggactgcctcgacaccgctgccctgggctacgcctaccaggacgtcgccctgccgtggctgaacgccaagccggccaaggaggccgggtctccggcgcccaccgcgggcgcgctcccggcgacactgaaccagaccgtgcgggtggccgtgacgcggcccaagacctcgaggacccgcaaggagaaggacgccaaggaggaggtgctggtcgtccaggggatcgagatcgctgaccactcgagcaggttcgtcaagttcgacgtgttcgtgaacgactcccagagcgggggcggcatgccggcggcggcgcagtgcgcggggagcgtggcgctgacgccgcacgcggtccggcctgggaagggcaagggcacggtgaagaccgtggcgaggttcggcatatgcgacctgctcgacgacatcggtgctgacggggacaagacgatcatcgtgtcgctcgtgccgaggtgcgccggggacatggtaactgttggtggcgtcgggatcgagtatgtcgggtgaggtcctacgtcctactcctaccggactgagagtacaggtgctaacgcgtagcaacatctgctctacgagtatatatgaggtatatatatacacgaataactgtgtgatgatttacgagtatacctacgtgtatcgcggagtgtgggatttgtgtttgtgctgcccaaacagcaggatgctagaaaaaactcaaagatatttaagttaaaaattttaattcttggatcactattcacaacgtattcaaat

SEQ ID NO: 17607 - DNA, 1479 bp, Zea Mays
atccgctgctgtagctgtactctctctctctctcctctctctcctgctccgagctgtgtatatagaaaaatccagtgtattttccccggtgtgcatatataggctttggaagggggcgcaggggtggaatttcgggaatcgatttgtagtggggcatgtaagcttgtgggagaggaaagcagcaggagacgaaggtagtagacaaggaaaagtatgccaaagaaaatgagagaacaaccttcttagcttctcctccagtctctctccaccaccgctctatctcctcggtaggaagaagagcaagcaagagaggagcaagctagctagcggtacaagggagagtgagcggcgaaggggacggacgaattgaagaacacctgccagtccgatcgagctggtggtgccgccaggataaatcgggaggtatatgatggcgtcgaattcaccggcggcggcgttctttggtgttagggatggggaccagcaagaccaccagattaagccgctgatatcaccgcagcagcagcagcagctggcagcggcactgcccagcgtggcgtccggccaaggcgcgccgacggcggcggcgcagccaccgcccaagaagaagaggactatgcccgacccagacgctgaggtgatcgccctgtcgcccaagacgctgatggcgaccaacaggttcgtgtgcgaggtgtgcagcaaggggttccagcgagagcagaacctgcagctgcaccggcgcgggcacaacctgccgtggaagctgaagcagaaggacccgctgcaggcgcagcggcggcgcgtgtacctgtgcccggagccgacgtgcgcgcaccacgacccggcgcgcgccctgggcgacctgacggggatcaagaagcacttcagccgcaagcacggcgagaagaagtggaagtgcgacaagtgctccaagcgctacgccgtgcagtcggactggaaggcgcactccaagatctgcggcacccgcgagtaccgctgcgactgcggcacgctcttctcccggagggacagcttcatcacgcaccgggcgttctgcgacgcgctcgcgcaggagagcgcgcggctgccgccgaccagcagcctcagcaacctcaccagccacctctacggcgccgccaccaacgcgggcaacatggcgctcagtctctcgcaggtaatttacaggggaacttattggttccgcttctggagtcaaatgcagaaggctgaagatgataaagagttgataaagacagcgtgtctgaagatggagaatgtcgtcatggagattttcagcaagtatggatggaggttcaccaataggatttgtagttaggtgcttttatccaaactttgttttctgcattaacttggtcaatatggcgtgttgagtattgtaataaggggctgtagcttctttgaagccaaggctggatgattatttccattatctaaaaaaacctggtgtgccggttcctg

SEQ ID NO: 17608 - DNA, 1429 bp, Zea Mays
cgagagggcaagccccacgcagtgggtagtggacccaatcctcagacgctacacgacaccgttttgcctgcgtctgcgtgcgtgagcttgcccccgctcccatccgctgctgtagctgtactctctctctctctcctctctctcctgctccgagctgtgtatatagaaaaatccagtgtattttccccggtgtgcatatataggctttggaagggggcgcaggggtggaatttcgggaatcgatttgtagtggggcatgtaagcttgtgggagaggaaagcagcaggagacgaaggtagtagacaaggaaaagtatgccaaagaaaatgagagaacaaccttcttagcttctcctccagtctctctccaccaccgctctatctcctcggtaggaagaagagcaagcaagagaggagcaagctagctagcggtacaagggagagtgagcggcgaaggggacggacgaattgaagaacacctgccagtccgatcgagctggtggtgccgccaggataaatcgggaggtatatgatggcgtcgaattcaccggcggcggcgttctttggtgttagggatggggaccagcaagaccaccagattaagccgctgatatcaccgcagcagcagcagcagctggcagcggcactgcccagcgtggcgtccggccaaggcgcgccgacggcggcggcgcagccaccgcccaagaagaagaggactatgcccgacccagacgctgaggtgatcgccctgtcgcccaagacgctgatggcgaccaacaggttcgtgtgcgaggtgtgcagcaaggggttccagcgagagcagaacctgcagctgcaccggcgcgggcacaacctgccgtggaagctgaagcagaaggacccgctgcaggcgcagcggcggcgcgtgtacctgtgcccggagccgacgtgcgcgcaccacgacccggcgcgcgccctgggcgacctgacggggatcaagaagcacttcagccgcaagcacggcgagaagaagtggaagtgcgacaagtgctccaagcgctacgccgtgcagtcggactggaaggcgcactccaagatctgcggcacccgcgagtaccgctgcgactgcggcacgctcttctcccggtaatttacaggggaacttattggttccgcttctggagtcaaatgcagaaggctgaagatgataaagagttgataaagacagcgtgtctgaagatggagaatgtcgtcatggagattttcagcaagtatggatggaggttcaccaataggatttgtagttaggtgcttttatccaaactttgttttctgcattaacttggtcaatatggcgtgttgagtattgtaataaggggctgtagcttctttgaagccaaggctggatgattatttccattatctaaaaaaacctggtgtgccggttcctg

SEQ ID NO: 17609 - DNA, 1519 bp, Zea Mays
atctaaaagagccaagacaacaccagcgaaaggcttttgctggtgtgcgagcgtgtgatggcgagagggcaagccccacgcagtgggtagtggacccaatcctcagacgctacacgacaccgttttgcctgcgtctgcgtgcgtgagcttgcccccgctcccatccgctgctgtagctgtactctctctctctctcctctctctcctgctccgagctgtgtatatagaaaaatccagtgtattttccccggtgtgcatatataggctttggaagggggcgcaggggtggaatttcgggaatcgatttgtagtggggcatgtaagcttgtgggagaggaaagcagcaggagacgaaggtagtagacaaggaaaagtatgccaaagaaaatgagagaacaaccttcttagcttctcctccagtctctctccaccaccgctctatctcctcggtaggaagaagagcaagcaagagaggagcaagctagctagcggtacaagggagagtgagatcaatcccaagcacgtacgtatgagaagcggcgaaggggacggacgaattgaagaacacctgccagtccgatcgagctggtggtgccgccaggataaatcgggaggtatatgatggcgtcgaattcaccggcggcggcgttctttggtgttagggatggggaccagcaagaccaccagattaagccgctgatatcaccgcagcagcagcagcagctggcagcggcactgcccagcgtggcgtccggccaaggcgcgccgacggcggcggcgcagccaccgcccaagaagaagaggactatgcccgacccagacgctgaggtgatcgccctgtcgcccaagacgctgatggcgaccaacaggttcgtgtgcgaggtgtgcagcaaggggttccagcgagagcagaacctgcagctgcaccggcgcgggcacaacctgccgtggaagctgaagcagaaggacccgctgcaggcgcagcggcggcgcgtgtacctgtgcccggagccgacgtgcgcgcaccacgacccggcgcgcgccctgggcgacctgacggggatcaagaagcacttcagccgcaagcacggcgagaagaagtggaagtgcgacaagtgctccaagcgctacgccgtgcagtcggactggaaggcgcactccaagatctgcggcacccgcgagtaccgctgcgactgcggcacgctcttctcccggtaatttacaggggaacttattggttccgcttctggagtcaaatgcagaaggctgaagatgataaagagttgataaagacagcgtgtctgaagatggagaatgtcgtcatggagattttcagcaagtatggatggaggttcaccaataggatttgtagttaggtgcttttatccaaactttgttttctgcattaacttggtcaatatggcgtgttgagtattgtaataaggggctgtagcttctttgaagccaaggctggatgattatttccattatctaaaaaaacctggtgtgccggttcctg

SEQ ID NO: 17610 - DNA, 2590 bp, Zea Mays
atggctgggaggaccgcgcccgcctccctcccctccttctccctcacgcccgactccctcgctgcccctttatcctggatctcgtcatggacgctaccacgaccaacgattgatatcatgtccaagttcttcaagctgatggtggttctacaattaatgaatgatttgaacgaagtgttcaagatgccgctatctcttgtattgaggcttatagtgtgcttgaggttcttcgacctctctataattcccctaagatactggaacaaaagtcttcctcctcgtctgccccaatgtcggcaagtcagccctcttcaacaggtgagagacaccttaggaaggcatcggtcattgcctctcgcctgtagtttctatgccgctatgaggggtggtggcatttcctcaaatacgttgcatgtatcactgtaactgttcttccccttccgttaccattaacccatgcatctaattacttgtatattttacgttaccgttttcctgttctcaacatttcagattctagatgatggtacgacaaattattttaggagcgctttgacataatttaaagcttggaagggagctttctatgatttatttttctgactgtttcgtcacatgttctttccctagatgaaagtattgatttatttttggttctgcaggatcattgcgtctctgcgagctaatcagttctgtgagcgtctccctagccccaatggcgagtcaactgttgattgtcatcagatctcaaagatgccaaatcttgcattcaccattgcaaacaagactttcaccttaacaccagagcagtacatagtgaagttggagcaagcaggacaaactatctgcatcaatgggtttatggcatttgacgttaaacatgaagaagtcatcgggctcgggctcggtgtcgttggcgcggagcatcccggagctgtacgaggagaggggagccagcaacctccgggagttcgggttccaggagctccgggccgccaccagcgactccagccgcctgctcaaggtcggcgaggtggcttcgggagcgtttacaagggcgtcgtccgccttcctggcgggcccgccggcggcacggtagttgccataaaaaactcaatcccaatggtcatcagaagttcaaggttatctcattctggcatatctcatttgcctgctgatgaagtgaagcctttggttaaatatgataatgatgaagatgcacactcacctggtggccgtggaaggggtcgtggtggtcgaggccgtgggcggggcaggggcagaggtggacgtggaaatgggttcaatgagtatgctgatgctggttgggaagacgatcacgcccctgcatatatgggcaatggatatgcccgcggaagaggtcgcagtttcaggggccgtggtaggagaggcgacgacgataaccagcctgaataccaacatgtcggaggtttcaaaggcatgagagtgatgagggtcaaaaatctgaacctctacgcttttggtttatatatgcaaccaacttctatccgtgagaagttgggtcctaagtatgcttcatttccaactgacaagctgatggagaaccctgatttctatagaaatgggttcaatgagtatgatgatgctggttgggaagacgatcactcccctgcatatatgggcaatggatatgcccgtggaagaggtcgcagtttcaggggccgtggtaggagaggcggcgacaataaccagcctgaataccaacaggtcggaggttattacgagtgttcatgctccagctttagattttcaccatttgtaatggaactgaaaccagcctctcatcgaagtggaaacctttttttagtcgtaaacatttacatggtttatccagtggtcctgtgtacgtcaaattttgtccacattgaaccagtacgaatgacatcttccttgaaagttatagaaatgcttcaaagttcaaatggcattcagcatattccatgtgctgctatttcagcactcatttctcgtgctggcaatgcaaactggaataggaagggtttgctcctcatccaatcgaattgggcaccgatggtgaaggcctacgggcactcgcgcttgaagaactccgagtacttggaggcgcggcagctcgtcgatgcggaaggcctcgcagccgctcttgcacgcaaggatgctgtcggccgaggagcgcagctacagctcgccggggcagctctcagtgaggttttcttgcggcaggcgaggacgggacagttgtcgcggccctcgtgcggggtcacggacaggcccacattgaagtcgtccaccacgctcacgccgtacgaggtctggtcgttgtcgtggtggaggttcaccccacgctagcgtcgtgggcaccgcgtcgccgagcccgccgcagtccccgtggcgcagtggagctgcgcgccggcgccggcgtagcccgtgcgcgtccagatgctgccagaccaggggtgggccggcgccaggaacgacttgtgggagagcggcgggaggaatcacaactgttggtgcttgctggtcgattatcaccactccaatagataccatcaagactcggctttag

SEQ ID NO: 17611 - DNA, 1921 bp, Zea Mays
atgggtgctgacaccttgctgcggagcggcggcgagcctggctccatcgagaggcggcggcgtggggaatatctagggttcctcggaacccgagccccagcacacagacaccgcgcccgcggacactgctcgctccccttctcctccgtcgccgccaccgcagaagcctctaccacgcgcgaccagctcgccgccgcacccgccggggccgacggcctgcacgcgctcgccgagcaggtggtgcagctcgtgctcgccgacggctccggcgccagcagcccgcgcgtcgccttcgccgacggcgtcttcgtcgactcctcgctgaagctcaagccggccttcgaggaggtcgccgtgggaaagtacagggccgacacccagtccgtcgacttccagaaaaaggttgatttgatccccttcccaccgagctcccgaacacttgtgtcctgctaccgtagttcatactcttatgacagtggtcatatcaaccagaacttatcaaggaagtgtgaagcattagttgtgtcaggtttggcagaatatggtgatgaaatagatgggattgccccagctgatatcatgaagattcagcctatcctgcaagaagatctgaaactagatttttcaaaatcacgtacaaataagacagggaatgctgaaattactaagaggagaaggatggtcgtgatagatgaggtgttaagccaagatgagacaccattcttgtacagcctcgtgtttggtgaaggtgttgtcaatgacacaacttctgttgtgttgttcaatgcaatccagaactttgatcctggaaatatcagcggtgccaaattactgaacttcattagcagtttcctttatttgtttggctccagcaccattcttggagtagcttctggacttcttagtgcttataccattaagaagttgtactttggcaggcattcaacctatcgtgaagtttccattatgatgctaatggcttatttatcttacatgctagctgaattgctcgatttgagtggaattctcactgtgtttttctgcggtgtcgtaatgtcacactatacttggcacaatgtaacagaaagttcaagggtcacaaccaagcatgcctttgcaacattgtcgtttatctccgagacttttctgtttctttatgttggtatggatgcattggatatagagaagtggaagattgtcggtcaaacttatagcccggtaaagtctatcgctttgagcagcaccattttagccttggtgctggtttcaagagctgcttttgttttcccactatcctttctatcaaatttgaccaaaaaaactccaaatggaaagatatcttttaggcagcaggttctgtggcagtgcgaggcattttgggaggtggtgctgcttgatttttggcggtgcatgccgggtgttcgacaatgtttctgaggttttgtggcagtgtgaggcattttgggagggacatcatcatgcccaacttgaagtcgtccgtgaccacaacagcgagcgcggtgaggccaagaatgaggattcacgaacactgcaattcaattatggttcattcaaacataaggcattggataaattcttaactaaaaaggtcgttgctgtttgtgaatgtggtttggattatgacagacttcagttctgtccgacagatatgcaaaaaaagtactttgagaaacaatttgagttggctgaagcagtaaagctgcccatttttcttcacatgtgtgctgctggtgaagacttctatgaaatcatgacacaaaatttgcacagattccctggtggggttacacattccttcactgactccgcagaagatcgggataggctactttcttttgagaagatgtttatcggcaagttcttgaggtagtggctagaagcaaagaaatttctgacatag

SEQ ID NO: 17612 - DNA, 2512 bp, Zea Mays
atgggtgctgacaccttgctgcggagcggcggcgagcctggctccatcgagaggcggcggcgtggggaatatctagggttcctcggaacccgagccccagcacacagacaccgcgcccgcggacactgctcgctccccttctcctccgtcgccgccaccgcagaagcctctaccacgcgcgaccagctcgccgccgcacccgccggggccgacggcctgcacgcgctcgccgagcaggtggtgcagctcgtgctcgccgacggctccggcgccagcagcccgcgcgtcgccttcgccgacggcgtcttcgtcgactcctcgctgaagctcaagccggccttcgaggaggtcgccgtgggaaagtacagggccgacacccagtccgtcgacttccagaaaaaggttgatttgatccccttcccaccgagctcccgaacacttgtgtcctgctaccgtagttcatactcttatgacagtggtcatatcaaccagaacttatcaaggaagtgtgaagcattagttgtgtcaggtttggcagaatatggtgatgaaatagatgggattgccccagctgatatcatgaagattcagcctatcctgcaagaagatctgaaactagatttttcaaaatcacgtacaaataagacagggaatgctgaaattactaagaggagaaggatggtcgtgatagatgaggtgttaagccaagatgagacaccattcttgtacagcctcgtgtttggtgaaggtgttgtcaatgacacaacttctgttgtgttgttcaatgcaatccagaactttgatcctggaaatatcagcggtgccaaattactgaacttcattagcagtttcctttatttgtttggctccagcaccattcttggagtagcttctggacttcttagtgcttataccattaagaagttgtactttggcaggcattcaacctatcgtgaagtttccattatgatgctaatggcttatttatcttacatgctagctgaattgctcgatttgagtggaattctcactgtgtttttctgcggtgtcgtaatgtcacactatacttggcacaatgtaacagaaagttcaagggtcacaaccaagtaagtagcttcataccttctgtatgaacatttgcttttgatcatgcattctttggtaatgcttatgttaatgtactattggatggatcacaggcatgcctttgcaacattgtcgtttatctccgagacttttctgtttctttatgttggtatggatgcattggatatagagaagtggaagattgtcggtcaaacttatagcccggtaaagtctatcgctttgagcagcaccattttagccttggtgctggtttcaagagctgcttttgttttcccactatcctttctatcaaatttgaccaaaaaaactccaaatggaaagatatcttttaggcagcaggttattgtttggtgggcgggtctcatgagaggtgttgtgtctattgcgttggcttacaataaggctgcagtgccacacaagttcgtttggtgtaggtgctgcttgatttttggcggtgcatgccgggtgttcgacaatgtttctgaggttttgtggcagtgtgaggcattttgggagggacatcatcatgcccaacttgaagtcgtccgtgaccacaacagcgagcgcggtgaggccaagaatgaggattcacgaacactgcaattcaattatggttcattcaaacataagggatttttgaagcactaactgcattccccttctccccttctcccttcctgctgtcgttgctgtttgtgaatgtggtttggattatgacagacttcagttctgtccgacagatatgcaaaaaaagtactttgagaaacaatttgagttggctgaagcagtaaagctgcccatttttcttcacatgtgtgctgctggtgaagacttctatgaaatcatgacacaaaatttgcacagattccctggtggggttacacattccttcactgactcaacagaagatcaggataggctactttcttttgagaagatgtttatcggtgttaatggttcctctctgaaaactaaccgaaatcttgaggttctacgaggcattcctgtcgagaggttgatgatggaaacatattctccatattgtgacataataaatactcatgctggaagccagtatgtaaaatctgtctggccatccaagaagaaagaaaagtatgagccagattcaacagtaaaaggtcgcaatgagccttgtttagtcaggtactttgagaaacaatttgagttggctgaagcagtaaaactgcccatgtttcttcacatgcgtgctgttggtgaagacttatgtgaaatcatgacacagaatttgcacagattccctggtggggttacacattccttcactgactccgcagaagatcgggataggctactttcttttgagaagatgtttatcggcaagttcttgaggtagtggctagaagcaaagaaatttctgacatag

SEQ ID NO: 17613 - DNA, 2394 bp, Zea Mays
atgggtgctgacaccttgctgcggagcggcggcgagcctggctccatcgagaggcggcggcgtggggaatatctagggttcctcggaacccgagccccagcacacagacaccgcgcccgcggacactgctcgctccccttctcctccgtcgccgccaccgcagaagcctctaccacgcgcgaccagctcgccgccgcacccgccggggccgacggcctgcacgcgctcgccgagcaggtggtgcagctcgtgctcgccgacggctccggcgccagcagcccgcgcgtcgccttcgccgacggcgtcttcgtcgactcctcgctgaagctcaagccggccttcgaggaggtcgccgtgggaaagtacagggccgacacccagtccgtcgacttccagaaaaaggttgatttgatccccttcccaccgagctcccgaacacttgtgtcctgctaccgtagttcatactcttatgacagtggtcatatcaaccagaacttatcaaggaagtgtgaagcattagttgtgtcaggtttggcagaatatggtgatgaaatagatgggattgccccagctgatatcatgaagattcagcctatcctgcaagaagatctgaaactagatttttcaaaatcacgtacaaataagacagggaatgctgaaattactaagaggagaaggatggtcgtgatagatgaggtgttaagccaagatgagacaccattcttgtacagcctcgtgtttggtgaaggtgttgtcaatgacacaacttctgttgtgttgttcaatgcaatccagaactttgatcctggaaatatcagcggtgccaaattactgaacttcattagcagtttcctttatttgtttggctccagcaccattcttggagtagcttctggacttcttagtgcttataccattaagaagttgtactttggcaggcattcaacctatcgtgaagtttccattatgatgctaatggcttatttatcttacatgctagctgaattgctcgatttgagtggaattctcactgtgtttttctgcggtgtcgtaatgtcacactatacttggcacaatgtaacagaaagttcaagggtcacaaccaagcatgcctttgcaacattgtcgtttatctccgagacttttctgtttctttatgttggtatggatgcattggatatagagaagtggaagattgtcggtcaaacttatagcccggtaaagtctatcgctttgagcagcaccattttagccttggtgctggtttcaagagctgcttttgttttcccactatcctttctatcaaatttgaccaaaaaaactccaaatggaaagatatcttttaggcagcaggttattgtttggtgggcgggtctcatgagaggtgttgtgtctattgcgttggcttacaataaggctgcagtgccacacaagttcgtttggtgtaggtgctgcttgatttttggcggtgcatgccgggtgttcgacaatgtttctgaggttttgtggcagtgtgaggcattttgggagggacatcatcatgcccaacttgaagtcgtccgtgaccacaacagcgagcgcggtgaggccaagaatgaggattcacgaacactgcaattcaattatggttcattcaaacataaggcattggataaattcttaactaaaaaggtcgttgctgtttgtgaatgtggtttggattatgacagacttcagttctgtccgacagatatgcaaaaaaagtactttgagaaacaatttgagttggctgaagcagtaaagctgcccatttttcttcacatgtgtgctgctggtgaagacttctatgaaatcatgacacaaaatttgcacagattccctggtggggttacacattccttcactgactcaacagaagatcaggataggctactttcttttgagaagatgtttatcggtgttaatggttcctctctgaaaactaaccgaaatcttgaggttctacgaggcattcctgtcgagaggttgatgatggaaacatattctccatattgtgacataataaatactcatgctggaagccagtatgtaaaatctgtctggccatccaagaagaaagaaaagtatgagccagattcaacagtaaaaggtcgcaatgagccttgtttagtcaggtactttgagaaacaatttgagttggctgaagcagtaaaactgcccatgtttcttcacatgcgtgctgttggtgaagacttatgtgaaatcatgacacagaatttgcacagattccctggtggggttacacattccttcactgactccgcagaagatcgggataggctactttcttttgagaagatgtttatcggcaagttcttgaggtagtggctagaagcaaagaaatttctgacatag

SEQ ID NO: 17614 - DNA, 1983 bp, Zea Mays
atgggtgctgacaccttgctgcggagcggcggcgagcctggctccatcgagaggcggcggcgtggggaatatctagggttcctcggaacccgagccccagcacacagacaccgcgcccgcggacactgctcgctccccttctcctccgtcgccgccaccgcagaagcctctaccacgcgcgaccagctcgccgccgcacccgccggggccgacggcctgcacgcgctcgccgagcaggtggtgcagctcgtgctcgccgacggctccggcgccagcagcccgcgcgtcgccttcgccgacggcgtcttcgtcgactcctcgctgaagctcaagccggccttcgaggaggtcgccgtgggaaagtacagggccgacacccagtccgtcgacttccagaaaaaggttgatttgatccccttcccaccgagctcccgaacacttgtgtcctgctaccgtagttcatactcttatgacagtggtcatatcaaccagaacttatcaaggaagtgtgaagcattagttgtgtcaggtttggcagaatatggtgatgaaatagatgggattgccccagctgatatcatgaagattcagcctatcctgcaagaagatctgaaactagatttttcaaaatcacgtacaaataagacagggaatgctgaaattactaagaggagaaggatggtcgtgatagatgaggtgttaagccaagatgagacaccattcttgtacagcctcgtgtttggtgaaggtgttgtcaatgacacaacttctgttgtgttgttcaatgcaatccagaactttgatcctggaaatatcagcggtgccaaattactgaacttcattagcagtttcctttatttgtttggctccagcaccattcttggagtagcttctggacttcttagtgcttataccattaagaagttgtactttggcaggcattcaacctatcgtgaagtttccattatgatgctaatggcttatttatcttacatgctagctgaattgctcgatttgagtggaattctcactgtgtttttctgcggtgtcgtaatgtcacactatacttggcacaatgtaacagaaagttcaagggtcacaaccaagcatgcctttgcaacattgtcgtttatctccgagacttttctgtttctttatgttggtatggatgcattggatatagagaagtggaagattgtcggtcaaacttatagcccggtaaagtctatcgctttgagcagcaccattttagccttggtgctggtttcaagagctgcttttgttttcccactatcctttctatcaaatttgaccaaaaaaactccaaatggaaagatatcttttaggcagcaggttattgtttggtgggcgggtctcatgagaggtgttgtgtctattgcgttggcttacaataaggctgcagtgccacacaagttcgtttggtgtaggtgctgcttgatttttggcggtgcatgccgggtgttcgacaatgtttctgaggttttgtggcagtgtgaggcattttgggagggacatcatcatgcccaacttgaagtcgtccgtgaccacaacagcgagcgcggtgaggccaagaatgaggattcacgaacactgcaattcaattatggttcattcaaacataaggcattggataaattcttaactaaaaaggtcgttgctgtttgtgaatgtggtttggattatgacagacttcagttctgtccgacagatatgcaaaaaaagtactttgagaaacaatttgagttggctgaagcagtaaagctgcccatttttcttcacatgtgtgctgctggtgaagacttctatgaaatcatgacacaaaatttgcacagattccctggtggggttacacattccttcactgactccgcagaagatcgggataggctactttcttttgagaagatgtttatcggcaagttcttgaggtagtggctagaagcaaagaaatttctgacatag

SEQ ID NO: 17615 - DNA, 1809 bp, Zea Mays
atgggtgctgacaccttgctgcggagcggcggcgagcctggctccatcgagaggcggcggcgtggggaatatctagggttcctcggaacccgagccccagcacacagacaccgcgcccgcggacactgctcgctccccttctcctccgtcgccgccaccgcagaagcctctaccacgcgcgaccagctcgccgccgcacccgccggggccgacggcctgcacgcgctcgccgagcaggtggtgcagctcgtgctcgccgacggctccggcgccagcagcccgcgcgtcgccttcgccgacggcgtcttcgtcgactcctcgctgaagctcaagccggccttcgaggaggtcgccgtgggaaagtacagggccgacacccagtccgtcgacttccagaaaaaggttgatttgatccccttcccaccgagctcccgaacacttgtgtcctgctaccgtagttcatactcttatgacagtggtcatatcaaccagaacttatcaaggaagtgtgaagcattagttgtgtcaggtttggcagaatatggtgatgaaatagatgggattgccccagctgatatcatgaagattcagcctatcctgcaagaagatctgaaactagatttttcaaaatcacgtacaaataagacagggaatgctgaaattactaagaggagaaggatggtcgtgatagatgaggtgttaagccaagatgagacaccattcttgtacagcctcgtgtttggtgaaggtgttgtcaatgacacaacttctgttgtgttgttcaatgcaatccagaactttgatcctggaaatatcagcggtgccaaattactgaacttcattagcagtttcctttatttgtttggctccagcaccattcttggagtagcttctggacttcttagtgcttataccattaagaagttgtactttggcaggcattcaacctatcgtgaagtttccattatgatgctaatggcttatttatcttacatgctagctgaaaaagttcaagggtcacaaccaagcatgcctttgcaacattgtcgtttatctccgagacttttctgtttctttatgttggtatggatgcattggatatagagaagtggaagattgtcggtcaaacttatagcccggtaaagtctatcgctttgagcagcaccattttagccttggtgctggtttcaagagctgcttttgttttcccactatcctttctatcaaatttgaccaaaaaaactccaaatggaaagatatcttttaggcagcaggtgctgcttgatttttggcggtgcatgccgggtgttcgacaatgtttctgaggttttgtggcagtgtgaggcattttgggagggacatcatcatgcccaacttgaagtcgtccgtgaccacaacagcgagcgcggtgaggccaagaatgaggattcacgaacactgcaattcaattatggttcattcaaacataaggcattggataaattcttaactaaaaaggtcgttgctgtttgtgaatgtggtttggattatgacagacttcagttctgtccgacagatatgcaaaaaaagtactttgagaaacaatttgagttggctgaagcagtaaagctgcccatttttcttcacatgtgtgctgctggtgaagacttctatgaaatcatgacacaaaatttgcacagattccctggtggggttacacattccttcactgactccgcagaagatcgggataggctactttcttttgagaagatgtttatcggcaagttcttgaggtagtggctagaagcaaagaaatttctgacatag

SEQ ID NO: 17616 - DNA, 2283 bp, Zea Mays
atgggtgctgacaccttgctgcggagcggcggcgagcctggctccatcgagaggcggcggcgtggggaatatctagggttcctcggaacccgagccccagcacacagacaccgcgcccgcggacactgctcgctccccttctcctccgtcgccgccaccgcagaagcctctaccacgcgcgaccagctcgccgccgcacccgccggggccgacggcctgcacgcgctcgccgagcaggtggtgcagctcgtgctcgccgacggctccggcgccagcagcccgcgcgtcgccttcgccgacggcgtcttcgtcgactcctcgctgaagctcaagccggccttcgaggaggtcgccgtgggaaagtacagggccgacacccagtccgtcgacttccagaaaaaggttgatttgatccccttcccaccgagctcccgaacacttgtgtcctgctaccgtagttcatactcttatgacagtggtcatatcaaccagaacttatcaaggaagtgtgaagcattagttgtgtcaggtttggcagaatatggtgatgaaatagatgggattgccccagctgatatcatgaagattcagcctatcctgcaagaagatctgaaactagatttttcaaaatcacgtacaaataagacagggaatgctgaaattactaagaggagaaggatggtcgtgatagatgaggtgttaagccaagatgagacaccattcttgtacagcctcgtgtttggtgaaggtgttgtcaatgacacaacttctgttgtgttgttcaatgcaatccagaactttgatcctggaaatatcagcggtgccaaattactgaacttcattagcagtttcctttatttgtttggctccagcaccattcttggagtagcttctggacttcttagtgcttataccattaagaagttgtactttggcaggcattcaacctatcgtgaagtttccattatgatgctaatggcttatttatcttacatgctagctgaattgctcgatttgagtggaattctcactgtgtttttctgcggtgtcgtaatgtcacactatacttggcacaatgtaacagaaagttcaagggtcacaaccaagcatgcctttgcaacattgtcgtttatctccgagacttttctgtttctttatgttggtatggatgcattggatatagagaagtggaagattgtcggtcaaacttatagcccggtaaagtctatcgctttgagcagcaccattttagccttggtgctggtttcaagagctgcttttgttttcccactatcctttctatcaaatttgaccaaaaaaactccaaatggaaagatatcttttaggcagcaggttattgtttggtgggcgggtctcatgagaggtgttgtgtctattgcgttggcttacaataaggctgcagtgccacacaagttcgtttggtgtaggtgctgcttgatttttggcggtgcatgccgggtgttcgacaatgtttctgaggttttgtggcagtgtgaggcattttgggagggacatcatcatgcccaacttgaagtcgtccgtgaccacaacagcgagcgcggtgaggccaagaatgaggattcacgaacactgcaattcaattatggttcattcaaacataaggcattggataaattcttaactaaaaaggtcgttgctgtttgtgaatgtggtttggattatgacagacttcagttctgtccgacagatatgcaaaaaaagtactttgagaaacaatttgagttggctgaagcagtaaagctgcccatttttcttcacatgtgtgctgctggtgaagacttctatgaaatcatgacacaaaatttgcacagattccctggtggggttacacattccttcactgactcaacagaagatcaggataggctactttcttttgagaagatgtttatcggtgttaatggttcctctctgaaaactaaccgaaatcttgaggttctacgaggcattcctgtcgagaggttgatgatggaaacatattctccatattgtgacataataaatactcatgctggaagccagtatgtaaaatctgtctggccatccaagaagaaagaaaagtatgagccagattcaacagtaaaaggtcgcaatgagccttgtttagtcagattccctggtggggttacacattccttcactgactccgcagaagatcgggataggctactttcttttgagaagatgtttatcggcaagttcttgaggtagtggctagaagcaaagaaatttctgacatag

SEQ ID NO: 17617 - DNA, 2202 bp, Zea Mays
atgggtgctgacaccttgctgcggagcggcggcgagcctggctccatcgagaggcggcggcgtggggaatatctagggttcctcggaacccgagccccagcacacagacaccgcgcccgcggacactgctcgctccccttctcctccgtcgccgccaccgcagaagcctctaccacgcgcgaccagctcgccgccgcacccgccggggccgacggcctgcacgcgctcgccgagcaggtggtgcagctcgtgctcgccgacggctccggcgccagcagcccgcgcgtcgccttcgccgacggcgtcttcgtcgactcctcgctgaagctcaagccggccttcgaggaggtcgccgtgggaaagtacagggccgacacccagtccgtcgacttccagaaaaaggttgatttgatccccttcccaccgagctcccgaacacttgtgtcctgctaccgtagttcatactcttatgacagtggtcatatcaaccagaacttatcaaggaagtgtgaagcattagttgtgtcaggtttggcagaatatggtgatgaaatagatgggattgccccagctgatatcatgaagattcagcctatcctgcaagaagatctgaaactagatttttcaaaatcacgtacaaataagacagggaatgctgaaattactaagaggagaaggatggtcgtgatagatgaggtgttaagccaagatgagacaccattcttgtacagcctcgtgtttggtgaaggtgttgtcaatgacacaacttctgttgtgttgttcaatgcaatccagaactttgatcctggaaatatcagcggtgccaaattactgaacttcattagcagtttcctttatttgtttggctccagcaccattcttggagtagcttctggacttcttagtgcttataccattaagaagttgtactttggcaggcattcaacctatcgtgaagtttccattatgatgctaatggcttatttatcttacatgctagctgaattgctcgatttgagtggaattctcactgtgtttttctgcggtgtcgtaatgtcacactatacttggcacaatgtaacagaaagttcaagggtcacaaccaagtaagtagcttcataccttctgtatgaacatttgcttttgatcatgcattctttggtaatgcttatgttaatgtactattggatggatcacaggcatgcctttgcaacattgtcgtttatctccgagacttttctgtttctttatgttggtatggatgcattggatatagagaagtggaagattgtcggtcaaacttatagcccggtaaagtctatcgctttgagcagcaccattttagccttggtgctggtttcaagagctgcttttgttttcccactatcctttctatcaaatttgaccaaaaaaactccaaatggaaagatatcttttaggcagcaggtcgttgctgtttgtgaatgtggtttggattatgacagacttcagttctgtccgacagatatgcaaaaaaagtactttgagaaacaatttgagttggctgaagcagtaaagctgcccatttttcttcacatgtgtgctgctggtgaagacttctatgaaatcatgacacaaaatttgcacagattccctggtggggttacacattccttcactgactcaacagaagatcaggataggctactttcttttgagaagatgtttatcggtgttaatggttcctctctgaaaactaaccgaaatcttgaggttctacgaggcattcctgtcgagaggttgatgatggaaacatattctccatattgtgacataataaatactcatgctggaagccagtatgtaaaatctgtctggccatccaagaagaaagaaaagtatgagccagattcaacagtaaaaggtcgcaatgagccttgtttagtcagatttaaaagggatagtggggaaacaccattttccgttggtcaagcaattaactcgcctaagttagtgtactttgagaaacaatttgagttggctgaagcagtaaaactgcccatgtttcttcacatgcgtgctgttggtgaagacttatgtgaaatcatgacacagaatttgcacagattccctggtggggttacacattccttcactgactccgcagaagatcgggataggctactttcttttgagaagatgtttatcgaagcatccaagtaa

SEQ ID NO: 17618 - DNA, 2460 bp, Zea Mays
atgggtgctgacaccttgctgcggagcggcggcgagcctggctccatcgagaggcggcggcgtggggaatatctagggttcctcggaacccgagccccagcacacagacaccgcgcccgcggacactgctcgctccccttctcctccgtcgccgccaccgcagaagcctctaccacgcgcgaccagctcgccgccgcacccgccggggccgacggcctgcacgcgctcgccgagcaggtggtgcagctcgtgctcgccgacggctccggcgccagcagcccgcgcgtcgccttcgccgacggcgtcttcgtcgactcctcgctgaagctcaagccggccttcgaggaggtcgccgtgggaaagtacagggccgacacccagtccgtcgacttccagaaaaaggttgatttgatccccttcccaccgagctcccgaacacttgtgtcctgctaccgtagttcatactcttatgacagtggtcatatcaaccagaacttatcaaggaagtgtgaagcattagttgtgtcaggtttggcagaatatggtgatgaaatagatgggattgccccagctgatatcatgaagattcagcctatcctgcaagaagatctgaaactagatttttcaaaatcacgtacaaataagacagggaatgctgaaattactaagaggagaaggatggtcgtgatagatgaggtgttaagccaagatgagacaccattcttgtacagcctcgtgtttggtgaaggtgttgtcaatgacacaacttctgttgtgttgttcaatgcaatccagaactttgatcctggaaatatcagcggtgccaaattactgaacttcattagcagtttcctttatttgtttggctccagcaccattcttggagtagctgtaagttatatgctcttccgcttctagctttgctaaagtttactgacatgtgtttttttctgcagtctggacttcttagtgcttataccattaagaagttgtactttggcaggcattcaacctatcgtgaagtttccattatgatgctaatggcttatttatcttacatgctagctgaattgctcgatttgagtggaattctcactgtgtttttctgcggtgtcgtaatgtcacactatacttggcacaatgtaacagaaagttcaagggtcacaaccaagcatgcctttgcaacattgtcgtttatctccgagacttttctgtttctttatgttggtatggatgcattggatatagagaagtggaagattgtcggtcaaacttatagcccggtaaagtctatcgctttgagcagcaccattttagccttggtgctggtttcaagagctgcttttgttttcccactatcctttctatcaaatttgaccaaaaaaactccaaatggaaagatatcttttaggcagcaggttattgtttggtgggcgggtctcatgagaggtgttgtgtctattgcgttggcttacaataaggtgctgcttgatttttggcggtgcatgccgggtgttcgacaatgtttctgaggttttgtggcagtgtgaggcattttgggagggacatcatcatgcccaacttgaagtcgtccgtgaccacaacagcgagcgcggtgaggccaagaatgaggattcacgaacactgcaattcaattatggttcattcaaacataaggcattggataaattcttaactaaaaaggtcgttgctgtttgtgaatgtggtttggattatgacagacttcagttctgtccgacagatatgcaaaaaaagtactttgagaaacaatttgagttggctgaagcagtaaagctgcccatttttcttcacatgtgtgctgctggtgaagacttctatgaaatcatgacacaaaatttgcacagattccctggtggggttacacattccttcactgactcaacagaagatcaggataggctactttcttttgagaagatgtttatcggtgttaatggttcctctctgaaaactaaccgaaatcttgaggttctacgaggcattcctgtcgagaggttgatgatggaaacatattctccatattgtgacataataaatactcatgctggaagccagtatgtaaaatctgtctggccatccaagaagaaagaaaagtatgagccagattcaacagtaaaaggtcgcaatgagccttgtttagtcagatttaaaagggatagtggggaaacaccattttccgttggtcaagcaattaactcgcctaagttagtgtactttgagaaacaatttgagttggctgaagcagtaaaactgcccatgtttcttcacatgcgtgctgttggtgaagacttatgtgaaatcatgacacagaatttgcacagattccctggtggggttacacattccttcactgactccgcagaagatcgggataggctactttcttttgagaagatgtttatcgaagcatccaagtaa

SEQ ID NO: 17619 - DNA, 1114 bp, Zea Mays
atgggtgctgacaccttgctgcggagcggcggcgagcctggctccatcgagaggcggcggcgtggggaatatctagggttcctcggaacccgagccccagcacacagacaccgcgcccgcggacactgctcgctccccttctcctccgtcgccgccaccgcagaagcctctaccacgcgcgaccagctcgccgccgcacccgccggggccgacggcctgcacgcgctcgccgagcaggtggtgcagctcgtgctcgccgacggctccggcgccagcagcccgcgcgtcgccttcgccgacggcgtcttcgtcgactcctcgctgaagctcaagccggccttcgaggaggtcgccgtgggaaagtacagggccgacacccagtccgtcgacttccagaaaaaggttgatttgatccccttcccaccgagctcccgaacacttgtgtcctgctaccgtagttcatactcttatgacagtggtcatatcaaccagaacttatcaaggaagtgtgaagcattagttgtgtcaggtttggcagaatatggtgatgaaatagatgggattgccccagctgatatcatgaagattcagcctatcctgcaagaagatctgaaactagatttttcaaaatcacgtacaaataagacagggaatgctgaaattactaagaggagaaggatggtcgtgatagatgaggtgttaagccaagatgagacaccattcttgtacagcctcgtgtttggtgaaggtgttgtcaatgacacaacttctgttgtgttgttcaatgcaatccagaactttgatcctggaaatatcagcggtgccaaattactgaacttcattagcagtttcctttatttgtttggctccagcaccattcttggagtagcttctggacttcttagtgcttataccattaagaagttgtactttggcaggcattcaacctatcgtgaagtttccattatgatgctaatggcttatttatcttacatgctagctgaattgctcgatttgagtggaattctcactgtgtttttctgcggtgtcgtaatgtcacactatacttggcacaatgtaacagaaagttcaagggtcacaaccaagttctgtg

SEQ ID NO: 17620 - DNA, 762 bp, Zea Mays
attctctcctttcctccactgaaactggatcgcaaaaatgaatcacctgctgctcgcgccgtccaggtgctcccgccgataggttcgtcggctccctccatccgccgtgtcctgctgccgcacctccctgctccaggcgcacagggtcgacaccttcaccagtgccccaggctcaggccggttcctgcgtgggaggcgacgtgtcacggcggcggcacctgctcatggcagggcggaagcacccaggagatggaggaacctccacgattcttcagcgatatttttgcagagaaccacgccgatctgtcatgggatctcgacggctccatattctgaggcaacaaggtatagaggctattgcaaagctgaacagtgcaagtggcgtatacatgcttcacaattgcaggatggaaggacttgggagataaagaagatgccttttgaacacacttgtcaaagcacagggaaagttgagaagaactgcatggcaacaaatcattgggtcaaggatcgagttctagattggcttgcaaaggacaataagattggagctaaagaattaaagaaaaggctagaggagcagtatcatctgaaattgtcatactgggtagtttgggatggaagaaagaaggctttggagcaactcaaagggaagtgggatgatagttttgagtgtattttcagtttcaagacagaggtggagaagaccaatccaggcagtttggtagacattgaatatgagaaagttgggaagaaaatgag

SEQ ID NO: 17621 - DNA, 3811 bp, Zea Mays
aaacccctcagtctttggagaccaggtgaacaaaagacttgtgtgatgaagccaatgcctaggaatgtttagatggcaaatgattatggtgatgaatgataatctaatggtccatgcatgtgaaaggtacctgaataatgcaaccggtgggatctctctcgctgtccggcagtcccttctccaacgcccatgccgccatgcgcatatatgtttctatgcaagcacgcgcgtgctctcgaggtctcgccaaccgcacgcacatacaaaataaagtacattttcgccaggaagagaaacaggtcacaacctgtcagtttgtcgacactcgacagttttttgcaggacatcgctgtcgcgtttacagtgaacaaacaatggcacaacaagattataaagtacaagatgctgttagtagtgataatagttgacgagagccttcctttttgtaaagaaaaataacccatacatgtattggcgtgatctgtctttcagaaggaaaacggttactataccggcattgccttcacaagtggagatgggccacgcgatttccagtgatgcgtgtgcctaccttataacaattcgtagtctttaacctaagtttgaaatagaggataagataagaaacctgctatttacatagtgaaatttgaaatataggatgagataaaagacatgctgaaaatggccttaaaagattaaacagtagcataattcttcgttacgaaataatgacaccggcatctaagctacggtacaagataggatattcttttgacaagagtgagcagtgcaccttcagtgggtcggtgcaaagttgtggtatgtagggctgcacatgcatctgttgtgagacatactgtggaaaagactgcggtctgcagtctgcacaggtacaaagaccttaccattgcggccatggcgtcgcgttggtgcgccagggaagtttcaaggctgcaatcaagtgcttctagactgtagcacgtaggatgtggatcagaggatacaaggaaaggagtgtctggacaccccgtcgcaactggagagccttttatcttggagctctcagctctccaaccgaagccagaacatacagcatacaaattaattaatactgctctgaagaaaaataaccatgtaacaaggaaatcattcctcctgcggatcagcttcaaacggatgacaaaatgctgtaattgacatcacttcgccacaaacacaaatgtacataagcggcattggcaaaaaaaaatagcaacagaaaataactttagccaagtaattttcactacaactcctaatttaaggttttaaaacgtaaacacaatgggcagcaagactaacttattatcatgaagtcatgacagaatcacaatgagcagcaagcctgtaacttatcatcacctttgcacactaatccttattctacctttccaatcttcgaaaaaacattgtacgggcacggattctatctacagctgaaaaacacaaacggtcgctgcagccattccacagtgttccgttgagtggctcgcagccacagctgcagcggcaggtgccgctttggctcaagcgagcatagtttttaaaattatttgcagctaatatagctatgtacatttgcaaaggtgataatctctggcagattcaataacagagtatcttgtttccaattctcagcaatcagaaagcaaagagcctaataaggcaacaaacttgcagcattagccgcatttattggtgcctcaattaaattaaaaggttggacgggatgaagcttttattatgatctataaactaccaccattagccgccagagactggtacctgtagttggttttaaatacaatcttcatcaaaaggaaactgagaacagaacaacaagctctttttataatgcatttggctaatagctaattagacaaaagcccttcttggaagacagcaaactgttaccaaaatgcccatttgtatccagcaccaagaaaacgtgtggagctaaatgatacctgatgaaatgtcaacgtaaatatggagaatatggtcacaaaaaaaccatcctaactaatatgatccaagaaccaaaaccagttactagatgctatatcacaactaccaaacttcactttcaagagaagggcctggtggtcctaactttcagaaaagaaacaagaggcaaagcatggatatccagcactgagcatgcgtacaatctattctaattgaggagaataagatgtgaaggtatggatcacttgctttctaaaagcagggttaaaccttgatctaaaaaaagaataagagatgaagggtattattaagagccctcatgccgaatgcgtctttgttgtttactctatgttgacaccttccgtatcaaccactaggaacaggttcatctcaggtgggtggggactgacataagggctctagaagcatttttcccttattattgtgtgctgacattaacatggataaagggatagctgcatgcctgaatctacattgaatttttcagtagtggtgtgcaggatacatgctcacagtcacactggttcagtcaaaagtgcttgtgctaatgggagagttgctaaaagggcaatatctttcactacagtcactacaaatctctattgaaattatagtaagttgcaaggacttctttgtgaagtataggatacatactcacaacttccattttttttacaaaaaacggctagatattacattaatattttacagaaaataccacacagcataaggggaacttttgttaaagctatcttcaacggtctctcatatcacatctcttattttaaactccactttataaacagtgtaatctacggtctaacatctcttattttaaactccactccgtaaacaatgtagcctgtaaaacagtattttacaaaaacagtgttttacacgacaatatgtgtgatctgctgcaaacagccttaggtctacctgttctaggatctagccttttgagctggattcaaacagcaatgcaagtttgcaaccatatcggccggttatccttgatagctgattagatgagcatctatgttttgcagaaatacaaatcatcaggaggtaattgtgctacagccagaggcggatttgagccctagaccacctgagccatggcttgtgttaaagtattgttaagagtttcggggttaatccttgtgtatttacttgcatacccactatttcggggctagtccttgtgtaaacgggtcaacttaccatggcgaaagctacaccagctgcagctcttgctgcctccctgaaaatggtggctccagcaataccaagcctcccacctcgtccacgcttgctcctcgcaactctccagcgccgccccagcgcccacatcagcagcaccccagtggtggctcgggtggcggctctggatcttcgcagcagtgctggaaacgcggcaagcgcgatggtggacacactcctggtggcagcagccacacctttggtgcccccaactcatccatggaccatgggccacaactactacaacccctggacggacgccatctatgtggctggggcaacgtcctccctcttcctcttcttcacgtcctcctgctgggccgacctagcagtcacacgctctcatcgccggaacgcccggacagtggggtgtcccgctgcagcttatgggcctccacctggctatgttggcccggtctcctctccgcctggttgggaccaacacaccttggccaccaacttccagaccatgactcttcaacgaccacaagactggtattttggtactggtgcttag

SEQ ID NO: 17622 - DNA, 740 bp, Zea Mays
ggcaaaggtcgtggccacgcattattggaaaaatattagtatagatctgttgctttagtggtaccttgtacgtgcttttcgtcatgtacggttcactaaacatctgcaggatggaagagtggatcagctcatcagcatggtggttaactttttttaaaaaaaatatttagcaatcaacttgtcagcattactaggcttcagaaaaaaagaaaagaaaaggtagactaatggctgtgagagtgtgtaatcgaccctttccccccttggtctatctattggtgtctgaagtctggaaaaggacagcatggttgttgcacaggacttgggcatgacttggaagtccactgacaaaaggtcaatgtggtatgctcactgaaaccagggcaaatggctggtccactgtatgtatatattatcttggatggtagtatattacataattacacggcctactcacatttctcagatacagtttatataaacctggtgacgattaaggatcttagcttgtttctcaatctcaacttagtgctgctccctctatcttaaaattatatgatgtttgtttttctttattacattgtatatcgagacatagcgtatatttaaatacgtagtaaaagctactcatctagaaaaacaaaacgtttataattgagaactgattgagtagttacaaacatatatcagatattgcaaatcgtgtacatggagttacccggatctgctcatgaagaaat

SEQ ID NO: 17623 - DNA, 1905 bp, Zea Mays
acctttctgcaaatacagtagcatactcgcatagatagatccaaccatatttcgatcctcttcaggacgtttccacctccatcaccgctggtcggctatgtgcatcgcggcatgggcgtggcactgccacccgacgcaccgcctgcttctgctgttcaatcgcgacgagtatcactccagggcagcctttgtccattggagtatgccacagaaattgcaaaggaagcagatcagtacaacggctttaaccttatattggctgatgtgaactcaggaaccatggtttacatctctaatagacccggaggcgatcctgtgattcaaacagttgctcctgggcttcatgtgctttcgaatgctgcaattaattccccttggccaaaggtaagagtgtaagatatacatggattttagaaagatattgtgaatgttaggaacacaattatttttggaagttgtaatacacttcaaagttgagattctggttctttgaagaatctaatgccacaatacttgtttggtcatggctgtagtctcgacagtccaggtctatttgatcttccatcagtttattatggaaaagtcctattagtgaaacaccagaatgctcatgtaccttgcactttgttgtgacatgctagctctgccttcttaatgccattcttcgatggtttttattgttgattgttaggttatttcatcagtaaatgctcttatgttattcattgatgttacaagtccatgatcgtctgcagttaatatatggaaactagtattccataatggaacttgcacaattatgttctaccctataatgatgcctaagatatctattggagtcaaatgacgggtctatgtgtattatctttgctttctctgaaactgagcagataacttggtcaatttagctgcataggtttattcttcgtgttggtttagtagttctggatttcataagttttatgtaacactatgggctatattctagtttcatcaagtaaacctagtcttgttcacttcatatgtgctctgctccctagtccctattattaagtattgatgtacatataccatcattttctactcttttaagtaattttcagactaagtatcttccaataatttaaaatcaaacaattgtcgaacatggtttacttgtggcattcgtttctcaccgtgcaggcaatgcgcttaggacagagtttcaaaaggtatttgacaatacacgatgatgcagaagcctctttaaaacaaatggtagaagagttgatgatggatactgccagacctgatagatctatggtgcctgacaccggcgacgaccctgagtgggagtacaagctaagctcaatattcattgacactgcaaaggaacaggcacgatatggaacacgaagcatggtggcactagcagcgaaattggaaggtgaggtaacattctatgaaaggtacttggagaacagtttgtggaaggagaatctcatacagttccagatggagaaggcacaataggacttgagagaaacttaagaacactcgcaaagactggtcgattgcttattattttgctatcactttatctttaaagtgtatagcaaggcatatacaagagcagtgtataatatggctactattaattacccttttgtgcagatgtacagtaatgtttatccaaataccacaagaagaattggttgcatgtgctattccccccttgccgctgtataattttggaggacatcaattctttgctggcacaaaattgctgaaactacaatgtcaccctatgattctttatatgctttgtgcctgtattggagagtacaccaagagtgtttcaactgaggtcacatctgtatccaatccaaagtcagatgggcataaattaggatattacatctgact

SEQ ID NO: 17624 - DNA, 1098 bp, Zea Mays
acctttctgcaaatacagtagcatactcgcatagatagatccaaccatatttcgatcctcttcaggacgtttccacctccatcaccgctggtcggctatgtgcatcgcggcatgggcgtggcactgccacccgacgcaccgcctgcttctgctgttcaatcgcgacgagtatcactccaggaaccatggtttacatctctaatagacccggaggcgatcctgtgattcaaacagttgctcctgggcttcatgtgctttcgaatgctgcaattaattccccttggccaaaggcaatgcgcttaggacagagtttcaaaaggtatttgacaatacacgatgatgcagaagcctctttaaaacaaatggtagaagagttgatgatggatactgccagacctgatagatctatggtgcctgacaccggcgacgaccctgagtgggagtacaagctaagctcaatattcattgacactgcaaaggaacaggcaaaaaccatggtgttcagtatttcagtagctaccattattctgtttggaaataaattatatccatttttcttcttgatttcaggcacgatatggaacacgaagcatggtggcactagcagcgaaattggaaggtgaggtaacattctatgaaaggtacttggagaacagtttgtggaaggagaatctcatacagttccagatggagaaggcacaataggacttgagagaaacttaagaacactcgcaaagactggtcgattgcttattattttgctatcactttatctttaaagtgtatagcaaggcatatacaagagcagtgtataatatggctactattaattacccttttgtgcagatgtacagtaatgtttatccaaataccacaagaagaattggttgcatgtgctattccccccttgccgctgtataattttggaggacatcaattctttgctggcacaaaattgctgaaactacaatgtcaccctatgattctttatatgctttgtgcctgtattggagagtacaccaagagtgtttcaactgaggtcacatctgtatccaatccaaagtcagatgggcataaattaggatattacatctgact

SEQ ID NO: 17625 - DNA, 1107 bp, Zea Mays
acctttctgcaaatacagtagcatactcgcatagatagatccaaccatatttcgatcctcttcaggacgtttccacctccatcaccgctggtcggctatgtgcatcgcggcatgggcgtggcactgccacccgacgcaccgcctgcttctgctgttcaatcgcgacgagtatcactccagggcagcctttgtccattggagtatgccacagaaattgcaaaggaagcagatcagtacaacggctttaaccttatattggctgatgtgaactcaggaaccatggtttacatctctaatagacccggaggcgatcctgtgattcaaacagttgctcctgggcttcatgtgctttcgaatgctgcaattaattccccttggccaaaggcaatgcgcttaggacagagtttcaaaaggtatttgacaatacacgatgatgcagaagcctctttaaaacaaatggtagaagagttgatgatggatactgccagacctgatagatctatggtgcctgacaccggcgacgaccctgagtgggagtacaagctaagctcaatattcattgacactgcaaaggaacaggcacgatatggaacacgaagcatggtggcactagcagcgaaattggaaggtgaggtaacattctatgaaaggtacttggagaacagtttgtggaaggagaatctcatacagttccagatggagaaggcacaataggacttgagagaaacttaagaacactcgcaaagactggtcgattgcttattattttgctatcactttatctttaaagtgtatagcaaggcatatacaagagcagtgtataatatggctactattaattacccttttgtgcagatgtacagtaatgtttatccaaataccacaagaagaattggttgcatgtgctattccccccttgccgctgtataattttggaggacatcaattctttgctggcacaaaattgctgaaactacaatgtcaccctatgattctttatatgctttgtgcctgtattggagagtacaccaagagtgtttcaactgaggtcacatctgtatccaatccaaagtcagatgggcataaattaggatattacatctgact

SEQ ID NO: 17626 - DNA, 320 bp, Zea Mays
accaaaacctcgtcccaaaacaccggccactcggagcggcggccgcagccacggccgctgcggagggacccgacgacactcatgcgccacggcgccaatagcacactacaaaacccgtcgagaatcgtgagcttgggactcacctgcatcagagcgatcgccgcagcggcgaaggtgacaaacccgcgccggcgcccgacggtgaccatcctgtctccggttcgtcctcgatatctcgcggcagcgctaaatgccgaagcggagggaggcgacgcgggaggggcacccgcacagcacagactagcgtgtggggactgggg

SEQ ID NO: 17627 - DNA, 333 bp, Zea Mays
tagtctcaagaaaaaaagagaggctagagaaacatggtagaaggaactgaaatacataaatactcaagacaatcgcataaatactcaaatctaacaaataaatattctaattagcagcaagcttgatcatgaaaaatgaattagcagaaaaggacctgaaccgagtcatgagggctcttgccatttttgttcatgttcgacttattatctgaattcctcaatggctttgcttgcaagggggaagcagttcttcctcgtgttctgtataacaaaccccatagcagaaaagcgcataatagtgcaaggtaaataaccactagtgagaagtccaag

SEQ ID NO: 17628 - DNA, 97 bp, Zea Mays
attgcatcagctgtactttctctgtttaattcatcttggatagagctctcggacgaaaaggacaacgttagattctgtgctaataccattggacgta

SEQ ID NO: 17629 - DNA, 321 bp, Zea Mays
tttttttcctttcctcttaatataatgaggcagttctcctgcgttttcgagaaaaaagagattcgactatatgagaaatttaaaagtagattgcctcctggcagaaaattttagttgtcttttttgtgcaattttaaaactaactgtttgcgctggttacatgcagttttacagaatagcaaaggtgttcgttgttcgcggaaaatatggttgtttgtaaaatgtatggtatttgcaaaatagtctgctcaatctaaaccacaaaattatatgggttcacacatgatatttttcacttatataaaattatttcaaatcaag

SEQ ID NO: 17630 - DNA, 182 bp, Zea Mays
tggaaaacactctggttgcaggcattggattgattgcactcacagcaaaagctagtacttcagcaaaactggctaatgtaatagatggcccaacttccaccagtgcatcacttatccgctcttccaaatttgactgatctggttggcgtttgacagcatgcacaaggatacacatgttatcg

SEQ ID NO: 17631 - DNA, 102 bp, Zea Mays
atcaccagcacctgtacttggtgtgattctcgcacaaggaacacaatcaattctgccatcctgtgccctcctaatgtcaaatacaataagggctacaaaggc

SEQ ID NO: 17632 - DNA, 3393 bp, Zea Mays
ggcgcttctccaccttccgcttccggcttccacgtttttacctctccgtccgtcggtccgcccgcgcgcgtaaccccatcattgcgccatcacccagccacccgcattggccatcgccgcgccggacgaccagaccaaatgccaccgatcgccataatggcgggcaggtacgagtaggaaggagaggggggtatgggtatacactgcccgcctgctccatcactccactccagtctccagagacctctgaagagcccgcgtcgtacttgtacccgttcgttcgcgcgcccgcagcgtagcgcaggcacgccacgcgatggggtgcaaggggtccaagcttgacgaccaggaggccgtcgcgctctgccgcgcccgcgccgagctgctcgccgcggccgtccgccaccgctacgcgctcgccgacgcgcacgcggccctcgcggactccatcgactcggtcgccgcgccgctgcaccgcctcctccgtctgcaggctcagccgcgggggctcgtactgccctccgcgcgcaagggcggtggcgcgcccgcgaaccggttgctgccgcgctccttcgacccgtcctcggcgctgcctgcccacggccattcctcgcaaccccagttcggcgcgtcgccgggatccgagccggcgccgacggccgactcgcctccgcgccgccgccgccgcgtacccgagcagctgccgcacccgcattacgccgcgtacgggtacgactacgcgacgcagcccgcgtacgcgtatccggcgccggcgagctcgctgcagttctactacgctcgcagccgcccgccccccgcgtcagtcgccgtcacgcagcgcgcgccggggacgtcggagcgcgtgcactttggctcgttcgacgcggcgggcggctacccgcagcactacgcctacagcgcccagcgggcccaggccccgcctccggttgcgccgcagcggtctgctccgccttcgcctccgaaggcgagctcgtgggacttcctgaacgtgttcgagaactacgactcgtacgaacacgacagctactactacgactccgccacggcacctgctgcgcccgcggcgccgttcatgccgagccggagttcgcgggaggtgcgcgaggaggagggtattccggacctagaagacgacggcgaggaagacagcgtgggcgtggtcgtgaaagaggtggccgggcagtactcagcacctgggaatggcggtgcccgtagccggcgcaactcgctcggcggtgccagtagcaccgccgagctcgaccagccggagaatgctatcgcccataaggacgtcatcggcgagtttcggcgaaggccaacagcacatggtaatgtgtcggtgcacgcgccaccacctcccgcgcggagggtcgtcgacaatgcgagtgtagctggcgaaatcaaggcacagcttgtccgcacggccgaggcggctaggcagctcgcgccgatgctcgaagtcggaaggccaagctaccaaggccgcagctcagtctaccaatgttcctcaaagatgatgtcggctatctccgtggctcatttggggtgcaaagacatggacgtgttggacgtcggagtggtagggaagatggtggacacgcggagcctatcctcggcacttgacaagctctatttctgggagaggaagctgtatgctgaggtcaaggctgaggagaaaacgcgcctacttattgccaagaactccaagcgactgaaattattagatcaaaagggtacagagcctgaaaagatagatgaaactcgaaatttgttgaggaagctttcaacaaagataaggatagctgtgcgcgttattgccaagatttcaagaaaaataaacaaattaagggatgaggaattgtggccacaagttaacgctttgattcaagggtggaaatggccaggatttggtgttagagcttgaggtagagctgattaaatggatcatcagtttttcttcttgggtgaattcacaaaggaactttgtaaaggcactgaatggatggctagcactctgtcttaactatgagcctgaggataatactactggagctccatcttactcaccaggaagcattggtgctccactggttttcgttacctgcaacaaatggtctcaagccatggatcggatttctgagaaggatgtggttaatgccatgcaagctctagtgtctagcgtgtggcacctatgggagcagcagtatcttgagcaaagtgaacaaataatctcgatgcgagaaagggaaaaatggatcaagattttagagagaagaacccaggatattaataaggaggctgatgagctaaacaagaagttggcgttaataccaagccggcaaaggatgcatgtgcctcggagagtacaactgtatgaggcgcactgtgttgaggcaagtaacttgcacataaatctgaggctggttcttgaagctttagagaactttgctgccaattcactgcaagctttccaggatgtggcaaaaagtgctgaagggacaagactgccaagagataatgtgagaagagagcaccgtagttcggaaagaagttcaaactacaaaactagctagttagatttgaatctattcttatctaggtgggatgaaaatataatgtgaggagagatgcagatctggtagcgttcaggtgtggtggcttcctgtgcagatgaaacttggatggggtcttgcattgtgccacaggtaaaacaacttgaatggggttttgagctgttgaagatctgacattgaagaagtttgggggtgagtgatagaattttttttggggggcaagaattaaaagaaatcctaccagaaagagagtttggacagtgttcaggttcgttgtttgccttggttcagggacgtgtatatacccctcgtggcctcgttgaacaaccgcgaggttatactgggtgcgaagaccgagcagaaatatgcggtacggctgtcgcttctacgaatggtcctctccaaaatcaaagcagttggattttggttacatgtgcattcctgaacgatcttttgccacacgaacttgtacatatttatggtgtatctgcaatcatcttactttgcagaagtcttgtaggccggtagcaattgagctgtccgtgtttccagcagactctgaatttgttgtttcctgtaaattacattttaacttttccttctccaagacaatgctaacgcaaacagtttggcagcaaaacgaactgaaaagagggactcctcacggtggacgcatcgtcgctgacggattggtggattctgttagcatgtgaagctacgaagctatgtcttacatttatattaagagatcattaatataaacttaggtcggttaattatatcaggtttatcttcaagc
